United States Patent Application Publication US 2007/0214517 A1 - sequence listing, part 78

SEQ ID NO: 101364 - DNA, 1618 bp, Arabidopsis thaliana
  misc_feature (1)..(1618): Ceres Seq. ID no. 13607653
  misc_feature: MA Experiment ID: 108434 Result: Down-regulated in Transcription
  misc_feature: MA Experiment 108434 PARAMETER Experiment Name: At_Root_Tips_cDNA_P Parameter: Tissue Value: Root Tips
  misc_feature: MA Experiment ID: 108461 Result: Up-regulated in Transcription
  misc_feature: MA Experiment 108461 PARAMETER Experiment Name: At_Germinating_Seeds_cDNA_P Parameter: Age (day) Value: 1 vs. 0
  misc_feature: MA Experiment 108461 PARAMETER Experiment Name: At_Germinating_Seeds_cDNA_P Parameter: Tissue Value: Germinating Seeds
  misc_feature: MA Experiment ID: 108462 Result: Up-regulated in Transcription
  misc_feature: MA Experiment 108462 PARAMETER Experiment Name: At_Germinating_Seeds_cDNA_P Parameter: Age (day) Value: 2 vs. 0
  misc_feature: MA Experiment 108462 PARAMETER Experiment Name: At_Germinating_Seeds_cDNA_P Parameter: Tissue Value: Germinating Seeds
  misc_feature: MA Experiment ID: 108463 Result: Up-regulated in Transcription
  misc_feature: MA Experiment 108463 PARAMETER Experiment Name: At_Germinating_Seeds_cDNA_P Parameter: Age (day) Value: 3 vs. 0
  misc_feature: MA Experiment 108463 PARAMETER Experiment Name: At_Germinating_Seeds_cDNA_P Parameter: Tissue Value: Germinating Seeds
  misc_feature: MA Experiment ID: 108464 Result: Up-regulated in Transcription
  misc_feature: MA Experiment 108464 PARAMETER Experiment Name: At_Germinating_Seeds_cDNA_P Parameter: Age (day) Value: 4 vs. 0
  misc_feature: MA Experiment 108464 PARAMETER Experiment Name: At_Germinating_Seeds_cDNA_P Parameter: Tissue Value: Germinating Seeds
  misc_feature: MA Experiment ID: 108561 Result: Down-regulated in Transcription
  misc_feature: MA Experiment 108561 PARAMETER Experiment Name: At_100uM_ABA_cDNA_P Parameter: Timepoint (hr) Value: 6
  misc_feature: MA Experiment 108561 PARAMETER Experiment Name: At_100uM_ABA_cDNA_P Parameter: Tissue Value: Aerial
  misc_feature: MA Experiment 108561 PARAMETER Experiment Name: At_100uM_ABA_cDNA_P Parameter: Treatment Value: 100uM ABA vs. No Treatment
  misc_feature: MA Experiment ID: 108577 Result: Down-regulated in Transcription
  misc_feature: MA Experiment 108577 PARAMETER Experiment Name: At_42deg_Heat_cDNA_P Parameter: Temperature (deg C) Value: 42 vs. 22
  misc_feature: MA Experiment 108577 PARAMETER Experiment Name: At_42deg_Heat_cDNA_P Parameter: Timepoint (hr) Value: 6
  misc_feature: MA Experiment 108577 PARAMETER Experiment Name: At_42deg_Heat_cDNA_P Parameter: Tissue Value: Aerial
  misc_feature: MA Experiment ID: 108585 Result: Down-regulated in Transcription
  misc_feature: MA Experiment 108585 PARAMETER Experiment Name: At_5mM_NaNP_cDNA_P Parameter: Timepoint (hr) Value: 6
  misc_feature: MA Experiment 108585 PARAMETER Experiment Name: At_5mM_NaNP_cDNA_P Parameter: Tissue Value: Aerial
  misc_feature: MA Experiment 108585 PARAMETER Experiment Name: At_5mM_NaNP_cDNA_P Parameter: Treatment Value: null
  misc_feature: MA Experiment ID: 108595 Result: Down-regulated in Transcription
  misc_feature: MA Experiment 108595 PARAMETER Experiment Name: At_Ler-pi_Ovule_cDNA_P Parameter: Plant Line Value: null
  misc_feature: MA Experiment ID: 108605 Result: Down-regulated in Transcription
  misc_feature: MA Experiment 108605 PARAMETER Experiment Name: At_100uM_ABA_cDNA_P Parameter: Timepoint (hr) Value: 6
  misc_feature: MA Experiment 108605 PARAMETER Experiment Name: At_100uM_ABA_cDNA_P Parameter: Tissue Value: Aerial
  misc_feature: MA Experiment 108605 PARAMETER Experiment Name: At_100uM_ABA_cDNA_P Parameter: Treatment Value: 100uM ABA vs. No Treatment
  misc_feature: MA Experiment ID: 108607 Result: Down-regulated in Transcription
  misc_feature: MA Experiment 108607 PARAMETER Experiment Name: At_100uM_ABA_cDNA_P Parameter: Timepoint (hr) Value: 4
  misc_feature: MA Experiment 108607 PARAMETER Experiment Name: At_100uM_ABA_cDNA_P Parameter: Tissue Value: Aerial
  misc_feature: MA Experiment 108607 PARAMETER Experiment Name: At_100uM_ABA_cDNA_P Parameter: Treatment Value: 100uM ABA vs. No Treatment
  misc_feature: MA Experiment ID: 108668 Result: Down-regulated in Transcription
  misc_feature: MA Experiment 108668 PARAMETER Experiment Name: At_2mM_SA_cDNA_P Parameter: Plant Line Value: WS
  misc_feature: MA Experiment 108668 PARAMETER Experiment Name: At_2mM_SA_cDNA_P Parameter: Timepoint (hr) Value: 6
  misc_feature: MA Experiment 108668 PARAMETER Experiment Name: At_2mM_SA_cDNA_P Parameter: Treatment Value: 2mM SA vs. No Treatment
  misc_feature: MA Experiment ID: 20000069 Result: Down-regulated in Transcription
  misc_feature: MA Experiment 20000069 PARAMETER Experiment Name: At_100uM_ABA_Mutants_cDNA_P Parameter: Plant Line Value: CS23
  misc_feature: MA Experiment 20000069 PARAMETER Experiment Name: At_100uM_ABA_Mutants_cDNA_P Parameter: Timepoint (hr) Value: 6
  misc_feature: MA Experiment 20000069 PARAMETER Experiment Name: At_100uM_ABA_Mutants_cDNA_P Parameter: Tissue Value: Aerial
  misc_feature: MA Experiment 20000069 PARAMETER Experiment Name: At_100uM_ABA_Mutants_cDNA_P Parameter: Treatment Value: 100uM ABA vs. No Treatment
  misc_feature: MA Experiment ID: 20000070 Result: Down-regulated in Transcription
  misc_feature: MA Experiment 20000070 PARAMETER Experiment Name: At_100uM_ABA_Mutants_cDNA_P Parameter: Plant Line Value: CS24
  misc_feature: MA Experiment 20000070 PARAMETER Experiment Name: At_100uM_ABA_Mutants_cDNA_P Parameter: Timepoint (hr) Value: 6
  misc_feature: MA Experiment 20000070 PARAMETER Experiment Name: At_100uM_ABA_Mutants_cDNA_P Parameter: Tissue Value: Aerial
  misc_feature: MA Experiment 20000070 PARAMETER Experiment Name: At_100uM_ABA_Mutants_cDNA_P Parameter: Treatment Value: 100uM ABA vs. No Treatment
  misc_feature: MA Experiment ID: 20000071 Result: Down-regulated in Transcription
  misc_feature: MA Experiment 20000071 PARAMETER Experiment Name: At_100uM_ABA_Mutants_cDNA_P Parameter: Plant Line Value: CS8104
  misc_feature: MA Experiment 20000071 PARAMETER Experiment Name: At_100uM_ABA_Mutants_cDNA_P Parameter: Timepoint (hr) Value: 6
  misc_feature: MA Experiment 20000071 PARAMETER Experiment Name: At_100uM_ABA_Mutants_cDNA_P Parameter: Tissue Value: Aerial
  misc_feature: MA Experiment 20000071 PARAMETER Experiment Name: At_100uM_ABA_Mutants_cDNA_P Parameter: Treatment Value: 100uM ABA vs. No Treatment
  misc_feature: MA Experiment ID: 20000072 Result: Down-regulated in Transcription
  misc_feature: MA Experiment 20000072 PARAMETER Experiment Name: At_100uM_ABA_Mutants_cDNA_P Parameter: Plant Line Value: CS8105
  misc_feature: MA Experiment 20000072 PARAMETER Experiment Name: At_100uM_ABA_Mutants_cDNA_P Parameter: Timepoint (hr) Value: 6
  misc_feature: MA Experiment 20000072 PARAMETER Experiment Name: At_100uM_ABA_Mutants_cDNA_P Parameter: Tissue Value: Aerial
  misc_feature: MA Experiment 20000072 PARAMETER Experiment Name: At_100uM_ABA_Mutants_cDNA_P Parameter: Treatment Value: 100uM ABA vs. No Treatment
  misc_feature: MA Experiment ID: 20000086 Result: Down-regulated in Transcription
  misc_feature: MA Experiment 20000086 PARAMETER Experiment Name: At_100uM_ABA_Mutants_cDNA_P Parameter: Plant Line Value: CS22
  misc_feature: MA Experiment 20000086 PARAMETER Experiment Name: At_100uM_ABA_Mutants_cDNA_P Parameter: Timepoint (hr) Value: 6
  misc_feature: MA Experiment 20000086 PARAMETER Experiment Name: At_100uM_ABA_Mutants_cDNA_P Parameter: Tissue Value: Aerial
  misc_feature: MA Experiment 20000086 PARAMETER Experiment Name: At_100uM_ABA_Mutants_cDNA_P Parameter: Treatment Value: 100uM ABA vs. No Treatment
  misc_feature: MA Experiment ID: 20000087 Result: Down-regulated in Transcription
  misc_feature: MA Experiment 20000087 PARAMETER Experiment Name: At_100uM_ABA_Mutants_cDNA_P Parameter: Plant Line Value: WS
  misc_feature: MA Experiment 20000087 PARAMETER Experiment Name: At_100uM_ABA_Mutants_cDNA_P Parameter: Timepoint (hr) Value: 6
  misc_feature: MA Experiment 20000087 PARAMETER Experiment Name: At_100uM_ABA_Mutants_cDNA_P Parameter: Tissue Value: Aerial
  misc_feature: MA Experiment 20000087 PARAMETER Experiment Name: At_100uM_ABA_Mutants_cDNA_P Parameter: Treatment Value: 100uM ABA vs. No Treatment
  misc_feature: MA Experiment ID: 20000088 Result: Down-regulated in Transcription
  misc_feature: MA Experiment 20000088 PARAMETER Experiment Name: At_100uM_ABA_Mutants_cDNA_P Parameter: Plant Line Value: Landsberg
  misc_feature: MA Experiment 20000088 PARAMETER Experiment Name: At_100uM_ABA_Mutants_cDNA_P Parameter: Timepoint (hr) Value: 6
  misc_feature: MA Experiment 20000088 PARAMETER Experiment Name: At_100uM_ABA_Mutants_cDNA_P Parameter: Tissue Value: Aerial
  misc_feature: MA Experiment 20000088 PARAMETER Experiment Name: At_100uM_ABA_Mutants_cDNA_P Parameter: Treatment Value: 100uM ABA vs. No Treatment
  misc_feature: MA Experiment ID: 20000090 Result: Down-regulated in Transcription
  misc_feature: MA Experiment ID: 20000113 Result: Down-regulated in Transcription
  misc_feature: MA Experiment 20000113 PARAMETER Experiment Name: At_42deg_Heat_cDNA_P Parameter: Temperature (deg C) Value: 42 vs. 22
  misc_feature: MA Experiment 20000113 PARAMETER Experiment Name: At_42deg_Heat_cDNA_P Parameter: Timepoint (hr) Value: 8
  misc_feature: MA Experiment 20000113 PARAMETER Experiment Name: At_42deg_Heat_cDNA_P Parameter: Tissue Value: Aerial
  misc_feature: MA Experiment ID: 20000117 Result: Down-regulated in Transcription
  misc_feature: MA Experiment 20000117 PARAMETER Experiment Name: At_100uM_ABA_Mutants_cDNA_P Parameter: Plant Line Value: Columbia
  misc_feature: MA Experiment 20000117 PARAMETER Experiment Name: At_100uM_ABA_Mutants_cDNA_P Parameter: Timepoint (hr) Value: 6
  misc_feature: MA Experiment 20000117 PARAMETER Experiment Name: At_100uM_ABA_Mutants_cDNA_P Parameter: Tissue Value: Aerial
  misc_feature: MA Experiment 20000117 PARAMETER Experiment Name: At_100uM_ABA_Mutants_cDNA_P Parameter: Treatment Value: 100uM ABA vs. No Treatment
  misc_feature: MA Experiment ID: 20000173 Result: Down-regulated in Transcription
  misc_feature: MA Experiment 20000173 PARAMETER Experiment Name: At_42deg_Heat_P Parameter: Age (day) Value: 14
  misc_feature: MA Experiment 20000173 PARAMETER Experiment Name: At_42deg_Heat_P Parameter: Organism Value: A. thaliana
  misc_feature: MA Experiment 20000173 PARAMETER Experiment Name: At_42deg_Heat_P Parameter: Plant Line Value: WS
  misc_feature: MA Experiment 20000173 PARAMETER Experiment Name: At_42deg_Heat_P Parameter: Temperature (deg C) Value: 42 vs. 22
  misc_feature: MA Experiment 20000173 PARAMETER Experiment Name: At_42deg_Heat_P Parameter: Timepoint (hr) Value: 6
  misc_feature: MA Experiment 20000173 PARAMETER Experiment Name: At_42deg_Heat_P Parameter: Tissue Value: Aerial
  misc_feature: MA Experiment ID: 20000182 Result: Down-regulated in Transcription
  misc_feature: MA Experiment 20000182 PARAMETER Experiment Name: At_2mM_SA_P Parameter: Age (day) Value: 14
  misc_feature: MA Experiment 20000182 PARAMETER Experiment Name: At_2mM_SA_P Parameter: Organism Value: A. thaliana
  misc_feature: MA Experiment 20000182 PARAMETER Experiment Name: At_2mM_SA_P Parameter: Plant Line Value: WS
  misc_feature: MA Experiment 20000182 PARAMETER Experiment Name: At_2mM_SA_P Parameter: Timepoint (hr) Value: 6
  misc_feature: MA Experiment 20000182 PARAMETER Experiment Name: At_2mM_SA_P Parameter: Tissue Value: Aerial
  misc_feature: MA Experiment 20000182 PARAMETER Experiment Name: At_2mM_SA_P Parameter: Treatment Value: 2mM SA vs. No Treatment
  misc_feature: MA Experiment ID: 20000185 Result: Down-regulated in Transcription
  misc_feature: MA Experiment 20000185 PARAMETER Experiment Name: At_Roots__P Parameter: Age (day) Value: 7 vs. 21
  misc_feature: MA Experiment 20000185 PARAMETER Experiment Name: At_Roots__P Parameter: Organism Value: A. thaliana
  misc_feature: MA Experiment 20000185 PARAMETER Experiment Name: At_Roots__P Parameter: Tissue Value: Roots vs. Whole Plant
  misc_feature: MA Experiment ID: 20000224 Result: Up-regulated in Transcription
  misc_feature: MA Experiment ID: 20000234 Result: Up-regulated in Transcription
  misc_feature: MA Experiment 20000234 PARAMETER Experiment Name: At_Siliques_P Parameter: Age (day) Value: 21
  misc_feature: MA Experiment 20000234 PARAMETER Experiment Name: At_Siliques_P Parameter: Organism Value: A. thaliana
  misc_feature: MA Experiment 20000234 PARAMETER Experiment Name: At_Siliques_P Parameter: Plant Line Value: WS
  misc_feature: MA Experiment 20000234 PARAMETER Experiment Name: At_Siliques_P Parameter: Tissue Value: Less Than 5mm Siliques vs. Whole Plant
  misc_feature: MA Experiment ID: 20000235 Result: Up-regulated in Transcription
  misc_feature: MA Experiment 20000235 PARAMETER Experiment Name: At_Siliques_P Parameter: Age (day) Value: 21
  misc_feature: MA Experiment 20000235 PARAMETER Experiment Name: At_Siliques_P Parameter: Organism Value: A. thaliana
  misc_feature: MA Experiment 20000235 PARAMETER Experiment Name: At_Siliques_P Parameter: Plant Line Value: WS
  misc_feature: MA Experiment 20000235 PARAMETER Experiment Name: At_Siliques_P Parameter: Tissue Value: 5-10mm Siliques vs. Whole Plant
  misc_feature: MA Experiment ID: 20000436 Result: Down-regulated in Transcription
  misc_feature: MA Experiment 20000436 PARAMETER Experiment Name: At_Drought_P Parameter: Age (day) Value: 7
  misc_feature: MA Experiment 20000436 PARAMETER Experiment Name: At_Drought_P Parameter: Organism Value: A. thaliana
  misc_feature: MA Experiment 20000436 PARAMETER Experiment Name: At_Drought_P Parameter: Plant Line Value: WS
  misc_feature: MA Experiment 20000436 PARAMETER Experiment Name: At_Drought_P Parameter: Timepoint (hr) Value: 12
  misc_feature: MA Experiment 20000436 PARAMETER Experiment Name: At_Drought_P Parameter: Tissue Value: Whole Plant
  misc_feature: MA Experiment 20000436 PARAMETER Experiment Name: At_Drought_P Parameter: Treatment Value: Drought vs. No Drought
  misc_feature: MA Experiment ID: 20000437 Result: Down-regulated in Transcription
  misc_feature: MA Experiment 20000437 PARAMETER Experiment Name: At_Drought_P Parameter: Age (day) Value: 8
  misc_feature: MA Experiment 20000437 PARAMETER Experiment Name: At_Drought_P Parameter: Organism Value: A. thaliana
  misc_feature: MA Experiment 20000437 PARAMETER Experiment Name: At_Drought_P Parameter: Plant Line Value: WS
  misc_feature: MA Experiment 20000437 PARAMETER Experiment Name: At_Drought_P Parameter: Timepoint (hr) Value: 24
  misc_feature: MA Experiment 20000437 PARAMETER Experiment Name: At_Drought_P Parameter: Tissue Value: Whole Plant
  misc_feature: MA Experiment 20000437 PARAMETER Experiment Name: At_Drought_P Parameter: Treatment Value: Drought vs. No Drought
  misc_feature: MA Experiment ID: 20000439 Result: Down-regulated in Transcription
  misc_feature: MA Experiment 20000439 PARAMETER Experiment Name: At_Roots__P Parameter: Age (day) Value: 14 vs. 21
  misc_feature: MA Experiment 20000439 PARAMETER Experiment Name: At_Roots__P Parameter: Organism Value: A. thaliana
  misc_feature: MA Experiment 20000439 PARAMETER Experiment Name: At_Roots__P Parameter: Tissue Value: Roots vs. Whole Plant
  misc_feature: MA Experiment ID: 20000527 Result: Up-regulated in Transcription
  misc_feature: MA Experiment 20000527 PARAMETER Experiment Name: At_10percent_PEG_P Parameter: Age (day) Value: 20
  misc_feature: MA Experiment 20000527 PARAMETER Experiment Name: At_10percent_PEG_P Parameter: Organism Value: A. thaliana
  misc_feature: MA Experiment 20000527 PARAMETER Experiment Name: At_10percent_PEG_P Parameter: Plant Line Value: WS
  misc_feature: MA Experiment 20000527 PARAMETER Experiment Name: At_10percent_PEG_P Parameter: Timepoint (day) Value: 20
  misc_feature: MA Experiment 20000527 PARAMETER Experiment Name: At_10percent_PEG_P Parameter: Tissue Value: Whole Plant
  misc_feature: MA Experiment 20000527 PARAMETER Experiment Name: At_10percent_PEG_P Parameter: Treatment Value: 10percent PEG vs. No Treatment
  misc_feature: MA Experiment ID: 20001247 Result: Down-regulated in Transcription
  misc_feature: MA Experiment 20001247 PARAMETER Experiment Name: At_Far-red-induction_P Parameter: Age (day) Value: 7
  misc_feature: MA Experiment 20001247 PARAMETER Experiment Name: At_Far-red-induction_P Parameter: Light Value: Far-red vs. White
  misc_feature: MA Experiment 20001247 PARAMETER Experiment Name: At_Far-red-induction_P Parameter: Organism Value: A. thaliana
  misc_feature: MA Experiment 20001247 PARAMETER Experiment Name: At_Far-red-induction_P Parameter: Plant Line Value: Columbia
  misc_feature: MA Experiment 20001247 PARAMETER Experiment Name: At_Far-red-induction_P Parameter: Timepoint (hr) Value: 1
  misc_feature: MA Experiment 20001247 PARAMETER Experiment Name: At_Far-red-induction_P Parameter: Tissue Value: Whole Plant
  misc_feature: MA Experiment ID: 20001248 Result: Down-regulated in Transcription
  misc_feature: MA Experiment 20001248 PARAMETER Experiment Name: At_Far-red-induction_P Parameter: Age (day) Value: 7
  misc_feature: MA Experiment 20001248 PARAMETER Experiment Name: At_Far-red-induction_P Parameter: Light Value: Far-red vs. White
  misc_feature: MA Experiment 20001248 PARAMETER Experiment Name: At_Far-red-induction_P Parameter: Organism Value: A. thaliana
  misc_feature: MA Experiment 20001248 PARAMETER Experiment Name: At_Far-red-induction_P Parameter: Plant Line Value: Columbia
  misc_feature: MA Experiment 20001248 PARAMETER Experiment Name: At_Far-red-induction_P Parameter: Timepoint (hr) Value: 4
  misc_feature: MA Experiment 20001248 PARAMETER Experiment Name: At_Far-red-induction_P Parameter: Tissue Value: Whole Plant
  misc_feature: MA Experiment ID: 20001450 Result: Down-regulated in Transcription
  misc_feature: MA Experiment 20001450 PARAMETER Experiment Name: At_Far-red-induction_P Parameter: Age (day) Value: 7
  misc_feature: MA Experiment 20001450 PARAMETER Experiment Name: At_Far-red-induction_P Parameter: Light Value: Far-red vs. White
  misc_feature: MA Experiment 20001450 PARAMETER Experiment Name: At_Far-red-induction_P Parameter: Organism Value: A. thaliana
  misc_feature: MA Experiment 20001450 PARAMETER Experiment Name: At_Far-red-induction_P Parameter: Plant Line Value: Columbia
  misc_feature: MA Experiment 20001450 PARAMETER Experiment Name: At_Far-red-induction_P Parameter: Timepoint (hr) Value: 8
  misc_feature: MA Experiment 20001450 PARAMETER Experiment Name: At_Far-red-induction_P Parameter: Tissue Value: Whole Plant
  misc_feature: MA Experiment ID: 20001557 Result: Down-regulated in Transcription
  misc_feature: MA Experiment 20001557 PARAMETER Experiment Name: At_Drought_Soil_Dry_P Parameter: Age (day) Value: 27
  misc_feature: MA Experiment 20001557 PARAMETER Experiment Name: At_Drought_Soil_Dry_P Parameter: Organism Value: A. thaliana
  misc_feature: MA Experiment 20001557 PARAMETER Experiment Name: At_Drought_Soil_Dry_P Parameter: Plant Line Value: WS
  misc_feature: MA Experiment 20001557 PARAMETER Experiment Name: At_Drought_Soil_Dry_P Parameter: Post Timepoint (hr) Value: 3
  misc_feature: MA Experiment 20001557 PARAMETER Experiment Name: At_Drought_Soil_Dry_P Parameter: Post-Treatment Value: Re-Water vs. No Drought
  misc_feature: MA Experiment 20001557 PARAMETER Experiment Name: At_Drought_Soil_Dry_P Parameter: Timepoint (day) Value: 13
  misc_feature: MA Experiment 20001557 PARAMETER Experiment Name: At_Drought_Soil_Dry_P Parameter: Treatment Value: Drought vs. No Drought
  misc_feature: MA Experiment ID: 20001757 Result: Up-regulated in Transcription
  misc_feature: MA Experiment 20001757 PARAMETER Experiment Name: At_50mM_NH4NO3_L-to-H_P Parameter: Timepoint (hr) Value: 6
  misc_feature: MA Experiment 20001757 PARAMETER Experiment Name: At_50mM_NH4NO3_L-to-H_P Parameter: Tissue Value: Leaf
  misc_feature: MA Experiment 20001757 PARAMETER Experiment Name: At_50mM_NH4NO3_L-to-H_P Parameter: Treatment Value: 50mM NH4NO3 vs 100mM Mannitol
  misc_feature: MA Experiment ID: 20001904 Result: Down-regulated in Transcription
  misc_feature: MA Experiment 20001904 PARAMETER Experiment Name: At_Drought_Reproduction_P Parameter: Age (day) Value: 37
  misc_feature: MA Experiment 20001904 PARAMETER Experiment Name: At_Drought_Reproduction_P Parameter: Organism Value: A. thaliana
  misc_feature: MA Experiment 20001904 PARAMETER Experiment Name: At_Drought_Reproduction_P Parameter: Plant Line Value: WS
  misc_feature: MA Experiment 20001904 PARAMETER Experiment Name: At_Drought_Reproduction_P Parameter: Timepoint (day) Value: 7
  misc_feature: MA Experiment 20001904 PARAMETER Experiment Name: At_Drought_Reproduction_P Parameter: Tissue Value: Rosettes
  misc_feature: MA Experiment 20001904 PARAMETER Experiment Name: At_Drought_Reproduction_P Parameter: Treatment Value: Drought vs. No Drought
  misc_feature: MA Experiment ID: 20001906 Result: Down-regulated in Transcription
  misc_feature: MA Experiment 20001906 PARAMETER Experiment Name: At_Drought_Reproduction_P Parameter: Age (day) Value: 35
  misc_feature: MA Experiment 20001906 PARAMETER Experiment Name: At_Drought_Reproduction_P Parameter: Organism Value: A. thaliana
  misc_feature: MA Experiment 20001906 PARAMETER Experiment Name: At_Drought_Reproduction_P Parameter: Plant Line Value: WS
  misc_feature: MA Experiment 20001906 PARAMETER Experiment Name: At_Drought_Reproduction_P Parameter: Timepoint (day) Value: 5
  misc_feature: MA Experiment 20001906 PARAMETER Experiment Name: At_Drought_Reproduction_P Parameter: Tissue Value: Siliques
  misc_feature: MA Experiment 20001906 PARAMETER Experiment Name: At_Drought_Reproduction_P Parameter: Treatment Value: Drought vs. No Drought
  misc_feature: MA Experiment ID: 20001908 Result: Down-regulated in Transcription
  misc_feature: MA Experiment 20001908 PARAMETER Experiment Name: At_Drought_Reproduction_P Parameter: Age (day) Value: 40
  misc_feature: MA Experiment 20001908 PARAMETER Experiment Name: At_Drought_Reproduction_P Parameter: Organism Value: A. thaliana
  misc_feature: MA Experiment 20001908 PARAMETER Experiment Name: At_Drought_Reproduction_P Parameter: Plant Line Value: WS
  misc_feature: MA Experiment 20001908 PARAMETER Experiment Name: At_Drought_Reproduction_P Parameter: Timepoint (day) Value: 10
  misc_feature: MA Experiment 20001908 PARAMETER Experiment Name: At_Drought_Reproduction_P Parameter: Tissue Value: Siliques
  misc_feature: MA Experiment 20001908 PARAMETER Experiment Name: At_Drought_Reproduction_P Parameter: Treatment Value: Drought vs. No Drought
aaactgaaagttaggacctttcatttccaatctctaaacccatttctctacgattagagaagctgacatcaaaattgaaacttgggaaatttttggatttgttcttcttctatggcaactgaagacgatggtgaattgtcagctcgttaccagaacacgttggatgcattgtcgtctttgatcacaaaacgtggccgtttagctagtaacaaccaatctcaccgattccgtttgctctttcattatctcaaggttcttgagcttgaagatgcagtttcacaaatgaaaatcattcatgtggccggaactaaaggaaagggatcaacatgtacatttgcggagtctattcttcgttgttacggtcttcgaactggtctcttcacatctcctcacttaatcgatgtccgagagagattccgtcttaacggcattgagataagccaggagaaatttgtgaactacttttggtgttgctttcataagctcaaggagaaaaccagcaatgaggttgatgttgttatactagaagttggcttaggtgggagattcgatgcgactaatgtgattcagaaacctgtcgtctgtggtatttcttctctagggtatgaccatatggagattcttggatacacacttgctgaaattgctgcagagaaagccggtatcttcaagagtggagttcctgcttttacagtggctcaacctgatgaagcaatgcgtgtactcaatgaaaaagcttcaaaattggaggtgaatcttcaggtggtggaaccgttggactcaagccagagactcgggcttcaaggcgaacatcaatatctaaacgctggtcttgctgttgcgttgtgctctacatttcttaaagagattggtattgaggacaagaatggtttggatcagacaaacggtttacccgaaaaattcatctctggattgtcaaatgcttatttgatgggacgagctatgatagtgcctgattcagaactccctgaagagattgtgtattaccttgatggagctcatagtcctgaaagcatggaagcttgcgctatatggttttcaaaacagatcaaacaaaaccaagaaagaaaccagaaaagatcagagcagatactcttgttcaattgtatgtctgttcgtgacccgagtttgcttcttccgcgattaaggagtaaatgcattgatcaaggagttgatttcaagagagccgtttttgtgccaaacgtatcagtgtacaaccaagtgggatcttcgacaaacgttggcacacgtgtcgagtcgatgtcgtggcagttcggtcttcagaggatttgggagagtttagctcgaggtgaagcaaaatctaattcaaaaagtgattctaaaggcaaagaagaagagaagagtttcgttttctcgtcacttcctgtggctgttgactggctccgggacaatgctcgccaaagtaaacaagttcgttttcaggtgttggtaactggttcattacatttggtgggtgatctcttgagatttatcaagaaatgaatatgtttctgccatgtattcttggccaatctttgcctgtaatgactatatatctcacaacatgatttaacaaaagaaaagaaaagatatttcg

SEQ ID NO: 101365 - protein, 470 aa, Arabidopsis thaliana
  peptide (1)..(470): Ceres Seq. ID no. 13607654
  misc_feature (296)..(381): Pfam Name: Mur ligase family, glutamate ligase domain Pfam Description: Mur ligase family, glutamate ligase domain
  misc_feature (1)..(470): Homolog of NCBI NO: 30694284 NR Description: folylpolyglutamate-dihydrofolate synthase
  misc_feature (117)..(470): Homolog of NCBI NO: 30694288 NR Description: folylpolyglutamate-dihydrofolate synthase
  misc_feature (1)..(133): Homolog of NCBI NO: 30694288 NR Description: folylpolyglutamate-dihydrofolate synthase
  misc_feature (1)..(470): Homolog of NCBI NO: 21592378 NR Description: tetrahydrofolylpolyglutamate synthase
  misc_feature (117)..(470): Homolog of NCBI NO: 30694286 NR Description: folylpolyglutamate-dihydrofolate synthase [Arabidopsis thaliana] >gi|15292867|gb|AAK92804.1| putative synthase precursor [Arabidopsis thaliana]
  misc_feature (1)..(133): Homolog of NCBI NO: 30694286 NR Description: folylpolyglutamate-dihydrofolate synthase [Arabidopsis thaliana] >gi|15292867|gb|AAK92804.1| putative synthase precursor [Arabidopsis thaliana]
  misc_feature (117)..(452): Homolog of NCBI NO: 11358877 NR Description: tetrahydrofolylpolyglutamate synthase-like
  misc_feature (1)..(133): Homolog of NCBI NO: 11358877 NR Description: tetrahydrofolylpolyglutamate synthase-like
  misc_feature (130)..(324): Homolog of NCBI NO: 30681208 NR Description: folylpolyglutamate synthase (fpgs2) [Arabidopsis
  misc_feature (332)..(470): Homolog of NCBI NO: 30681208 NR Description: folylpolyglutamate synthase (fpgs2) [Arabidopsis
MATEDDGELSARYQNTLDALSSLITKRGRLASNNQSHRFRLLFHYLKVLELEDAVSQMKIIHVAGTKGKGSTCTFAESILRCYGLRTGLFTSPHLIDVRERFRLNGIEISQEKFVNYFWCCFHKLKEKTSNEVDVVILEVGLGGRFDATNVIQKPVVCGISSLGYDHMEILGYTLAEIAAEKAGIFKSGVPAFTVAQPDEAMRVLNEKASKLEVNLQVVEPLDSSQRLGLQGEHQYLNAGLAVALCSTFLKEIGIEDKNGLDQTNGLPEKFISGLSNAYLMGRAMIVPDSELPEEIVYYLDGAHSPESMEACAIWFSKQIKQNQERNQKRSEQILLFNCMSVRDPSLLLPRLRSKCIDQGVDFKRAVFVPNVSVYNQVGSSTNVGTRVESMSWQFGLQRIWESLARGEAKSNSKSDSKGKEEEKSFVFSSLPVAVDWLRDNARQSKQVRFQVLVTGSLHLVGDLLRFIKK

SEQ ID NO: 101366 - protein, 413 aa, Arabidopsis thaliana
  peptide (1)..(413): Ceres Seq. ID no. 13607655
  misc_feature (239)..(324): Pfam Name: Mur ligase family, glutamate ligase domain Pfam Description: Mur ligase family, glutamate ligase domain
  misc_feature (1)..(413): Homolog of NCBI NO: 30694284 NR Description: folylpolyglutamate-dihydrofolate synthase
  misc_feature (60)..(413): Homolog of NCBI NO: 30694288 NR Description: folylpolyglutamate-dihydrofolate synthase
  misc_feature (1)..(76): Homolog of NCBI NO: 30694288 NR Description: folylpolyglutamate-dihydrofolate synthase
  misc_feature (1)..(413): Homolog of NCBI NO: 21592378 NR Description: tetrahydrofolylpolyglutamate synthase
  misc_feature (60)..(413): Homolog of NCBI NO: 30694286 NR Description: folylpolyglutamate-dihydrofolate synthase [Arabidopsis thaliana] >gi|15292867|gb|AAK92804.1| putative synthase precursor [Arabidopsis thaliana]
  misc_feature (1)..(76): Homolog of NCBI NO: 30694286 NR Description: folylpolyglutamate-dihydrofolate synthase [Arabidopsis thaliana] >gi|15292867|gb|AAK92804.1| putative synthase precursor [Arabidopsis thaliana]
  misc_feature (60)..(395): Homolog of NCBI NO: 11358877 NR Description: tetrahydrofolylpolyglutamate synthase-like
  misc_feature (1)..(76): Homolog of NCBI NO: 11358877 NR Description: tetrahydrofolylpolyglutamate synthase-like
  misc_feature (73)..(267): Homolog of NCBI NO: 30681208 NR Description: folylpolyglutamate synthase (fpgs2) [Arabidopsis
  misc_feature (275)..(413): Homolog of NCBI NO: 30681208 NR Description: folylpolyglutamate synthase (fpgs2) [Arabidopsis
MKIIHVAGTKGKGSTCTFAESILRCYGLRTGLFTSPHLIDVRERFRLNGIEISQEKFVNYFWCCFHKLKEKTSNEVDVVILEVGLGGRFDATNVIQKPVVCGISSLGYDHMEILGYTLAEIAAEKAGIFKSGVPAFTVAQPDEAMRVLNEKASKLEVNLQVVEPLDSSQRLGLQGEHQYLNAGLAVALCSTFLKEIGIEDKNGLDQTNGLPEKFISGLSNAYLMGRAMIVPDSELPEEIVYYLDGAHSPESMEACAIWFSKQIKQNQERNQKRSEQILLFNCMSVRDPSLLLPRLRSKCIDQGVDFKRAVFVPNVSVYNQVGSSTNVGTRVESMSWQFGLQRIWESLARGEAKSNSKSDSKGKEEEKSFVFSSLPVAVDWLRDNARQSKQVRFQVLVTGSLHLVGDLLRFIKK

SEQ ID NO: 101367 - protein, 303 aa, Arabidopsis thaliana; identical to SEQ ID NO: 43672
  peptide (1)..(303): Ceres Seq. ID no. 13607656
  misc_feature (129)..(214): Pfam Name: Mur ligase family, glutamate ligase domain Pfam Description: Mur ligase family, glutamate ligase domain
  misc_feature (1)..(303): Homolog of NCBI NO: 30694284 NR Description: folylpolyglutamate-dihydrofolate synthase
  misc_feature (1)..(303): Homolog of NCBI NO: 30694288 NR Description: folylpolyglutamate-dihydrofolate synthase
  misc_feature (1)..(303): Homolog of NCBI NO: 21592378 NR Description: tetrahydrofolylpolyglutamate synthase
  misc_feature (1)..(303): Homolog of NCBI NO: 30694286 NR Description: folylpolyglutamate-dihydrofolate synthase [Arabidopsis thaliana] >gi|15292867|gb|AAK92804.1| putative synthase precursor [Arabidopsis thaliana]
  misc_feature (1)..(285): Homolog of NCBI NO: 11358877 NR Description: tetrahydrofolylpolyglutamate synthase-like
  misc_feature (1)..(157): Homolog of NCBI NO: 30681208 NR Description: folylpolyglutamate synthase (fpgs2) [Arabidopsis
  misc_feature (165)..(303): Homolog of NCBI NO: 30681208 NR Description: folylpolyglutamate synthase (fpgs2) [Arabidopsis
  misc_feature (1)..(157): Homolog of NCBI NO: 17976705 NR Description: dihydrofolate synthetase /folylpolyglutamate
  misc_feature (165)..(303): Homolog of NCBI NO: 17976705 NR Description: dihydrofolate synthetase /folylpolyglutamate
  misc_feature (1)..(286): Homolog of NCBI NO: 10177571 NR Description: tetrahydrofolylpolyglutamate synthase-like

SEQ ID NO: 101368 - DNA, 893 bp, Arabidopsis thaliana
  misc_feature (1)..(893): Ceres Seq. ID no. 13607673
  misc_feature: MA Experiment ID: 20000180 Result: Down-regulated in Transcription
  misc_feature: MA Experiment 20000180 PARAMETER Experiment Name: At_Germinating_Seeds_P Parameter: Age (hr) Value: 24 vs. 0
  misc_feature: MA Experiment 20000180 PARAMETER Experiment Name: At_Germinating_Seeds_P Parameter: Tissue Value: Germinating Seeds
  misc_feature: MA Experiment ID: 20001557 Result: Up-regulated in Transcription
  misc_feature: MA Experiment 20001557 PARAMETER Experiment Name: At_Drought_Soil_Dry_P Parameter: Age (day) Value: 27
  misc_feature: MA Experiment 20001557 PARAMETER Experiment Name: At_Drought_Soil_Dry_P Parameter: Organism Value: A. thaliana
  misc_feature: MA Experiment 20001557 PARAMETER Experiment Name: At_Drought_Soil_Dry_P Parameter: Plant Line Value: WS
  misc_feature: MA Experiment 20001557 PARAMETER Experiment Name: At_Drought_Soil_Dry_P Parameter: Post Timepoint (hr) Value: 3
  misc_feature: MA Experiment 20001557 PARAMETER Experiment Name: At_Drought_Soil_Dry_P Parameter: Post-Treatment Value: Re-Water vs. No Drought
  misc_feature: MA Experiment 20001557 PARAMETER Experiment Name: At_Drought_Soil_Dry_P Parameter: Timepoint (day) Value: 13
  misc_feature: MA Experiment 20001557 PARAMETER Experiment Name: At_Drought_Soil_Dry_P Parameter: Treatment Value: Drought vs. No Drought
  misc_feature: MA Experiment ID: 20001558 Result: Up-regulated in Transcription
  misc_feature: MA Experiment 20001558 PARAMETER Experiment Name: At_Drought_Soil_Dry_P Parameter: Age (day) Value: 27
  misc_feature: MA Experiment 20001558 PARAMETER Experiment Name: At_Drought_Soil_Dry_P Parameter: Organism Value: A. thaliana
  misc_feature: MA Experiment 20001558 PARAMETER Experiment Name: At_Drought_Soil_Dry_P Parameter: Plant Line Value: WS
  misc_feature: MA Experiment 20001558 PARAMETER Experiment Name: At_Drought_Soil_Dry_P Parameter: Post Timepoint (hr) Value: 6
  misc_feature: MA Experiment 20001558 PARAMETER Experiment Name: At_Drought_Soil_Dry_P Parameter: Post-Treatment Value: Re-Water vs. No Drought
  misc_feature: MA Experiment 20001558 PARAMETER Experiment Name: At_Drought_Soil_Dry_P Parameter: Timepoint (day) Value: 13
  misc_feature: MA Experiment 20001558 PARAMETER Experiment Name: At_Drought_Soil_Dry_P Parameter: Treatment Value: Drought vs. No Drought
  misc_feature: MA Experiment ID: 20001560 Result: Up-regulated in Transcription
  misc_feature: MA Experiment 20001560 PARAMETER Experiment Name: At_Drought_Soil_Dry_P Parameter: Age (day) Value: 28
  misc_feature: MA Experiment 20001560 PARAMETER Experiment Name: At_Drought_Soil_Dry_P Parameter: Organism Value: A. thaliana
  misc_feature: MA Experiment 20001560 PARAMETER Experiment Name: At_Drought_Soil_Dry_P Parameter: Plant Line Value: WS
  misc_feature: MA Experiment 20001560 PARAMETER Experiment Name: At_Drought_Soil_Dry_P Parameter: Post Timepoint (hr) Value: None
  misc_feature: MA Experiment 20001560 PARAMETER Experiment Name: At_Drought_Soil_Dry_P Parameter: Post-Treatment Value: None
  misc_feature: MA Experiment 20001560 PARAMETER Experiment Name: At_Drought_Soil_Dry_P Parameter: Timepoint (day) Value: 14
  misc_feature: MA Experiment 20001560 PARAMETER Experiment Name: At_Drought_Soil_Dry_P Parameter: Treatment Value: Drought vs. No Drought
aatcttcatctccgtcgatctccattgatctctaacactaaaattctactactcttcactttctacagcttaggaagagttctcgacaagctgattcttcgagttctcgacaagtttcagtgtttttgtttccgggtcacagagaacaaaggcaatttacaataatggcagagactaaacaaccactgatcggtcttaaatgggaaccaaagcttccaggcttatccttagacttgaaaactggttcaaccagaagcaaaacagctgagagttctaagtcagagcttgttgatggtctttgtcttccacctaatgatccaaggaagattaacaagatgattagaaaacaactcaaagacactactggttctaactggtttgatatgcctgctccaacaatgactcctgagttgaaaagagatcttcagttgcttaagttgagaactgtaatggatcctgctctacactacaagaaatctgtgtcacggtctaaactagctgaaaaatatttccagattggtacagtaattgaaccagctgaagagttttatgggagattgacaaagaagaatagaaaagcaactcttgctgatgagttggtttcagatcctaaaactgctctctacaggaagcgtaaagttagggagattgaggagaagagtagagctgttacgaataagaaatggaataaaaagggaaaccagtctaagaacacaaagccaagaaggaactgaattatttttgttaagagtatgatcatagttttgggacacattttttctatttttaatagaatatggtcatagtattggatacactttcttgcggtgatataggttgtaatgactcttgttgtttatggcctttgtttaaaggattttgtgttattggtt

SEQ ID NO: 101369 - protein, 189 aa, Arabidopsis thaliana; identical to SEQ ID NO: 36771
  peptide (1)..(189): Ceres Seq. ID no. 13607674
  misc_feature (1)..(189): Homolog of NCBI NO: 15221891 NR Description: expressed protein [Arabidopsis thaliana] unknown protein [Arabidopsis thaliana]
  misc_feature (1)..(189): Homolog of NCBI NO: 30692242 NR Description: expressed protein [Arabidopsis thaliana]
  misc_feature (1)..(189): Homolog of NCBI NO: 25405768 NR Description: T22H22.18 [imported] - Arabidopsis thaliana
  misc_feature (60)..(186): Homolog of NCBI NO: 19114999 NR Description: hypothetical protein [Schizosaccharomyces pombe]
  misc_feature (46)..(177): Homolog of NCBI NO: 8218113 NR Description: dJ561L24.2 (acidic 82 kDa protein) [Homo sapiens]
  misc_feature (46)..(177): Homolog of NCBI NO: 34859943 NR Description: similar to expressed sequence AA408582 [Rattus
  misc_feature (46)..(177): Homolog of NCBI NO: 24418931 NR Description: expressed sequence AA408582 [Mus musculus]
  misc_feature (57)..(189): Homolog of NCBI NO: 17537287 NR Description: Acidic protein mRNA (29.6 kD) [Caenorhabditis >gi|7332042|gb|AAF60729.1| Hypothetical protein Y49F6B.2
  misc_feature (60)..(188): Homolog of NCBI NO: 39580393 NR Description: Hypothetical protein CBG17763 [Caenorhabditis
  misc_feature (4)..(185): Homolog of NCBI NO: 31237250 NR Description: ENSANGP00000016794 [Anopheles gambiae]

SEQ ID NO: 101370 - protein, 132 aa, Arabidopsis thaliana; identical to SEQ ID NO: 36772
  peptide (1)..(132): Ceres Seq. ID no. 13607675
  misc_feature (1)..(132): Homolog of NCBI NO: 15221891 NR Description: expressed protein [Arabidopsis thaliana] unknown protein [Arabidopsis thaliana]
  misc_feature (1)..(132): Homolog of NCBI NO: 30692242 NR Description: expressed protein [Arabidopsis thaliana]
  misc_feature (1)..(132): Homolog of NCBI NO: 25405768 NR Description: T22H22.18 [imported] - Arabidopsis thaliana
  misc_feature (3)..(129): Homolog of NCBI NO: 19114999 NR Description: hypothetical protein [Schizosaccharomyces pombe]
  misc_feature (1)..(120): Homolog of NCBI NO: 8218113 NR Description: dJ561L24.2 (acidic 82 kDa protein) [Homo sapiens]
  misc_feature (1)..(120): Homolog of NCBI NO: 34859943 NR Description: similar to expressed sequence AA408582 [Rattus
  misc_feature (1)..(120): Homolog of NCBI NO: 24418931 NR Description: expressed sequence AA408582 [Mus musculus]
  misc_feature (1)..(132): Homolog of NCBI NO: 17537287 NR Description: Acidic protein mRNA (29.6 kD) [Caenorhabditis >gi|7332042|gb|AAF60729.1| Hypothetical protein Y49F6B.2
  misc_feature (3)..(131): Homolog of NCBI NO: 39580393 NR Description: Hypothetical protein CBG17763 [Caenorhabditis
  misc_feature (1)..(128): Homolog of NCBI NO: 31237250 NR Description: ENSANGP00000016794 [Anopheles gambiae]

SEQ ID NO: 101371 - protein, 116 aa, Arabidopsis thaliana; identical to SEQ ID NO: 36773
  peptide (1)..(116): Ceres Seq. ID no. 13607676
  misc_feature (1)..(116): Homolog of NCBI NO: 15221891 NR Description: expressed protein [Arabidopsis thaliana] unknown protein [Arabidopsis thaliana]
  misc_feature (1)..(116): Homolog of NCBI NO: 30692242 NR Description: expressed protein [Arabidopsis thaliana]
  misc_feature (1)..(116): Homolog of NCBI NO: 25405768 NR Description: T22H22.18 [imported] - Arabidopsis thaliana
  misc_feature (1)..(113): Homolog of NCBI NO: 19114999 NR Description: hypothetical protein [Schizosaccharomyces pombe]
  misc_feature (1)..(104): Homolog of NCBI NO: 8218113 NR Description: dJ561L24.2 (acidic 82 kDa protein) [Homo sapiens]
  misc_feature (1)..(104): Homolog of NCBI NO: 34859943 NR Description: similar to expressed sequence AA408582 [Rattus
  misc_feature (1)..(104): Homolog of NCBI NO: 24418931 NR Description: expressed sequence AA408582 [Mus musculus]
  misc_feature (1)..(116): Homolog of NCBI NO: 17537287 NR Description: Acidic protein mRNA (29.6 kD) [Caenorhabditis >gi|7332042|gb|AAF60729.1| Hypothetical protein Y49F6B.2
  misc_feature (1)..(115): Homolog of NCBI NO: 39580393 NR Description: Hypothetical protein CBG17763 [Caenorhabditis
  misc_feature (1)..(112): Homolog of NCBI NO: 31237250 NR Description: ENSANGP00000016794 [Anopheles gambiae]

SEQ ID NO: 101372 - DNA, 2220 bp, Arabidopsis thaliana
  misc_feature (1)..(2220): Ceres Seq. ID no. 13607677
  misc_feature: MA Experiment ID: 20000306 Result: Up-regulated in Transcription
  misc_feature: MA Experiment 20000306 PARAMETER Experiment Name: At_Germinating_Seeds_Sub_P Parameter: Age (hr) Value: 6 vs. 0
  misc_feature: MA Experiment 20000306 PARAMETER Experiment Name: At_Germinating_Seeds_Sub_P Parameter: Organism Value: A. thaliana
  misc_feature: MA Experiment 20000306 PARAMETER Experiment Name: At_Germinating_Seeds_Sub_P Parameter: Plant Line Value: WS
  misc_feature: MA Experiment 20000306 PARAMETER Experiment Name: At_Germinating_Seeds_Sub_P Parameter: Tissue Value: Germinating Seeds
  misc_feature: MA Experiment ID: 20000307 Result: Up-regulated in Transcription
  misc_feature: MA Experiment 20000307 PARAMETER Experiment Name: At_Germinating_Seeds_Sub_P Parameter: Age (hr) Value: 24 vs. 0
  misc_feature: MA Experiment 20000307 PARAMETER Experiment Name: At_Germinating_Seeds_Sub_P Parameter: Organism Value: A. thaliana
  misc_feature: MA Experiment 20000307 PARAMETER Experiment Name: At_Germinating_Seeds_Sub_P Parameter: Plant Line Value: WS
  misc_feature: MA Experiment 20000307 PARAMETER Experiment Name: At_Germinating_Seeds_Sub_P Parameter: Tissue Value: Germinating Seeds
  misc_feature: MA Experiment ID: 20000314 Result: Up-regulated in Transcription
  misc_feature: MA Experiment 20000314 PARAMETER Experiment Name: At_14day_Shoots-Roots_Sub_P Parameter: Age (day) Value: 14
  misc_feature: MA Experiment 20000314 PARAMETER Experiment Name: At_14day_Shoots-Roots_Sub_P Parameter: Organism Value: A. thaliana
  misc_feature: MA Experiment 20000314 PARAMETER Experiment Name: At_14day_Shoots-Roots_Sub_P Parameter: Plant Line Value: WS
  misc_feature: MA Experiment 20000314 PARAMETER Experiment Name: At_14day_Shoots-Roots_Sub_P Parameter: Tissue Value: Roots vs. Whole Plant
  misc_feature: MA Experiment ID: 20000315 Result: Down-regulated in Transcription
  misc_feature: MA Experiment 20000315 PARAMETER Experiment Name: At_14day_Shoots-Roots_Sub_P Parameter: Age (day) Value: 14
  misc_feature: MA Experiment 20000315 PARAMETER Experiment Name: At_14day_Shoots-Roots_Sub_P Parameter: Organism Value: A. thaliana
  misc_feature: MA Experiment 20000315 PARAMETER Experiment Name: At_14day_Shoots-Roots_Sub_P Parameter: Plant Line Value: WS
  misc_feature: MA Experiment 20000315 PARAMETER Experiment Name: At_14day_Shoots-Roots_Sub_P Parameter: Tissue Value: Shoots vs. Whole Plant
  misc_feature: MA Experiment ID: 20000328 Result: Down-regulated in Transcription
  misc_feature: MA Experiment 20000328 PARAMETER Experiment Name: At_42deg_Heat_Sub_P Parameter: Age (day) Value: 14
  misc_feature: MA Experiment 20000328 PARAMETER Experiment Name: At_42deg_Heat_Sub_P Parameter: Organism Value: A. thaliana
  misc_feature: MA Experiment 20000328 PARAMETER Experiment Name: At_42deg_Heat_Sub_P Parameter: Plant Line Value: WS
  misc_feature: MA Experiment 20000328 PARAMETER Experiment Name: At_42deg_Heat_Sub_P Parameter: Temperature (deg C) Value: 42 vs. 22
  misc_feature: MA Experiment 20000328 PARAMETER Experiment Name: At_42deg_Heat_Sub_P Parameter: Timepoint (hr) Value: 6
  misc_feature: MA Experiment 20000328 PARAMETER Experiment Name: At_42deg_Heat_Sub_P Parameter: Tissue Value: Aerial
  misc_feature: MA Experiment ID: 20000355 Result: Up-regulated in Transcription
  misc_feature: MA Experiment 20000355 PARAMETER Experiment Name: At_Siliques_Sub_P Parameter: Age (day) Value: 21
  misc_feature: MA Experiment 20000355 PARAMETER Experiment Name: At_Siliques_Sub_P Parameter: Organism Value: A. thaliana
  misc_feature: MA Experiment 20000355 PARAMETER Experiment Name: At_Siliques_Sub_P Parameter: Plant Line Value: WS
  misc_feature: MA Experiment 20000355 PARAMETER Experiment Name: At_Siliques_Sub_P Parameter: Tissue Value: Less Than 5mm Siliques vs. Whole Plant
  misc_feature: MA Experiment ID: 20000440 Result: Up-regulated in Transcription
  misc_feature: MA Experiment 20000440 PARAMETER Experiment Name: At_Closed-Flower__Sub_P Parameter: Tissue Value: Closed Flower vs. Whole Plant
atgcaagatctcttcggttcagttcgccgctcacttgtcttccgttctaccaccgacgatgagaatcaagagaatcatcctcctccgtttccttctctcctcgccgataaaatcacttcctgtatccgcaaatcaatggttttcgccaaatcccagtcacctccgaataactccaccgtacaaatcaaacctccgattcggtggcggaaaggtcagttaattggccgtggcgcttttggtactgtgtatatgggaatgaatctcgattccggtgagcttctcgccgttaaacaggttctgattacatctaattgtgcatccaaggaaaaaactcaggctcatattcaggagcttgaagaggaagtgaagctactcaagaatctctctcatccaaatatagttagatatttgggtacggtgagggaagatgaaactttgaatatcttgcttgaatttgttcctggtggatctatatcttcactcttggagaaatttggagcctttcctgaatctgttgttcggacatacacgaaccaactgcttttgggattggagtaccttcataatcatgccattatgcaccgtgacattaagggtgctaatatccttgtggataatcaaggatgcattaaacttgctgattttggtgcgtccaaacaggtagcggagttggctactatttcgggtgccaaatctatgaaaggaactccctattggatggctccagaagttattcttcaaaccgggcatagcttttctgctgatatttggagtgtaggatgcacagtgattgaaatggtgactggaaaagctccttggagccagcaatataaagagattgctgctattttccacattggaacgacgaaatcgcatcctccaatccctgacaatatctcctctgacgcaaatgattttttgctcaagtgtctgcagcaggaaccaaatctgcggccaaccgcttctgagctgctaaagcatccatttgttacgggcaaacagaaggaatctgcgtctaaagatcttacttcatttatggacaattcatgcagtcctttaccatcagagttgactaacattacgagctatcaaacatctacgagtgacgatgtaggagacatctgtaacttgggtagtctgacttgtacacttgctttccctgagaaatcaatccaaaataacagtttgtgtctgaaaagtaataacgggtatgatgacgatgatgataatgatatgtgtttgattgacgatgagaatttcttgacatataatggagagactggccctagtcttgacaataatactgatgccaagaagagctgtgataccatgagtgagatctctgatattttgaagtgcaaatttgacgaaaattctggaaacggagaaacagagacgaaagttagtatggaagttgaccatccatcatactcggaggatgaaaatgagctgactgagtcgaaaatcaaagctttcttagatgacaaggctgcagagttaaagaagttacagacgcctctgtacgaagaattctacaacggtatgatcacatgctcccccatctgcatggagagtaacatcaataacaataaacgagaggaggcacctcgtggtttcttgaaactgcctccaaaaagtcggtctccgagtcagggccatattggtcgatcaccttctagagcaacagatgcagcctgttgttccaagagtccagaaagtggtaatagctctggtgccccgaagaatagcaatgcaagtgctggtgctgaacaagaatcaaacagtcaaagtgtcgcgctgtcggagatagagaggaagtggaaggaagagcttgatcaagaacttgaaagaaagcgaagagagattacacggcaagcagggatgggatcatccccgagagatagaagcttgagccgacatagagagaagtcaagatttgcatctccaggcaaatgatctgtacaaaagaaaagcagccaattttgcacttttgtctgtaaggcttgtattgcttttgatctttcgatttgctcatctagtatatatgatatagacataaaattgtgccaacttaaagtttgaatatatatagatagctaaactatttgcttaagtagggtgtgatgtgagaatgttggtgcatattgagtgttaagccaaccacagaacaaatattttcgagaaattatcgaaagctttgtttactttcggtccggtccg

SEQ ID NO: 101373 - protein, 651 aa, Arabidopsis thaliana
  peptide (1)..(651): Ceres Seq. ID no. 13607678
  misc_feature (68)..(330): Pfam Name: Protein kinase domain Pfam Description: Protein kinase domain
  misc_feature (1)..(651): Homolog of NCBI NO: 30680907 NR Description: protein kinase, putative [Arabidopsis thaliana]
  misc_feature (6)..(651): Homolog of NCBI NO: 2342421 NR Description: NPK1-related protein kinase 1L [Arabidopsis
  misc_feature (1)..(496): Homolog of NCBI NO: 15221948 NR Description: protein kinase, putative [Arabidopsis thaliana]
  misc_feature (1)..(371): Homolog of NCBI NO: 2342423 NR Description: NPK1-related protein kinase 1S [Arabidopsis
  misc_feature (1)..(641): Homolog of NCBI NO: 15230612 NR Description: protein kinase, putative [Arabidopsis thaliana]
  misc_feature (1)..(651): Homolog of NCBI NO: 456309 NR Description: protein kinase [Nicotiana tabacum]
  misc_feature (1)..(651): Homolog of NCBI NO: 477094 NR Description: STE11 protein kinase homolog NPK1 - common tobacco
  misc_feature (61)..(332): Homolog of NCBI NO: 37573087 NR Description: putative protein kinase [Oryza sativa (japonica
  misc_feature (479)..(643): Homolog of NCBI NO: 37573087 NR Description: putative protein kinase [Oryza sativa (japonica
  misc_feature (61)..(373): Homolog of NCBI NO: 34904934 NR Description: putative protein kinase [Oryza sativa (japonica
MQDLFGSVRRSLVFRSTTDDENQENHPPPFPSLLADKITSCIRKSMVFAKSQSPPNNSTVQIKPPIRWRKGQLIGRGAFGTVYMGMNLDSGELLAVKQVLITSNCASKEKTQAHIQELEEEVKLLKNLSHPNIVRYLGTVREDETLNILLEFVPGGSISSLLEKFGAFPESVVRTYTNQLLLGLEYLHNHAIMHRDIKGANILVDNQGCIKLADFGASKQVAELATISGAKSMKGTPYWMAPEVILQTGHSFSADIWSVGCTVIEMVTGKAPWSQQYKEIAAIFHIGTTKSHPPIPDNISSDANDFLLKCLQQEPNLRPTASELLKHPFVTGKQKESASKDLTSFMDNSCSPLPSELTNITSYQTSTSDDVGDICNLGSLTCTLAFPEKSIQNNSLCLKSNNGYDDDDDNDMCLIDDENFLTYNGETGPSLDNNTDAKKSCDTMSEISDILKCKFDENSGNGETETKVSMEVDHPSYSEDENELTESKIKAFLDDKAAELKKLQTPLYEEFYNGMITCSPICMESNINNNKREEAPRGFLKLPPKSRSPSQGHIGRSPSRATDAACCSKSPESGNSSGAPKNSNASAGAEQESNSQSVALSEIERKWKEELDQELERKRREITRQAGMGSSPRDRSLSRHREKSRFASPGK

SEQ ID NO: 101374 - protein, 606 aa, Arabidopsis thaliana
  peptide (1)..(606): Ceres Seq. ID no. 13607679
  misc_feature (23)..(285): Pfam Name: Protein kinase domain Pfam Description: Protein kinase domain
  misc_feature (1)..(606): Homolog of NCBI NO: 30680907 NR Description: protein kinase, putative [Arabidopsis thaliana]
  misc_feature (1)..(606): Homolog of NCBI NO: 2342421 NR Description: NPK1-related protein kinase 1L [Arabidopsis
  misc_feature (1)..(451): Homolog of NCBI NO: 15221948 NR Description: protein kinase, putative [Arabidopsis thaliana]
  misc_feature (1)..(326): Homolog of NCBI NO: 2342423 NR Description: NPK1-related protein kinase 1S [Arabidopsis
  misc_feature (1)..(596): Homolog of NCBI NO: 15230612 NR Description: protein kinase, putative [Arabidopsis thaliana]
  misc_feature (1)..(606): Homolog of NCBI NO: 456309 NR Description: protein kinase [Nicotiana tabacum]
  misc_feature (1)..(606): Homolog of NCBI NO: 477094 NR Description: STE11 protein kinase homolog NPK1 - common tobacco
  misc_feature (16)..(287): Homolog of NCBI NO: 37573087 NR Description: putative protein kinase [Oryza sativa (japonica
  misc_feature (434)..(598): Homolog of NCBI NO: 37573087 NR Description: putative protein kinase [Oryza sativa (japonica
  misc_feature (16)..(328): Homolog of NCBI NO: 34904934 NR Description: putative protein kinase [Oryza sativa (japonica
MVFAKSQSPPNNSTVQIKPPIRWRKGQLIGRGAFGTVYMGMNLDSGELLAVKQVLITSNCASKEKTQAHIQELEEEVKLLKNLSHPNIVRYLGTVREDETLNILLEFVPGGSISSLLEKFGAFPESVVRTYTNQLLLGLEYLHNHAIMHRDIKGANILVDNQGCIKLADFGASKQVAELATISGAKSMKGTPYWMAPEVILQTGHSFSADIWSVGCTVIEMVTGKAPWSQQYKEIAAIFHIGTTKSHPPIPDNISSDANDFLLKCLQQEPNLRPTASELLKHPFVTGKQKESASKDLTSFMDNSCSPLPSELTNITSYQTSTSDDVGDICNLGSLTCTLAFPEKSIQNNSLCLKSNNGYDDDDDNDMCLIDDENFLTYNGETGPSLDNNTDAKKSCDTMSEISDILKCKFDENSGNGETETKVSMEVDHPSYSEDENELTESKIKAFLDDKAAELKKLQTPLYEEFYNGMITCSPICMESNINNNKREEAPRGFLKLPPKSRSPSQGHIGRSPSRATDAACCSKSPESGNSSGAPKNSNASAGAEQESNSQSVALSEIERKWKEELDQELERKRREITRQAGMGSSPRDRSLSRHREKSRFASPGK

SEQ ID NO: 101375 - protein, 568 aa, Arabidopsis thaliana
  peptide (1)..(568): Ceres Seq. ID no. 13607680
  misc_feature (1)..(247): Pfam Name: Protein kinase domain Pfam Description: Protein kinase domain
  misc_feature (1)..(568): Homolog of NCBI NO: 30680907 NR Description: protein kinase, putative [Arabidopsis thaliana]
  misc_feature (1)..(568): Homolog of NCBI NO: 2342421 NR Description: NPK1-related protein kinase 1L [Arabidopsis
  misc_feature (1)..(413): Homolog of NCBI NO: 15221948 NR Description: protein kinase, putative [Arabidopsis thaliana]
  misc_feature (1)..(288): Homolog of NCBI NO: 2342423 NR Description: NPK1-related protein kinase 1S [Arabidopsis
  misc_feature (1)..(558): Homolog of NCBI NO: 15230612 NR Description: protein kinase, putative [Arabidopsis thaliana]
  misc_feature (1)..(568): Homolog of NCBI NO: 456309 NR Description: protein kinase [Nicotiana tabacum]
  misc_feature (1)..(568): Homolog of NCBI NO: 477094 NR Description: STE11 protein kinase homolog NPK1 - common tobacco
  misc_feature (1)..(249): Homolog of NCBI NO: 37573087 NR Description: putative protein kinase [Oryza sativa (japonica
  misc_feature (396)..(560): Homolog of NCBI NO: 37573087 NR Description: putative protein kinase [Oryza sativa (japonica
  misc_feature (1)..(290): Homolog of NCBI NO: 34904934 NR Description: putative protein kinase [Oryza sativa (japonica
MGMNLDSGELLAVKQVLITSNCASKEKTQAHIQELEEEVKLLKNLSHPNIVRYLGTVREDETLNILLEFVPGGSISSLLEKFGAFPESVVRTYTNQLLLGLEYLHNHAIMHRDIKGANILVDNQGCIKLADFGASKQVAELATISGAKSMKGTPYWMAPEVILQTGHSFSADIWSVGCTVIEMVTGKAPWSQQYKEIAAIFHIGTTKSHPPIPDNISSDANDFLLKCLQQEPNLRPTASELLKHPFVTGKQKESASKDLTSFMDNSCSPLPSELTNITSYQTSTSDDVGDICNLGSLTCTLAFPEKSIQNNSLCLKSNNGYDDDDDNDMCLIDDENFLTYNGETGPSLDNNTDAKKSCDTMSEISDILKCKFDENSGNGETETKVSMEVDHPSYSEDENELTESKIKAFLDDKAAELKKLQTPLYEEFYNGMITCSPICMESNINNNKREEAPRGFLKLPPKSRSPSQGHIGRSPSRATDAACCSKSPESGNSSGAPKNSNASAGAEQESNSQSVALSEIERKWKEELDQELERKRREITRQAGMGSSPRDRSLSRHREKSRFASPGK

SEQ ID NO: 101376 - DNA, 1776 bp, Arabidopsis thaliana
  misc_feature (1)..(1776): Ceres Seq. ID no. 13607702
  misc_feature: MA Experiment ID: 108433 Result: Down-regulated in Transcription
  misc_feature: MA Experiment 108433 PARAMETER Experiment Name: At_rhl_Mutant2_cDNA_P Parameter: Age (day) Value: 7
  misc_feature: MA Experiment 108433 PARAMETER Experiment Name: At_rhl_Mutant2_cDNA_P Parameter: Organism Value: A. thaliana
  misc_feature: MA Experiment 108433 PARAMETER Experiment Name: At_rhl_Mutant2_cDNA_P Parameter: Plant Line Value: rhl Mutant vs. wt landsburg
  misc_feature: MA Experiment 108433 PARAMETER Experiment Name: At_rhl_Mutant2_cDNA_P Parameter: Tissue Value: Roots
  misc_feature: MA Experiment ID: 108434 Result: Up-regulated in Transcription
  misc_feature: MA Experiment 108434 PARAMETER Experiment Name: At_Root_Tips_cDNA_P Parameter: Tissue Value: Root Tips
  misc_feature: MA Experiment ID: 108435 Result: Up-regulated in Transcription
  misc_feature: MA Experiment 108435 PARAMETER Experiment Name: At_stm_Mutants_cDNA_P Parameter: Plant Line Value: wt Landsburg vs stm
  misc_feature: MA Experiment 108435 PARAMETER Experiment Name: At_stm_Mutants_cDNA_P Parameter: Tissue Value: Shoot Apical Meristem Region
  misc_feature: MA Experiment ID: 108462 Result: Down-regulated in Transcription
  misc_feature: MA Experiment 108462 PARAMETER Experiment Name: At_Germinating_Seeds_cDNA_P Parameter: Age (day) Value: 2 vs. 0
  misc_feature: MA Experiment 108462 PARAMETER Experiment Name: At_Germinating_Seeds_cDNA_P Parameter: Tissue Value: Germinating Seeds
  misc_feature: MA Experiment ID: 108463 Result: Down-regulated in Transcription
  misc_feature: MA Experiment 108463 PARAMETER Experiment Name: At_Germinating_Seeds_cDNA_P Parameter: Age (day) Value: 3 vs. 0
  misc_feature: MA Experiment 108463 PARAMETER Experiment Name: At_Germinating_Seeds_cDNA_P Parameter: Tissue Value: Germinating Seeds
  misc_feature: MA Experiment ID: 108464 Result: Down-regulated in Transcription
  misc_feature: MA Experiment 108464 PARAMETER Experiment Name: At_Germinating_Seeds_cDNA_P Parameter: Age (day) Value: 4 vs. 0
  misc_feature: MA Experiment 108464 PARAMETER Experiment Name: At_Germinating_Seeds_cDNA_P Parameter: Tissue Value: Germinating Seeds
  misc_feature: MA Experiment ID: 108489 Result: Up-regulated in Transcription
  misc_feature: MA Experiment ID: 108572 Result: Down-regulated in Transcription
  misc_feature: MA Experiment 108572 PARAMETER Experiment Name: At_Drought_cDNA_P Parameter: Timepoint (hr) Value: 1
  misc_feature: MA Experiment 108572 PARAMETER Experiment Name: At_Drought_cDNA_P Parameter: Tissue Value: Aerial
  misc_feature: MA Experiment 108572 PARAMETER Experiment Name: At_Drought_cDNA_P Parameter: Treatment Value: Drought vs. No Drought
  misc_feature: MA Experiment ID: 108573 Result: Down-regulated in Transcription
  misc_feature: MA Experiment 108573 PARAMETER Experiment Name: At_Drought_cDNA_P Parameter: Timepoint (hr) Value: 6
  misc_feature: MA Experiment 108573 PARAMETER Experiment Name: At_Drought_cDNA_P Parameter: Tissue Value: Aerial
  misc_feature: MA Experiment 108573 PARAMETER Experiment Name: At_Drought_cDNA_P Parameter: Treatment Value: Drought vs. No Drought
  misc_feature: MA Experiment ID: 108576 Result: Down-regulated in Transcription
  misc_feature: MA Experiment 108576 PARAMETER Experiment Name: At_42deg_Heat_cDNA_P Parameter: Temperature (deg C) Value: 42 vs. 22
  misc_feature: MA Experiment 108576 PARAMETER Experiment Name: At_42deg_Heat_cDNA_P Parameter: Timepoint (hr) Value: 1
  misc_feature: MA Experiment 108576 PARAMETER Experiment Name: At_42deg_Heat_cDNA_P Parameter: Tissue Value: Aerial
  misc_feature: MA Experiment ID: 108577 Result: Down-regulated in Transcription
  misc_feature: MA Experiment 108577 PARAMETER Experiment Name: At_42deg_Heat_cDNA_P Parameter: Temperature (deg C) Value: 42 vs. 22
  misc_feature: MA Experiment 108577 PARAMETER Experiment Name: At_42deg_Heat_cDNA_P Parameter: Timepoint (hr) Value: 6
  misc_feature: MA Experiment 108577 PARAMETER Experiment Name: At_42deg_Heat_cDNA_P Parameter: Tissue Value: Aerial
  misc_feature: MA Experiment ID: 108579 Result: Up-regulated in Transcription
  misc_feature: MA Experiment 108579 PARAMETER Experiment Name: At_4deg_Cold_cDNA_P Parameter: Temperature (deg C) Value: 4 vs. 22
  misc_feature: MA Experiment 108579 PARAMETER Experiment Name: At_4deg_Cold_cDNA_P Parameter: Timepoint (hr) Value: 6
  misc_feature: MA Experiment 108579 PARAMETER Experiment Name: At_4deg_Cold_cDNA_P Parameter: Tissue Value: Aerial
  misc_feature: MA Experiment ID: 108595 Result: Up-regulated in Transcription
  misc_feature: MA Experiment 108595 PARAMETER Experiment Name: At_Ler-pi_Ovule_cDNA_P Parameter: Plant Line Value: null
  misc_feature: MA Experiment ID: 108609 Result: Down-regulated in Transcription
  misc_feature: MA Experiment 108609 PARAMETER Experiment Name: At_100uM_ABA_cDNA_P Parameter: Timepoint (hr) Value: 24
  misc_feature: MA Experiment 108609 PARAMETER Experiment Name: At_100uM_ABA_cDNA_P Parameter: Tissue Value: Aerial
  misc_feature: MA Experiment 108609 PARAMETER Experiment Name: At_100uM_ABA_cDNA_P Parameter: Treatment Value: 100uM ABA vs. No Treatment
  misc_feature: MA Experiment ID: 20000180 Result: Down-regulated in Transcription
  misc_feature: MA Experiment 20000180 PARAMETER Experiment Name: At_Germinating_Seeds_P Parameter: Age (hr) Value: 24 vs. 0
  misc_feature: MA Experiment 20000180 PARAMETER Experiment Name: At_Germinating_Seeds_P Parameter: Tissue Value: Germinating Seeds
  misc_feature: MA Experiment ID: 20000184 Result: Down-regulated in Transcription
  misc_feature: MA Experiment 20000184 PARAMETER Experiment Name: At_Shoots__P Parameter: Age (day) Value: 7
  misc_feature: MA Experiment 20000184 PARAMETER Experiment Name: At_Shoots__P Parameter: Tissue Value: Shoots vs. Whole Plant
  misc_feature: MA Experiment ID: 20000224 Result: Up-regulated in Transcription
  misc_feature: MA Experiment ID: 20000227 Result: Up-regulated in Transcription
  misc_feature: MA Experiment 20000227 PARAMETER Experiment Name: At_Root-Tips-vs-Tops_P Parameter: Tissue Value: Root Tips vs. Root Tops
  misc_feature: MA Experiment ID: 20000234 Result: Up-regulated in Transcription
  misc_feature: MA Experiment 20000234 PARAMETER Experiment Name: At_Siliques_P Parameter: Age (day) Value: 21
  misc_feature: MA Experiment 20000234 PARAMETER Experiment Name: At_Siliques_P Parameter: Organism Value: A. thaliana
  misc_feature: MA Experiment 20000234 PARAMETER Experiment Name: At_Siliques_P Parameter: Plant Line Value: WS
  misc_feature: MA Experiment 20000234 PARAMETER Experiment Name: At_Siliques_P Parameter: Tissue Value: Less Than 5mm Siliques vs. Whole Plant
  misc_feature: MA Experiment ID: 20000264 Result: Up-regulated in Transcription
  misc_feature: MA Experiment 20000264 PARAMETER Experiment Name: At_Open_Flower_P Parameter: Age (day) Value: 21
  misc_feature: MA Experiment 20000264 PARAMETER Experiment Name: At_Open_Flower_P Parameter: Plant Line Value: WS
  misc_feature: MA Experiment 20000264 PARAMETER Experiment Name: At_Open_Flower_P Parameter: Tissue Value: Open Flower vs. Whole Plant
  misc_feature: MA Experiment ID: 20000265 Result: Up-regulated in Transcription
  misc_feature: MA Experiment 20000265 PARAMETER Experiment Name: At_Open_Flower_P Parameter: Age (day) Value: 21
  misc_feature: MA Experiment 20000265 PARAMETER Experiment Name: At_Open_Flower_P Parameter: Plant Line Value: WS
  misc_feature: MA Experiment 20000265 PARAMETER Experiment Name: At_Open_Flower_P Parameter: Tissue Value: Closed Flower vs. Whole Plant
  misc_feature: MA Experiment ID: 20000436 Result: Down-regulated in Transcription
  misc_feature: MA Experiment 20000436 PARAMETER Experiment Name: At_Drought_P Parameter: Age (day) Value: 7
  misc_feature: MA Experiment 20000436 PARAMETER Experiment Name: At_Drought_P Parameter: Organism Value: A. thaliana
  misc_feature: MA Experiment 20000436 PARAMETER Experiment Name: At_Drought_P Parameter: Plant Line Value: WS
  misc_feature: MA Experiment 20000436 PARAMETER Experiment Name: At_Drought_P Parameter: Timepoint (hr) Value: 12
  misc_feature: MA Experiment 20000436 PARAMETER Experiment Name: At_Drought_P Parameter: Tissue Value: Whole Plant
  misc_feature: MA Experiment 20000436 PARAMETER Experiment Name: At_Drought_P Parameter: Treatment Value: Drought vs. No Drought
  misc_feature: MA Experiment ID: 20000437 Result: Down-regulated in Transcription
  misc_feature: MA Experiment 20000437 PARAMETER Experiment Name: At_Drought_P Parameter: Age (day) Value: 8
  misc_feature: MA Experiment 20000437 PARAMETER Experiment Name: At_Drought_P Parameter: Organism Value: A. thaliana
  misc_feature: MA Experiment 20000437 PARAMETER Experiment Name: At_Drought_P Parameter: Plant Line Value: WS
  misc_feature: MA Experiment 20000437 PARAMETER Experiment Name: At_Drought_P Parameter: Timepoint (hr) Value: 24
  misc_feature: MA Experiment 20000437 PARAMETER Experiment Name: At_Drought_P Parameter: Tissue Value: Whole Plant
  misc_feature: MA Experiment 20000437 PARAMETER Experiment Name: At_Drought_P Parameter: Treatment Value: Drought vs. No Drought
  misc_feature: MA Experiment ID: 20000453 Result: Down-regulated in Transcription
  misc_feature: MA Experiment 20000453 PARAMETER Experiment Name: At_100uM_ABA_P Parameter: Age (day) Value: 15
  misc_feature: MA Experiment 20000453 PARAMETER Experiment Name: At_100uM_ABA_P Parameter: Organism Value: A. thaliana
  misc_feature: MA Experiment 20000453 PARAMETER Experiment Name: At_100uM_ABA_P Parameter: Plant Line Value: WS
  misc_feature: MA Experiment 20000453 PARAMETER Experiment Name: At_100uM_ABA_P Parameter: Timepoint (hr) Value: 24
  misc_feature: MA Experiment 20000453 PARAMETER Experiment Name: At_100uM_ABA_P Parameter: Tissue Value: Aerial
  misc_feature: MA Experiment 20000453 PARAMETER Experiment Name: At_100uM_ABA_P Parameter: Treatment Value: 100uM ABA vs. No Treatment
  misc_feature: MA Experiment ID: 20000456 Result: Up-regulated in Transcription
  misc_feature: MA Experiment 20000456 PARAMETER Experiment Name: At_100uM_BA_P Parameter: Age (day) Value: 14
  misc_feature: MA Experiment 20000456 PARAMETER Experiment Name: At_100uM_BA_P Parameter: Organism Value: A. thaliana
  misc_feature: MA Experiment 20000456 PARAMETER Experiment Name: At_100uM_BA_P Parameter: Plant Line Value: WS
  misc_feature: MA Experiment 20000456 PARAMETER Experiment Name: At_100uM_BA_P Parameter: Timepoint (hr) Value: 6
  misc_feature: MA Experiment 20000456 PARAMETER Experiment Name: At_100uM_BA_P Parameter: Tissue Value: Aerial
  misc_feature: MA Experiment 20000456 PARAMETER Experiment Name: At_100uM_BA_P Parameter: Treatment Value: 100uM BA vs. No Treatment
  misc_feature: MA Experiment ID: 20000495 Result: Up-regulated in Transcription
  misc_feature: MA Experiment 20000495 PARAMETER Experiment Name: At_Guard_Cells_P Parameter: Harvest Date Value: 8/2/2002
  misc_feature: MA Experiment 20000495 PARAMETER Experiment Name: At_Guard_Cells_P Parameter: Organism Value: A. thaliana
  misc_feature: MA Experiment 20000495 PARAMETER Experiment Name: At_Guard_Cells_P Parameter: Tissue Value: Guard Cells vs. Leaves
  misc_feature: MA Experiment ID: 20001247 Result: Down-regulated in Transcription
  misc_feature: MA Experiment 20001247 PARAMETER Experiment Name: At_Far-red-induction_P Parameter: Age (day) Value: 7
  misc_feature: MA Experiment 20001247 PARAMETER Experiment Name: At_Far-red-induction_P Parameter: Light Value: Far-red vs. White
  misc_feature: MA Experiment 20001247 PARAMETER Experiment Name: At_Far-red-induction_P Parameter: Organism Value: A. thaliana
  misc_feature: MA Experiment 20001247 PARAMETER Experiment Name: At_Far-red-induction_P Parameter: Plant Line Value: Columbia
  misc_feature: MA Experiment 20001247 PARAMETER Experiment Name: At_Far-red-induction_P Parameter: Timepoint (hr) Value: 1
  misc_feature: MA Experiment 20001247 PARAMETER Experiment Name: At_Far-red-induction_P Parameter: Tissue Value: Whole Plant
  misc_feature: MA Experiment ID: 20001450 Result: Down-regulated in Transcription
  misc_feature: MA Experiment 20001450 PARAMETER Experiment Name: At_Far-red-induction_P Parameter: Age (day) Value: 7
  misc_feature: MA Experiment 20001450 PARAMETER Experiment Name: At_Far-red-induction_P Parameter: Light Value: Far-red vs. White
  misc_feature: MA Experiment 20001450 PARAMETER Experiment Name: At_Far-red-induction_P Parameter: Organism Value: A. thaliana
  misc_feature: MA Experiment 20001450 PARAMETER Experiment Name: At_Far-red-induction_P Parameter: Plant Line Value: Columbia
  misc_feature: MA Experiment 20001450 PARAMETER Experiment Name: At_Far-red-induction_P Parameter: Timepoint (hr) Value: 8
  misc_feature: MA Experiment 20001450 PARAMETER Experiment Name: At_Far-red-induction_P Parameter: Tissue Value: Whole Plant
  misc_feature: MA Experiment ID: 20001458 Result: Up-regulated in Transcription
  misc_feature: MA Experiment 20001458 PARAMETER Experiment Name: At_50mM_NH4NO3_L-to-H_P Parameter: Age (day) Value: Undefined
  misc_feature: MA Experiment 20001458 PARAMETER Experiment Name: At_50mM_NH4NO3_L-to-H_P Parameter: Organism Value: Undefined
  misc_feature: MA Experiment 20001458 PARAMETER Experiment Name: At_50mM_NH4NO3_L-to-H_P Parameter: Plant Line Value: Undefined
  misc_feature: MA Experiment 20001458 PARAMETER Experiment Name: At_50mM_NH4NO3_L-to-H_P Parameter: Timepoint (hr) Value: 2
  misc_feature: MA Experiment 20001458 PARAMETER Experiment Name: At_50mM_NH4NO3_L-to-H_P Parameter: Tissue Value: Siliques
  misc_feature: MA Experiment 20001458 PARAMETER Experiment Name: At_50mM_NH4NO3_L-to-H_P Parameter: Treatment Value: 50mM NH4NO3 vs. 100mM Manitol
  misc_feature: MA Experiment ID: 20001557 Result: Up-regulated in Transcription
  misc_feature: MA Experiment 20001557 PARAMETER Experiment Name: At_Drought_Soil_Dry_P Parameter: Age (day) Value: 27
  misc_feature: MA Experiment 20001557 PARAMETER Experiment Name: At_Drought_Soil_Dry_P Parameter: Organism Value: A. thaliana
  misc_feature: MA Experiment 20001557 PARAMETER Experiment Name: At_Drought_Soil_Dry_P Parameter: Plant Line Value: WS
  misc_feature: MA Experiment 20001557 PARAMETER Experiment Name: At_Drought_Soil_Dry_P Parameter: Post Timepoint (hr) Value: 3
  misc_feature: MA Experiment 20001557 PARAMETER Experiment Name: At_Drought_Soil_Dry_P Parameter: Post-Treatment Value: Re-Water vs. No Drought
  misc_feature: MA Experiment 20001557 PARAMETER Experiment Name: At_Drought_Soil_Dry_P Parameter: Timepoint (day) Value: 13
  misc_feature: MA Experiment 20001557 PARAMETER Experiment Name: At_Drought_Soil_Dry_P Parameter: Treatment Value: Drought vs. No Drought
  misc_feature: MA Experiment ID: 20001558 Result: Up-regulated in Transcription
  misc_feature: MA Experiment 20001558 PARAMETER Experiment Name: At_Drought_Soil_Dry_P Parameter: Age (day) Value: 27
  misc_feature: MA Experiment 20001558 PARAMETER Experiment Name: At_Drought_Soil_Dry_P Parameter: Organism Value: A. thaliana
  misc_feature: MA Experiment 20001558 PARAMETER Experiment Name: At_Drought_Soil_Dry_P Parameter: Plant Line Value: WS
  misc_feature: MA Experiment 20001558 PARAMETER Experiment Name: At_Drought_Soil_Dry_P Parameter: Post Timepoint (hr) Value: 6
  misc_feature: MA Experiment 20001558 PARAMETER Experiment Name: At_Drought_Soil_Dry_P Parameter: Post-Treatment Value: Re-Water vs. No Drought
  misc_feature: MA Experiment 20001558 PARAMETER Experiment Name: At_Drought_Soil_Dry_P Parameter: Timepoint (day) Value: 13
  misc_feature: MA Experiment 20001558 PARAMETER Experiment Name: At_Drought_Soil_Dry_P Parameter: Treatment Value: Drought vs. No Drought
  misc_feature: MA Experiment ID: 20001560 Result: Up-regulated in Transcription
  misc_feature: MA Experiment 20001560 PARAMETER Experiment Name: At_Drought_Soil_Dry_P Parameter: Age (day) Value: 28
  misc_feature: MA Experiment 20001560 PARAMETER Experiment Name: At_Drought_Soil_Dry_P Parameter: Organism Value: A. thaliana
  misc_feature: MA Experiment 20001560 PARAMETER Experiment Name: At_Drought_Soil_Dry_P Parameter: Plant Line Value: WS
  misc_feature: MA Experiment 20001560 PARAMETER Experiment Name: At_Drought_Soil_Dry_P Parameter: Post Timepoint (hr) Value: None
  misc_feature: MA Experiment 20001560 PARAMETER Experiment Name: At_Drought_Soil_Dry_P Parameter: Post-Treatment Value: None
  misc_feature: MA Experiment 20001560 PARAMETER Experiment Name: At_Drought_Soil_Dry_P Parameter: Timepoint (day) Value: 14
  misc_feature: MA Experiment 20001560 PARAMETER Experiment Name: At_Drought_Soil_Dry_P Parameter: Treatment Value: Drought vs. No Drought
  misc_feature: MA Experiment ID: 20001757 Result: Up-regulated in Transcription
  misc_feature: MA Experiment 20001757 PARAMETER Experiment Name: At_50mM_NH4NO3_L-to-H_P Parameter: Timepoint (hr) Value: 6
  misc_feature: MA Experiment 20001757 PARAMETER Experiment Name: At_50mM_NH4NO3_L-to-H_P Parameter: Tissue Value: Leaf
  misc_feature: MA Experiment 20001757 PARAMETER Experiment Name: At_50mM_NH4NO3_L-to-H_P Parameter: Treatment Value: 50mM NH4NO3 vs 100mM Mannitol
gtatatttcttctcgctcagtaggtctttagggttttagtttcttctcctcaaaaaatggcgatgtatgttatctacgagtcttcttccggctatggtctcttcgaggttcacggactagatgagatcggacagaacactgaggcggttcggacttctgtctccgacctcagtcgctttggccgtgttgttcagctcacagcgtttcatccctttgagtctgctctcgatgctctcaaccaagtcaacgccgtctctgaaggtgttatgactgatgagcttagaagttttctggagttgaatcttcctaaggtcaaggagggaaagaaacccaagttcagtttaggattggctgagcctaaactcggttcacatatatttgaagctactaaaatcccatgccagagcaatgagtttgttcttgagcttctcagaggtgttcgccagcattttgataggtttatcaaggacttaaagcctggtgatcttgaaaaatctcagcttggattagctcacagctacagcagagccaaggtgaagttcaatgttaaccgagtggataacatggttattcaagctatcttcatgcttgacacgcttgataaggatatcaattcctttgccatgagagtcagggaatggtattcgtggcacttccccgaactagtgaagatagtcaatgacaactatctttacgcccgtgtttcaaagatgattgatgacaagtcaaagttgactgaagatcacatccccatgcttactgaagtcttaggggatgaagataaggcaaaggaggtcatcgaagctggaaaagcatccatgggctcggatttatcaccgcttgacttaatcaacgtacagacctttgctcagaaagttatggaccttgctgactacaggaagaagctctatgattatcttgtcactaagatgagcgacattgcccctaatttggctgctttgattggagaaatggtcggtgcccgtttgatttcacatgctggaagtctgactaaccttgctaaatgcccatcttccaccctccagattcttggagccgagaaggctcttttcagggcacttaaaacacgtggaaacactcccaagtatggattgattttccattcttccttcattggccgagcatctgctaagaacaagggccgtatcgctcgttatcttgcaaacaagtgctctatagcatcccggattgattgttttgctgatggtgcaactactgcttttggtgagaagcttcgcgaacaagttgaggaaaggctagaattttatgacaaaggtgttgccccacgcaagaacgtggatgtaatgaaggaggtgatagagaatctaaagcaagaagaggaagggaaggagccagttgatgcctcggtgaagaaaagcaagaagaagaaggcaaagggtgaagaagaagaagaggtggtggcaatggaggaggacaagtcagagaaaaagaagaagaaagagaagaggaagatggagactgcagaggagaacgagaaatcagagaagaagaagacaaagaagagtaaagctggaggagaagaggagactgatgatggtcacagcaccaagaagaagaagaagaagtctaagagcgctgaatagaaagggatgcaacattaacaaaccctgtattgtattttttttttgagctaaattaatgtcgtctgtttttcgtagtgaacatcggagaatttttgttttggtctggaaacgattcaaggtttggcaatatcttaagtttgtttaggttttc

SEQ ID NO: 101377 - protein, 522 aa, Arabidopsis thaliana; identical to SEQ ID NO: 21748
  peptide (1)..(522): Ceres Seq. ID no. 13607703
  misc_feature (266)..(414): Pfam Name: Putative snoRNA binding domain Pfam Description: Putative snoRNA binding domain
  misc_feature (1)..(522): Homolog of NCBI NO: 15223458 NR Description: nucleolar protein Nop56, putative [Arabidopsis
  misc_feature (1)..(498): Homolog of NCBI NO: 11994428 NR Description: nucleolar protein [Arabidopsis thaliana]
  misc_feature (1)..(481): Homolog of NCBI NO: 15230621 NR Description: nucleolar protein Nop56, putative [Arabidopsis
  misc_feature (1)..(522): Homolog of NCBI NO: 34899158 NR Description: putative nucleolar protein [Oryza sativa
  misc_feature (72)..(519): Homolog of NCBI NO: 3860319 NR Description: nucleolar protein [Cicer arietinum]
  misc_feature (1)..(496): Homolog of NCBI NO: 19112160 NR Description: putative U3 snoRNP component; putative component
  misc_feature (3)..(522): Homolog of NCBI NO: 14799394 NR Description: XNop56 protein [Xenopus laevis]
  misc_feature (2)..(522): Homolog of NCBI NO: 31241121 NR Description: ENSANGP00000019928 [Anopheles gambiae]
  misc_feature (3)..(522): Homolog of NCBI NO: 2230878 NR Description: hNop56 [Homo sapiens]
  misc_feature (3)..(519): Homolog of NCBI NO: 30923357 NR Description: Nucleolar protein Nop56 (Nucleolar protein 5A)

SEQ ID NO: 101378 - protein, 520 aa, Arabidopsis thaliana; identical to SEQ ID NO: 21749
  peptide (1)..(520): Ceres Seq. ID no. 13607704
  misc_feature (264)..(412): Pfam Name: Putative snoRNA binding domain Pfam Description: Putative snoRNA binding domain
  misc_feature (1)..(520): Homolog of NCBI NO: 15223458 NR Description: nucleolar protein Nop56, putative [Arabidopsis
  misc_feature (1)..(496): Homolog of NCBI NO: 11994428 NR Description: nucleolar protein [Arabidopsis thaliana]
  misc_feature (1)..(479): Homolog of NCBI NO: 15230621 NR Description: nucleolar protein Nop56, putative [Arabidopsis
  misc_feature (1)..(520): Homolog of NCBI NO: 34899158 NR Description: putative nucleolar protein [Oryza sativa
  misc_feature (70)..(517): Homolog of NCBI NO: 3860319 NR Description: nucleolar protein [Cicer arietinum]
  misc_feature (1)..(494): Homolog of NCBI NO: 19112160 NR Description: putative U3 snoRNP component; putative component
  misc_feature (1)..(520): Homolog of NCBI NO: 14799394 NR Description: XNop56 protein [Xenopus laevis]
  misc_feature (1)..(520): Homolog of NCBI NO: 31241121 NR Description: ENSANGP00000019928 [Anopheles gambiae]
  misc_feature (1)..(520): Homolog of NCBI NO: 2230878 NR Description: hNop56 [Homo sapiens]
  misc_feature (1)..(517): Homolog of NCBI NO: 30923357 NR Description: Nucleolar protein Nop56 (Nucleolar protein 5A)

SEQ ID NO: 101379 - protein, 452 aa, Arabidopsis thaliana; identical to SEQ ID NO: 21750
  peptide (1)..(452): Ceres Seq. ID no. 13607705
  misc_feature (196)..(344): Pfam Name: Putative snoRNA binding domain Pfam Description: Putative snoRNA binding domain
  misc_feature (1)..(452): Homolog of NCBI NO: 15223458 NR Description: nucleolar protein Nop56, putative [Arabidopsis
  misc_feature (1)..(428): Homolog of NCBI NO: 11994428 NR Description: nucleolar protein [Arabidopsis thaliana]
  misc_feature (1)..(411): Homolog of NCBI NO: 15230621 NR Description: nucleolar protein Nop56, putative [Arabidopsis
  misc_feature (1)..(452): Homolog of NCBI NO: 34899158 NR Description: putative nucleolar protein [Oryza sativa
  misc_feature (2)..(449): Homolog of NCBI NO: 3860319 NR Description: nucleolar protein [Cicer arietinum]
  misc_feature (1)..(426): Homolog of NCBI NO: 19112160 NR Description: putative U3 snoRNP component; putative component
  misc_feature (1)..(452): Homolog of NCBI NO: 14799394 NR Description: XNop56 protein [Xenopus laevis]
  misc_feature (1)..(452): Homolog of NCBI NO: 31241121 NR Description: ENSANGP00000019928 [Anopheles gambiae]
  misc_feature (1)..(452): Homolog of NCBI NO: 2230878 NR Description: hNop56 [Homo sapiens]
  misc_feature (1)..(449): Homolog of NCBI NO: 30923357 NR Description: Nucleolar protein Nop56 (Nucleolar protein 5A)

SEQ ID NO: 101380 - DNA, 1387 bp, Arabidopsis thaliana
  misc_feature (1)..(1387): Ceres Seq. ID no. 13607714
  misc_feature: MA Experiment ID: 108461 Result: Down-regulated in Transcription
  misc_feature: MA Experiment 108461 PARAMETER Experiment Name: At_Germinating_Seeds_cDNA_P Parameter: Age (day) Value: 1 vs. 0
  misc_feature: MA Experiment 108461 PARAMETER Experiment Name: At_Germinating_Seeds_cDNA_P Parameter: Tissue Value: Germinating Seeds
  misc_feature: MA Experiment ID: 20000224 Result: Down-regulated in Transcription
  misc_feature: MA Experiment ID: 20001905 Result: Up-regulated in Transcription
  misc_feature: MA Experiment 20001905 PARAMETER Experiment Name: At_Drought_Reproduction_P Parameter: Age (day) Value: 40
  misc_feature: MA Experiment 20001905 PARAMETER Experiment Name: At_Drought_Reproduction_P Parameter: Organism Value: A. thaliana
  misc_feature: MA Experiment 20001905 PARAMETER Experiment Name: At_Drought_Reproduction_P Parameter: Plant Line Value: WS
  misc_feature: MA Experiment 20001905 PARAMETER Experiment Name: At_Drought_Reproduction_P Parameter: Timepoint (day) Value: 10
  misc_feature: MA Experiment 20001905 PARAMETER Experiment Name: At_Drought_Reproduction_P Parameter: Tissue Value: Rosettes
  misc_feature: MA Experiment 20001905 PARAMETER Experiment Name: At_Drought_Reproduction_P Parameter: Treatment Value: Drought vs. No Drought
  misc_feature: MA Experiment ID: 20001911 Result: Up-regulated in Transcription
  misc_feature: MA Experiment 20001911 PARAMETER Experiment Name: At_Drought_Reproduction_P Parameter: Age (day) Value: 40
  misc_feature: MA Experiment 20001911 PARAMETER Experiment Name: At_Drought_Reproduction_P Parameter: Organism Value: A. thaliana
  misc_feature: MA Experiment 20001911 PARAMETER Experiment Name: At_Drought_Reproduction_P Parameter: Plant Line Value: WS
  misc_feature: MA Experiment 20001911 PARAMETER Experiment Name: At_Drought_Reproduction_P Parameter: Timepoint (day) Value: 10
  misc_feature: MA Experiment 20001911 PARAMETER Experiment Name: At_Drought_Reproduction_P Parameter: Tissue Value: Flowers
  misc_feature: MA Experiment 20001911 PARAMETER Experiment Name: At_Drought_Reproduction_P Parameter: Treatment Value: Drought vs. No Drought
gccgtgtcaaatcaatctactgttctctctcctatctgggcaaaaatctcagacaaacctgcaaaattagggtatttgaggatatggattatgatcggtacaagttatttgttggtggtattgcgaaagagacaagtgaagaagctctgaagcagtattttagcagatatggagctgtgttggaagctgttgtagctaaagagaaagtcactggaaaacctagaggttttgggtttgttcgctttgctaatgattgtgatgttgttaaagctcttagagacactcacttcattctcggtaaacccgttgatgtgagaaaggcgattaggaaacatgaactataccaacagccgtttagcatgcagtttttggagagaaaagtgcaacagatgaatggtggtttgcgtgagatgtcgagtaatggtgtgaccagtaggactaagaagatatttgttgggggtttgtcgtctaacacgactgaggaagagtttaagagttactttgagaggtttggtaggactactgatgtagttgtgatgcatgacggtgtgactaacaggccaaggggttttgggtttgttacttatgattcggaggactctgttgaggttgttatgcagagtaatttccatgagttgagtgataaacgcgtggaagtgaaacgggcaatacctaaagaaggaatccagagcaataacggtaatgctgttaatattcctccttcctacagcagctttcaagcaacaccttatgtccctgagcaaaacggatatgggatggttttacagtttcctcctcctgtctttggttatcatcacaatgtccaagccgttcaatatccttatggttaccaattcacagcacaagtggctaacgtttcatggaacaatccgattatgcaacccaccggtttttactgtgctcctcctcatcctactcctcctcccaccaacaatcttggttatatccaatacatgaacgggtttgatctttcgggtacgaacatttccgggtacaatcctctagcatggcctgtaacgggggatgcagctggtgcgctaatacatcagtttgtagatttgaagcttgatgtccacagtcaagcccatcagagaatgaatggaggtaacatgggaataccattgcagaatggtacatatatatgacagttgcagaatgataaatgcaaataggctcacaagggtagtgaaattctttggactcttttaaatggttttttaggttcctcatctttcttcattaactctttggtaaatgtgttgggttggtttggttaccttgtatattgtttaggtatttgattttaaccccaagacttatgtatcatatattactgcatttgtaatatatcacactcatttagttc

SEQ ID NO: 101381 - protein, 387 aa, Arabidopsis thaliana
  peptide (1)..(387): Ceres Seq. ID no. 13607715
  misc_feature (149)..(219): Pfam Name: RNA recognition motif. (a.k.a. RRM, RBD, or RNP domain) Pfam Description: RNA recognition motif. (a.k.a. RRM, RBD, or RNP
  misc_feature (28)..(380): Homolog of NCBI NO: 25456498 NR Description: RNA binding protein [imported] - Arabidopsis >gi|6566348|dbj|BAA88269.1| RNA binding protein [Arabidopsis
  misc_feature (28)..(387): Homolog of NCBI NO: 15217975 NR Description: RNA-binding protein [Arabidopsis thaliana]
  misc_feature (31)..(273): Homolog of NCBI NO: 7487039 NR Description: hypothetical protein T15N24.100 - Arabidopsis
  misc_feature (31)..(273): Homolog of NCBI NO: 18416794 NR Description: heterogeneous nuclear ribonucleoprotein (hnRNP), [Arabidopsis thaliana] >gi|16930503|gb|AAL31937.1|AF419605_1 [Arabidopsis thaliana] >gi|20453245|gb|AAM19861.1|
  misc_feature (28)..(270): Homolog of NCBI NO: 38175737 NR Description: putative heterogeneous nuclear ribonucleoprotein
  misc_feature (28)..(273): Homolog of NCBI NO: 9758187 NR Description: RNA-binding protein-like [Arabidopsis thaliana]
  misc_feature (28)..(273): Homolog of NCBI NO: 18423760 NR Description: RNA recognition motif (RRM)-containing protein
  misc_feature (28)..(273): Homolog of NCBI NO: 30696616 NR Description: RNA recognition motif (RRM)-containing protein
  misc_feature (28)..(273): Homolog of NCBI NO: 22531168 NR Description: RNA-binding protein-like [Arabidopsis thaliana]
  misc_feature (28)..(337): Homolog of NCBI NO: 15292697 NR Description: putative RNA-binding protein [Arabidopsis
RVKSIYCSLSYLGKNLRQTCKIRVFEDMDYDRYKLFVGGIAKETSEEALKQYFSRYGAVLEAVVAKEKVTGKPRGFGFVRFANDCDVVKALRDTHFILGKPVDVRKAIRKHELYQQPFSMQFLERKVQQMNGGLREMSSNGVTSRTKKIFVGGLSSNTTEEEFKSYFERFGRTTDVVVMHDGVTNRPRGFGFVTYDSEDSVEVVMQSNFHELSDKRVEVKRAIPKEGIQSNNGNAVNIPPSYSSFQATPYVPEQNGYGMVLQFPPPVFGYHHNVQAVQYPYGYQFTAQVANVSWNNPIMQPTGFYCAPPHPTPPPTNNLGYIQYMNGFDLSGTNISGYNPLAWPVTGDAAGALIHQFVDLKLDVHSQAHQRMNGGNMGIPLQNGTYI

SEQ ID NO: 101382 - protein, 360 aa, Arabidopsis thaliana
  peptide (1)..(360): Ceres Seq. ID no. 13607716
  misc_feature (122)..(192): Pfam Name: RNA recognition motif. (a.k.a. RRM, RBD, or RNP domain) Pfam Description: RNA recognition motif. (a.k.a. RRM, RBD, or RNP
  misc_feature (1)..(353): Homolog of NCBI NO: 25456498 NR Description: RNA binding protein [imported] - Arabidopsis >gi|6566348|dbj|BAA88269.1| RNA binding protein [Arabidopsis
  misc_feature (1)..(360): Homolog of NCBI NO: 15217975 NR Description: RNA-binding protein [Arabidopsis thaliana]
  misc_feature (4)..(246): Homolog of NCBI NO: 7487039 NR Description: hypothetical protein T15N24.100 - Arabidopsis
  misc_feature (4)..(246): Homolog of NCBI NO: 18416794 NR Description: heterogeneous nuclear ribonucleoprotein (hnRNP), [Arabidopsis thaliana] >gi|16930503|gb|AAL31937.1|AF419605_1 [Arabidopsis thaliana] >gi|20453245|gb|AAM19861.1|
  misc_feature (1)..(243): Homolog of NCBI NO: 38175737 NR Description: putative heterogeneous nuclear ribonucleoprotein
  misc_feature (1)..(246): Homolog of NCBI NO: 9758187 NR Description: RNA-binding protein-like [Arabidopsis thaliana]
  misc_feature (1)..(246): Homolog of NCBI NO: 18423760 NR Description: RNA recognition motif (RRM)-containing protein
  misc_feature (1)..(246): Homolog of NCBI NO: 22531168 NR Description: RNA-binding protein-like [Arabidopsis thaliana]
  misc_feature (1)..(246): Homolog of NCBI NO: 30696616 NR Description: RNA recognition motif (RRM)-containing protein
  misc_feature (1)..(310): Homolog of NCBI NO: 15292697 NR Description: putative RNA-binding protein [Arabidopsis
MDYDRYKLFVGGIAKETSEEALKQYFSRYGAVLEAVVAKEKVTGKPRGFGFVRFANDCDVVKALRDTHFILGKPVDVRKAIRKHELYQQPFSMQFLERKVQQMNGGLREMSSNGVTSRTKKIFVGGLSSNTTEEEFKSYFERFGRTTDVVVMHDGVTNRPRGFGFVTYDSEDSVEVVMQSNFHELSDKRVEVKRAIPKEGIQSNNGNAVNIPPSYSSFQATPYVPEQNGYGMVLQFPPPVFGYHHNVQAVQYPYGYQFTAQVANVSWNNPIMQPTGFYCAPPHPTPPPTNNLGYIQYMNGFDLSGTNISGYNPLAWPVTGDAAGALIHQFVDLKLDVHSQAHQRMNGGNMGIPLQNGTYI

SEQ ID NO: 101383 - protein, 268 aa, Arabidopsis thaliana
  peptide (1)..(268): Ceres Seq. ID no. 13607717
  misc_feature (30)..(100): Pfam Name: RNA recognition motif. (a.k.a. RRM, RBD, or RNP domain) Pfam Description: RNA recognition motif. (a.k.a. RRM, RBD, or RNP
  misc_feature (1)..(261): Homolog of NCBI NO: 25456498 NR Description: RNA binding protein [imported] - Arabidopsis >gi|6566348|dbj|BAA88269.1| RNA binding protein [Arabidopsis
  misc_feature (1)..(268): Homolog of NCBI NO: 15217975 NR Description: RNA-binding protein [Arabidopsis thaliana]
  misc_feature (1)..(154): Homolog of NCBI NO: 7487039 NR Description: hypothetical protein T15N24.100 - Arabidopsis
  misc_feature (1)..(154): Homolog of NCBI NO: 18416794 NR Description: heterogeneous nuclear ribonucleoprotein (hnRNP), [Arabidopsis thaliana] >gi|16930503|gb|AAL31937.1|AF419605_1 [Arabidopsis thaliana] >gi|20453245|gb|AAM19861.1|
  misc_feature (1)..(151): Homolog of NCBI NO: 38175737 NR Description: putative heterogeneous nuclear ribonucleoprotein
  misc_feature (1)..(154): Homolog of NCBI NO: 9758187 NR Description: RNA-binding protein-like [Arabidopsis thaliana]
  misc_feature (1)..(154): Homolog of NCBI NO: 18423760 NR Description: RNA recognition motif (RRM)-containing protein
  misc_feature (1)..(154): Homolog of NCBI NO: 30696616 NR Description: RNA recognition motif (RRM)-containing protein
  misc_feature (1)..(154): Homolog of NCBI NO: 22531168 NR Description: RNA-binding protein-like [Arabidopsis thaliana]
  misc_feature (1)..(218): Homolog of NCBI NO: 15292697 NR Description: putative RNA-binding protein [Arabidopsis
MQFLERKVQQMNGGLREMSSNGVTSRTKKIFVGGLSSNTTEEEFKSYFERFGRTTDVVVMHDGVTNRPRGFGFVTYDSEDSVEVVMQSNFHELSDKRVEVKRAIPKEGIQSNNGNAVNIPPSYSSFQATPYVPEQNGYGMVLQFPPPVFGYHHNVQAVQYPYGYQFTAQVANVSWNNPIMQPTGFYCAPPHPTPPPTNNLGYIQYMNGFDLSGTNISGYNPLAWPVTGDAAGALIHQFVDLKLDVHSQAHQRMNGGNMGIPLQNGTYI

SEQ ID NO: 101384 - DNA, 1695 bp, Arabidopsis thaliana
  misc_feature (1)..(1695): Ceres Seq. ID no. 13607722
  misc_feature: MA Experiment ID: 20000185 Result: Up-regulated in Transcription
  misc_feature: MA Experiment 20000185 PARAMETER Experiment Name: At_Roots__P Parameter: Age (day) Value: 7 vs. 21
  misc_feature: MA Experiment 20000185 PARAMETER Experiment Name: At_Roots__P Parameter: Organism Value: A. thaliana
  misc_feature: MA Experiment 20000185 PARAMETER Experiment Name: At_Roots__P Parameter: Tissue Value: Roots vs. Whole Plant
  misc_feature: MA Experiment ID: 20000439 Result: Up-regulated in Transcription
  misc_feature: MA Experiment 20000439 PARAMETER Experiment Name: At_Roots__P Parameter: Age (day) Value: 14 vs. 21
  misc_feature: MA Experiment 20000439 PARAMETER Experiment Name: At_Roots__P Parameter: Organism Value: A. thaliana
  misc_feature: MA Experiment 20000439 PARAMETER Experiment Name: At_Roots__P Parameter: Tissue Value: Roots vs. Whole Plant
  misc_feature: MA Experiment ID: 20000451 Result: Down-regulated in Transcription
  misc_feature: MA Experiment 20000451 PARAMETER Experiment Name: At_CS6879_Shoots-Roots_P Parameter: Age (day) Value: 14
  misc_feature: MA Experiment 20000451 PARAMETER Experiment Name: At_CS6879_Shoots-Roots_P Parameter: Organism Value: A. thaliana
  misc_feature: MA Experiment 20000451 PARAMETER Experiment Name: At_CS6879_Shoots-Roots_P Parameter: Plant Line Value: CS6879 vs. WS
  misc_feature: MA Experiment 20000451 PARAMETER Experiment Name: At_CS6879_Shoots-Roots_P Parameter: Tissue Value: Roots
atgatcacaagaagcaggtgtcgaagatctttgttatggtttctagtgttccatggcggagctacagccaccggagctccctctggtgggaaagagctttctcagacgcctacttgggcagtcgccgtcgtctgcacctttctcatcctcatttcccatctccttgaaaagggtcttcaaagactcgccaactggctatggaagaagcataaaaactctctccttgaagccttagagaaaatcaaagctgagctgatgatccttggattcatttctttattactcacttttggagaaccatatattctcaagatctgtgttcctcgaaaagctgctctctctatgttaccttgtttatctgaagacacagtgcttttccagaaacttgctccatcatctcttagcaggcatcttttggctgctggtgatacatctattaattgcaaacaaggatctgagccactcataacattgaaaggcttgcaccaacttcacatcttgttgttcttcttggccatctttcatatcgtatatagtttaatcaccatgatgcttagcaggctcaagattcgtggatggaaaaagtgggagcaagagacattatctaatgactatgagttttctattgatcattcaagacttaggctcactcatgagacttcttttgtgagagaacatacaagtttctggacaacaactcctttcttcttttacgtcggatgcttctttaggcagttctttgtatctgttgaaagaaccgactacttgactctgcgccatggattcatctctgcccatttagctccaggaagaaagttcaacttccagagatatatcaaaagatctctcgaggatgatttcaagttggtagttggaataagtccagttctttgggcatcatttgtaatcttcttgctgttcaatgttaatggctggagaacattgttttgggcatcgatacctcctctactcataatcctagctgttggaacaaagcttcaagcaattatggcaacaatggcgctagaaatcgtagagacacatgcagtagttcaggggatgcctttagtgcaaggttcagatcgatacttttggttcgactgtcctcaactacttcttcatcttatccactttgccttgtttcagaatgctttccagataacacacttcttctggatatggtattcttttggattaaaatcatgcttccataaagatttcaatcttgtagtcagcaaactctttctatgcctaggagctttgatcttatgcagctacatcactctcccattgtacgccctcgttactcagatgggttcacacatgaagaaagcagtgtttgatgagcaaatggcaaaggcattgaagaagtggcacaaagacatcaaattgaagaaaggtaaagcgaggaagctcccgagcaagacacttggtgtttcagagagtttcagcctctcttcctcttcctctgcaaccactcttcaccgttccaagaccactggtcactcttctaacatcatatactacaaacaagaagatgaagaagacgaaatgtctgatcttgaagctggagcagaggatgctattgacaggattcaacaacaggagatgcaattccacaactcttagctgctttagtttcttctgttgttacttcatagttcaaatgaaacgatgctgtttactaacttagtc

SEQ ID NO: 101385 - protein, 542 aa, Arabidopsis thaliana
  peptide (1)..(542): Ceres Seq. ID no. 13607723
  misc_feature (1)..(542): Homolog of NCBI NO: 33112635 NR Description: MLO-like protein 7 (AtMlo7)
  misc_feature (48)..(542): Homolog of NCBI NO: 30679982 NR Description: seven transmembrane MLO protein family (MLO7)
  misc_feature (1)..(64): Homolog of NCBI NO: 30679982 NR Description: seven transmembrane MLO protein family (MLO7)
  misc_feature (48)..(542): Homolog of NCBI NO: 25346299 NR Description: similar to Mlo proteins from H. vulgare - Arabidopsis thaliana >gi|6598336|gb|AAB86520.2| putative Mlo
  misc_feature (1)..(64): Homolog of NCBI NO: 25346299 NR Description: similar to Mlo proteins from H. vulgare - Arabidopsis thaliana >gi|6598336|gb|AAB86520.2| putative Mlo
  misc_feature (137)..(542): Homolog of NCBI NO: 14091584 NR Description: membrane protein Mlo7 [Arabidopsis thaliana]
  misc_feature (1)..(523): Homolog of NCBI NO: 15239213 NR Description: seven transmembrane MLO protein family (MLO10)
  misc_feature (12)..(526): Homolog of NCBI NO: 18398444 NR Description: seven transmembrane MLO protein family (MLO8) thaliana] >gi|14091586|gb|AAK53801.1|AF369569_1 membrane protein [Arabidopsis thaliana] >gi|20198263|gb|AAD32905.2| similar to Mlo
  misc_feature (12)..(311): Homolog of NCBI NO: 25346302 NR Description: similar to Mlo proteins from H. vulgare
  misc_feature (309)..(526): Homolog of NCBI NO: 25346302 NR Description: similar to Mlo proteins from H. vulgare
MITRSRCRRSLLWFLVFHGGATATGAPSGGKELSQTPTWAVAVVCTFLILISHLLEKGLQRLANWLWKKHKNSLLEALEKIKAELMILGFISLLLTFGEPYILKICVPRKAALSMLPCLSEDTVLFQKLAPSSLSRHLLAAGDTSINCKQGSEPLITLKGLHQLHILLFFLAIFHIVYSLITMMLSRLKIRGWKKWEQETLSNDYEFSIDHSRLRLTHETSFVREHTSFWTTTPFFFYVGCFFRQFFVSVERTDYLTLRHGFISAHLAPGRKFNFQRYIKRSLEDDFKLVVGISPVLWASFVIFLLFNVNGWRTLFWASIPPLLIILAVGTKLQAIMATMALEIVETHAVVQGMPLVQGSDRYFWFDCPQLLLHLIHFALFQNAFQITHFFWIWYSFGLKSCFHKDFNLVVSKLFLCLGALILCSYITLPLYALVTQMGSHMKKAVFDEQMAKALKKWHKDIKLKKGKARKLPSKTLGVSESFSLSSSSSATTLHRSKTTGHSSNIIYYKQEDEEDEMSDLEAGAEDAIDRIQQQEMQFHNS

SEQ ID NO: 101386 - protein, 457 aa, Arabidopsis thaliana
  peptide (1)..(457): Ceres Seq. ID no. 13607724
  misc_feature (1)..(457): Homolog of NCBI NO: 33112635 NR Description: MLO-like protein 7 (AtMlo7)
  misc_feature (1)..(457): Homolog of NCBI NO: 30679982 NR Description: seven transmembrane MLO protein family (MLO7)
  misc_feature (1)..(457): Homolog of NCBI NO: 25346299 NR Description: similar to Mlo proteins from H. vulgare - Arabidopsis thaliana >gi|6598336|gb|AAB86520.2| putative Mlo
  misc_feature (52)..(457): Homolog of NCBI NO: 14091584 NR Description: membrane protein Mlo7 [Arabidopsis thaliana]
  misc_feature (1)..(438): Homolog of NCBI NO: 15239213 NR Description: seven transmembrane MLO protein family (MLO10)
  misc_feature (1)..(441): Homolog of NCBI NO: 18398444 NR Description: seven transmembrane MLO protein family (MLO8) thaliana] >gi|14091586|gb|AAK53801.1|AF369569_1 membrane protein [Arabidopsis thaliana] >gi|20198263|gb|AAD32905.2| similar to Mlo
  misc_feature (1)..(226): Homolog of NCBI NO: 25346302 NR Description: similar to Mlo proteins from H. vulgare
  misc_feature (224)..(441): Homolog of NCBI NO: 25346302 NR Description: similar to Mlo proteins from H. vulgare
  misc_feature (1)..(412): Homolog of NCBI NO: 14091580 NR Description: membrane protein Mlo5 [Arabidopsis thaliana]
  misc_feature (1)..(412): Homolog of NCBI NO: 15226140 NR Description: seven transmembrane MLO protein family (MLO5)
MILGFISLLLTFGEPYILKICVPRKAALSMLPCLSEDTVLFQKLAPSSLSRHLLAAGDTSINCKQGSEPLITLKGLHQLHILLFFLAIFHIVYSLITMMLSRLKIRGWKKWEQETLSNDYEFSIDHSRLRLTHETSFVREHTSFWTTTPFFFYVGCFFRQFFVSVERTDYLTLRHGFISAHLAPGRKFNFQRYIKRSLEDDFKLVVGISPVLWASFVIFLLFNVNGWRTLFWASIPPLLIILAVGTKLQAIMATMALEIVETHAVVQGMPLVQGSDRYFWFDCPQLLLHLIHFALFQNAFQITHFFWIWYSFGLKSCFHKDFNLVVSKLFLCLGALILCSYITLPLYALVTQMGSHMKKAVFDEQMAKALKKWHKDIKLKKGKARKLPSKTLGVSESFSLSSSSSATTLHRSKTTGHSSNIIYYKQEDEEDEMSDLEAGAEDAIDRIQQQEMQFHNS

SEQ ID NO: 101387 - protein, 428 aa, Arabidopsis thaliana
  peptide (1)..(428): Ceres Seq. ID no. 13607725
  misc_feature (1)..(428): Homolog of NCBI NO: 33112635 NR Description: MLO-like protein 7 (AtMlo7)
  misc_feature (1)..(428): Homolog of NCBI NO: 30679982 NR Description: seven transmembrane MLO protein family (MLO7)
  misc_feature (1)..(428): Homolog of NCBI NO: 25346299 NR Description: similar to Mlo proteins from H. vulgare - Arabidopsis thaliana >gi|6598336|gb|AAB86520.2| putative Mlo
  misc_feature (23)..(428): Homolog of NCBI NO: 14091584 NR Description: membrane protein Mlo7 [Arabidopsis thaliana]
  misc_feature (1)..(409): Homolog of NCBI NO: 15239213 NR Description: seven transmembrane MLO protein family (MLO10)
  misc_feature (1)..(412): Homolog of NCBI NO: 18398444 NR Description: seven transmembrane MLO protein family (MLO8) thaliana] >gi|14091586|gb|AAK53801.1|AF369569_1 membrane protein [Arabidopsis thaliana] >gi|20198263|gb|AAD32905.2| similar to Mlo
  misc_feature (1)..(197): Homolog of NCBI NO: 25346302 NR Description: similar to Mlo proteins from H. vulgare
  misc_feature (195)..(412): Homolog of NCBI NO: 25346302 NR Description: similar to Mlo proteins from H. vulgare
  misc_feature (1)..(383): Homolog of NCBI NO: 14091580 NR Description: membrane protein Mlo5 [Arabidopsis thaliana]
  misc_feature (1)..(383): Homolog of NCBI NO: 15226140 NR Description: seven transmembrane MLO protein family (MLO5)
MLPCLSEDTVLFQKLAPSSLSRHLLAAGDTSINCKQGSEPLITLKGLHQLHILLFFLAIFHIVYSLITMMLSRLKIRGWKKWEQETLSNDYEFSIDHSRLRLTHETSFVREHTSFWTTTPFFFYVGCFFRQFFVSVERTDYLTLRHGFISAHLAPGRKFNFQRYIKRSLEDDFKLVVGISPVLWASFVIFLLFNVNGWRTLFWASIPPLLIILAVGTKLQAIMATMALEIVETHAVVQGMPLVQGSDRYFWFDCPQLLLHLIHFALFQNAFQITHFFWIWYSFGLKSCFHKDFNLVVSKLFLCLGALILCSYITLPLYALVTQMGSHMKKAVFDEQMAKALKKWHKDIKLKKGKARKLPSKTLGVSESFSLSSSSSATTLHRSKTTGHSSNIIYYKQEDEEDEMSDLEAGAEDAIDRIQQQEMQFHNS

SEQ ID NO: 101388 - DNA, 999 bp, Arabidopsis thaliana
  misc_feature (1)..(999): Ceres Seq. ID no. 13607730
  misc_feature: MA Experiment ID: 108434 Result: Up-regulated in Transcription
  misc_feature: MA Experiment 108434 PARAMETER Experiment Name: At_Root_Tips_cDNA_P Parameter: Tissue Value: Root Tips
  misc_feature: MA Experiment ID: 108462 Result: Down-regulated in Transcription
  misc_feature: MA Experiment 108462 PARAMETER Experiment Name: At_Germinating_Seeds_cDNA_P Parameter: Age (day) Value: 2 vs. 0
  misc_feature: MA Experiment 108462 PARAMETER Experiment Name: At_Germinating_Seeds_cDNA_P Parameter: Tissue Value: Germinating Seeds
  misc_feature: MA Experiment ID: 108463 Result: Down-regulated in Transcription
  misc_feature: MA Experiment 108463 PARAMETER Experiment Name: At_Germinating_Seeds_cDNA_P Parameter: Age (day) Value: 3 vs. 0
  misc_feature: MA Experiment 108463 PARAMETER Experiment Name: At_Germinating_Seeds_cDNA_P Parameter: Tissue Value: Germinating Seeds
  misc_feature: MA Experiment ID: 108573 Result: Down-regulated in Transcription
  misc_feature: MA Experiment 108573 PARAMETER Experiment Name: At_Drought_cDNA_P Parameter: Timepoint (hr) Value: 6
  misc_feature: MA Experiment 108573 PARAMETER Experiment Name: At_Drought_cDNA_P Parameter: Tissue Value: Aerial
  misc_feature: MA Experiment 108573 PARAMETER Experiment Name: At_Drought_cDNA_P Parameter: Treatment Value: Drought vs. No Drought
  misc_feature: MA Experiment ID: 108595 Result: Down-regulated in Transcription
  misc_feature: MA Experiment 108595 PARAMETER Experiment Name: At_Ler-pi_Ovule_cDNA_P Parameter: Plant Line Value: null
  misc_feature: MA Experiment ID: 20000224 Result: Down-regulated in Transcription
  misc_feature: MA Experiment ID: 20000234 Result: Up-regulated in Transcription
  misc_feature: MA Experiment 20000234 PARAMETER Experiment Name: At_Siliques_P Parameter: Age (day) Value: 21
  misc_feature: MA Experiment 20000234 PARAMETER Experiment Name: At_Siliques_P Parameter: Organism Value: A. thaliana
  misc_feature: MA Experiment 20000234 PARAMETER Experiment Name: At_Siliques_P Parameter: Plant Line Value: WS
  misc_feature: MA Experiment 20000234 PARAMETER Experiment Name: At_Siliques_P Parameter: Tissue Value: Less Than 5mm Siliques vs. Whole Plant
  misc_feature: MA Experiment ID: 20000437 Result: Down-regulated in Transcription
  misc_feature: MA Experiment 20000437 PARAMETER Experiment Name: At_Drought_P Parameter: Age (day) Value: 8
  misc_feature: MA Experiment 20000437 PARAMETER Experiment Name: At_Drought_P Parameter: Organism Value: A. thaliana
  misc_feature: MA Experiment 20000437 PARAMETER Experiment Name: At_Drought_P Parameter: Plant Line Value: WS
  misc_feature: MA Experiment 20000437 PARAMETER Experiment Name: At_Drought_P Parameter: Timepoint (hr) Value: 24
  misc_feature: MA Experiment 20000437 PARAMETER Experiment Name: At_Drought_P Parameter: Tissue Value: Whole Plant
  misc_feature: MA Experiment 20000437 PARAMETER Experiment Name: At_Drought_P Parameter: Treatment Value: Drought vs. No Drought
  misc_feature: MA Experiment ID: 20000794 Result: Down-regulated in Transcription
  misc_feature: MA Experiment 20000794 PARAMETER Experiment Name: At_Petals_P Parameter: Age (day) Value: 23-25 days
  misc_feature: MA Experiment 20000794 PARAMETER Experiment Name: At_Petals_P Parameter: Plant Line Value: WS
  misc_feature: MA Experiment 20000794 PARAMETER Experiment Name: At_Petals_P Parameter: Tissue Value: Petals vs. Whole plant
  misc_feature: MA Experiment ID: 20001451 Result: Down-regulated in Transcription
  misc_feature: MA Experiment 20001451 PARAMETER Experiment Name: At_Far-red-induction_P Parameter: Age (day) Value: 7
  misc_feature: MA Experiment 20001451 PARAMETER Experiment Name: At_Far-red-induction_P Parameter: Light Value: Far-red vs. White
  misc_feature: MA Experiment 20001451 PARAMETER Experiment Name: At_Far-red-induction_P Parameter: Organism Value: A. thaliana
  misc_feature: MA Experiment 20001451 PARAMETER Experiment Name: At_Far-red-induction_P Parameter: Plant Line Value: Columbia
  misc_feature: MA Experiment 20001451 PARAMETER Experiment Name: At_Far-red-induction_P Parameter: Timepoint (hr) Value: 24
  misc_feature: MA Experiment 20001451 PARAMETER Experiment Name: At_Far-red-induction_P Parameter: Tissue Value: Whole Plant
  misc_feature: MA Experiment ID: 20001558 Result: Up-regulated in Transcription
  misc_feature: MA Experiment 20001558 PARAMETER Experiment Name: At_Drought_Soil_Dry_P Parameter: Age (day) Value: 27
  misc_feature: MA Experiment 20001558 PARAMETER Experiment Name: At_Drought_Soil_Dry_P Parameter: Organism Value: A. thaliana
  misc_feature: MA Experiment 20001558 PARAMETER Experiment Name: At_Drought_Soil_Dry_P Parameter: Plant Line Value: WS
  misc_feature: MA Experiment 20001558 PARAMETER Experiment Name: At_Drought_Soil_Dry_P Parameter: Post Timepoint (hr) Value: 6
  misc_feature: MA Experiment 20001558 PARAMETER Experiment Name: At_Drought_Soil_Dry_P Parameter: Post-Treatment Value: Re-Water vs. No Drought
  misc_feature: MA Experiment 20001558 PARAMETER Experiment Name: At_Drought_Soil_Dry_P Parameter: Timepoint (day) Value: 13
  misc_feature: MA Experiment 20001558 PARAMETER Experiment Name: At_Drought_Soil_Dry_P Parameter: Treatment Value: Drought vs. No Drought
  misc_feature: MA Experiment ID: 20001757 Result: Up-regulated in Transcription
  misc_feature: MA Experiment 20001757 PARAMETER Experiment Name: At_50mM_NH4NO3_L-to-H_P Parameter: Timepoint (hr) Value: 6
  misc_feature: MA Experiment 20001757 PARAMETER Experiment Name: At_50mM_NH4NO3_L-to-H_P Parameter: Tissue Value: Leaf
  misc_feature: MA Experiment 20001757 PARAMETER Experiment Name: At_50mM_NH4NO3_L-to-H_P Parameter: Treatment Value: 50mM NH4NO3 vs 100mM Mannitol
ataaaactcacatcgccgctgataattccgcctctgagaaattgcgttcgattacagctccacagaggattcggaaatggttgagtcaaaggttgtagttccagagtcggtgttgaagaagaggaagagagaggaggaatgggctttggagaagaagcagaatgttgaagccgccaagaagaagaacgccgagaacaggaagcttatcttcaaaagagccgagcaatactccaaggaatatgccgagaaggagaaggagttgatctcgttgaaacgcgaggccaagcttaagggaggtttctatgttgaccctgaagctaagctcttgttcatcatccgtatccgtggtatcaatgccattgaccctaagactaagaagattctccagctcttgcgtttgagacagattttcaatggtgttttccttaaagtcaacaaggctacgatgaacatgcttcgccgtgttgagccctatgtcacttacggattccctaacttgaagagtgtcaaggaattgatctacaagagaggttacggaaagcttaaccaccagaggatagctttgactgacaactctattgtagagcaggctcttggaaagcatggtatcatttgcactgaggatttgatccacgagattctaacagtaggacctcatttcaaggaagccaacaacttcctttggccattccagcttaaggcaccactaggtggcctcaagaagaagagaaatcactacgtggaaggtggtgatgccggaaaccgtgagaacttcatcaatgagcttatcaggaggatgaattagaatgttatcgttttcaatgtcaaacttctctgcgttttcattatgtgcctcctcctggattttgatcttctttctcaagttaaaagacattttgaatcttctcttttgttctctttggatcttaatttgtgctttgattactgcaagtgattctacatttctctttaataggatttttaagaaactgtttcttc

SEQ ID NO: 101389 - protein, 242 aa, Arabidopsis thaliana; identical to SEQ ID NO: 29184
  peptide (1)..(242): Ceres Seq. ID no. 13607731
  misc_feature (82)..(134): Pfam Name: Ribosomal protein L30p/L7e Pfam Description: Ribosomal protein L30p/L7e
  misc_feature (1)..(242): Homolog of NCBI NO: 15226212 NR Description: 60S ribosomal protein L7 (RPL7B) [Arabidopsis
  misc_feature (1)..(242): Homolog of NCBI NO: 30689623 NR Description: 60S ribosomal protein L7 (RPL7C) [Arabidopsis >gi|6174958|sp|Q42208|RL7_ARATH 60S ribosomal protein L7
  misc_feature (3)..(242): Homolog of NCBI NO: 15231288 NR Description: 60S ribosomal protein L7 (RPL7D) [Arabidopsis >gi|11994560|dbj|BAB02600.1| 60S ribosomal protein L7 thaliana] >gi|14532552|gb|AAK64004.1| AT3g13580/K20M4_2
  misc_feature (1)..(242): Homolog of NCBI NO: 30689617 NR Description: 60S ribosomal protein L7 (RPL7C) [Arabidopsis >gi|15450713|gb|AAK96628.1| At2g44120/F6E13.25 [Arabidopsis >gi|17386142|gb|AAL38617.1|AF446884_1 At2g44120/F6E13.25
  misc_feature (1)..(242): Homolog of NCBI NO: 27311547 NR Description: Unknown protein [Arabidopsis thaliana]
  misc_feature (1)..(242): Homolog of NCBI NO: 445613 NR Description: ribosomal protein L7
  misc_feature (2)..(242): Homolog of NCBI NO: 38637548 NR Description: putative 60S ribosomal protein L7 [Oryza sativa
  misc_feature (4)..(242): Homolog of NCBI NO: 38346542 NR Description: OSJNBa0035M09.3 [Oryza sativa (japonica
  misc_feature (8)..(241): Homolog of NCBI NO: 28630259 NR Description: ribosomal protein L7 [Branchiostoma lanceolatum]
  misc_feature (3)..(242): Homolog of NCBI NO: 32416114 NR Description: hypothetical protein [Neurospora crassa]

SEQ ID NO: 101390 - DNA, 514 bp, Arabidopsis thaliana
  misc_feature (1)..(514): Ceres Seq. ID no. 13607746
  misc_feature: MA Experiment ID: 108434 Result: Down-regulated in Transcription
  misc_feature: MA Experiment 108434 PARAMETER Experiment Name: At_Root_Tips_cDNA_P Parameter: Tissue Value: Root Tips
  misc_feature: MA Experiment ID: 108462 Result: Up-regulated in Transcription
  misc_feature: MA Experiment 108462 PARAMETER Experiment Name: At_Germinating_Seeds_cDNA_P Parameter: Age (day) Value: 2 vs. 0
  misc_feature: MA Experiment 108462 PARAMETER Experiment Name: At_Germinating_Seeds_cDNA_P Parameter: Tissue Value: Germinating Seeds
  misc_feature: MA Experiment ID: 108464 Result: Up-regulated in Transcription
  misc_feature: MA Experiment 108464 PARAMETER Experiment Name: At_Germinating_Seeds_cDNA_P Parameter: Age (day) Value: 4 vs. 0
  misc_feature: MA Experiment 108464 PARAMETER Experiment Name: At_Germinating_Seeds_cDNA_P Parameter: Tissue Value: Germinating Seeds
  misc_feature: MA Experiment ID: 108579 Result: Up-regulated in Transcription
  misc_feature: MA Experiment 108579 PARAMETER Experiment Name: At_4deg_Cold_cDNA_P Parameter: Temperature (deg C) Value: 4 vs. 22
  misc_feature: MA Experiment 108579 PARAMETER Experiment Name: At_4deg_Cold_cDNA_P Parameter: Timepoint (hr) Value: 6
  misc_feature: MA Experiment 108579 PARAMETER Experiment Name: At_4deg_Cold_cDNA_P Parameter: Tissue Value: Aerial
  misc_feature: MA Experiment ID: 108594 Result: Down-regulated in Transcription
  misc_feature: MA Experiment 108594 PARAMETER Experiment Name: At_Ler-rhl_Root_cDNA_P Parameter: Plant Line Value: null
  misc_feature: MA Experiment ID: 108595 Result: Up-regulated in Transcription
  misc_feature: MA Experiment 108595 PARAMETER Experiment Name: At_Ler-pi_Ovule_cDNA_P Parameter: Plant Line Value: null
  misc_feature: MA Experiment ID: 20000069 Result: Up-regulated in Transcription
  misc_feature: MA Experiment 20000069 PARAMETER Experiment Name: At_100uM_ABA_Mutants_cDNA_P Parameter: Plant Line Value: CS23
  misc_feature: MA Experiment 20000069 PARAMETER Experiment Name: At_100uM_ABA_Mutants_cDNA_P Parameter: Timepoint (hr) Value: 6
  misc_feature: MA Experiment 20000069 PARAMETER Experiment Name: At_100uM_ABA_Mutants_cDNA_P Parameter: Tissue Value: Aerial
  misc_feature: MA Experiment 20000069 PARAMETER Experiment Name: At_100uM_ABA_Mutants_cDNA_P Parameter: Treatment Value: 100uM ABA vs. No Treatment
  misc_feature: MA Experiment ID: 20000070 Result: Up-regulated in Transcription
  misc_feature: MA Experiment 20000070 PARAMETER Experiment Name: At_100uM_ABA_Mutants_cDNA_P Parameter: Plant Line Value: CS24
  misc_feature: MA Experiment 20000070 PARAMETER Experiment Name: At_100uM_ABA_Mutants_cDNA_P Parameter: Timepoint (hr) Value: 6
  misc_feature: MA Experiment 20000070 PARAMETER Experiment Name: At_100uM_ABA_Mutants_cDNA_P Parameter: Tissue Value: Aerial
  misc_feature: MA Experiment 20000070 PARAMETER Experiment Name: At_100uM_ABA_Mutants_cDNA_P Parameter: Treatment Value: 100uM ABA vs. No Treatment
  misc_feature: MA Experiment ID: 20000072 Result: Up-regulated in Transcription
  misc_feature: MA Experiment 20000072 PARAMETER Experiment Name: At_100uM_ABA_Mutants_cDNA_P Parameter: Plant Line Value: CS8105
  misc_feature: MA Experiment 20000072 PARAMETER Experiment Name: At_100uM_ABA_Mutants_cDNA_P Parameter: Timepoint (hr) Value: 6
  misc_feature: MA Experiment 20000072 PARAMETER Experiment Name: At_100uM_ABA_Mutants_cDNA_P Parameter: Tissue Value: Aerial
  misc_feature: MA Experiment 20000072 PARAMETER Experiment Name: At_100uM_ABA_Mutants_cDNA_P Parameter: Treatment Value: 100uM ABA vs. No Treatment
  misc_feature: MA Experiment ID: 20000086 Result: Up-regulated in Transcription
  misc_feature: MA Experiment 20000086 PARAMETER Experiment Name: At_100uM_ABA_Mutants_cDNA_P Parameter: Plant Line Value: CS22
  misc_feature: MA Experiment 20000086 PARAMETER Experiment Name: At_100uM_ABA_Mutants_cDNA_P Parameter: Timepoint (hr) Value: 6
  misc_feature: MA Experiment 20000086 PARAMETER Experiment Name: At_100uM_ABA_Mutants_cDNA_P Parameter: Tissue Value: Aerial
  misc_feature: MA Experiment 20000086 PARAMETER Experiment Name: At_100uM_ABA_Mutants_cDNA_P Parameter: Treatment Value: 100uM ABA vs. No Treatment
  misc_feature: MA Experiment ID: 20000087 Result: Up-regulated in Transcription
  misc_feature: MA Experiment 20000087 PARAMETER Experiment Name: At_100uM_ABA_Mutants_cDNA_P Parameter: Plant Line Value: WS
  misc_feature: MA Experiment 20000087 PARAMETER Experiment Name: At_100uM_ABA_Mutants_cDNA_P Parameter: Timepoint (hr) Value: 6
  misc_feature: MA Experiment 20000087 PARAMETER Experiment Name: At_100uM_ABA_Mutants_cDNA_P Parameter: Tissue Value: Aerial
  misc_feature: MA Experiment 20000087 PARAMETER Experiment Name: At_100uM_ABA_Mutants_cDNA_P Parameter: Treatment Value: 100uM ABA vs. No Treatment
  misc_feature: MA Experiment ID: 20000088 Result: Up-regulated in Transcription
  misc_feature: MA Experiment 20000088 PARAMETER Experiment Name: At_100uM_ABA_Mutants_cDNA_P Parameter: Plant Line Value: Landsberg
  misc_feature: MA Experiment 20000088 PARAMETER Experiment Name: At_100uM_ABA_Mutants_cDNA_P Parameter: Timepoint (hr) Value: 6
  misc_feature: MA Experiment 20000088 PARAMETER Experiment Name: At_100uM_ABA_Mutants_cDNA_P Parameter: Tissue Value: Aerial
  misc_feature: MA Experiment 20000088 PARAMETER Experiment Name: At_100uM_ABA_Mutants_cDNA_P Parameter: Treatment Value: 100uM ABA vs. No Treatment
  misc_feature: MA Experiment ID: 20000089 Result: Up-regulated in Transcription
  misc_feature: MA Experiment ID: 20000090 Result: Up-regulated in Transcription
  misc_feature: MA Experiment ID: 20000111 Result: Down-regulated in Transcription
  misc_feature: MA Experiment 20000111 PARAMETER Experiment Name: At_42deg_Heat_cDNA_P Parameter: Temperature (deg C) Value: 42 vs. 22
  misc_feature: MA Experiment 20000111 PARAMETER Experiment Name: At_42deg_Heat_cDNA_P Parameter: Timepoint (hr) Value: 6
  misc_feature: MA Experiment 20000111 PARAMETER Experiment Name: At_42deg_Heat_cDNA_P Parameter: Tissue Value: Aerial
  misc_feature: MA Experiment ID: 20000117 Result: Up-regulated in Transcription
  misc_feature: MA Experiment 20000117 PARAMETER Experiment Name: At_100uM_ABA_Mutants_cDNA_P Parameter: Plant Line Value: Columbia
  misc_feature: MA Experiment 20000117 PARAMETER Experiment Name: At_100uM_ABA_Mutants_cDNA_P Parameter: Timepoint (hr) Value: 6
  misc_feature: MA Experiment 20000117 PARAMETER Experiment Name: At_100uM_ABA_Mutants_cDNA_P Parameter: Tissue Value: Aerial
  misc_feature: MA Experiment 20000117 PARAMETER Experiment Name: At_100uM_ABA_Mutants_cDNA_P Parameter: Treatment Value: 100uM ABA vs. No Treatment
  misc_feature: MA Experiment ID: 20000179 Result: Up-regulated in Transcription
  misc_feature: MA Experiment 20000179 PARAMETER Experiment Name: At_Germinating_Seeds_P Parameter: Age (hr) Value: 6 vs. 0
  misc_feature: MA Experiment 20000179 PARAMETER Experiment Name: At_Germinating_Seeds_P Parameter: Tissue Value: Germinating Seeds
  misc_feature: MA Experiment ID: 20000227 Result: Down-regulated in Transcription
  misc_feature: MA Experiment 20000227 PARAMETER Experiment Name: At_Root-Tips-vs-Tops_P Parameter: Tissue Value: Root Tips vs. Root Tops
  misc_feature: MA Experiment ID: 20000265 Result: Up-regulated in Transcription
  misc_feature: MA Experiment 20000265 PARAMETER Experiment Name: At_Open_Flower_P Parameter: Age (day) Value: 21
  misc_feature: MA Experiment 20000265 PARAMETER Experiment Name: At_Open_Flower_P Parameter: Plant Line Value: WS
  misc_feature: MA Experiment 20000265 PARAMETER Experiment Name: At_Open_Flower_P Parameter: Tissue Value: Closed Flower vs. Whole Plant
  misc_feature: MA Experiment ID: 20000286 Result: Up-regulated in Transcription
  misc_feature: MA Experiment 20000286 PARAMETER Experiment Name: At_Open_Flower_P Parameter: Age (day) Value: 21
  misc_feature: MA Experiment 20000286 PARAMETER Experiment Name: At_Open_Flower_P Parameter: Plant Line Value: WS
  misc_feature: MA Experiment 20000286 PARAMETER Experiment Name: At_Open_Flower_P Parameter: Tissue Value: Half Open vs. Whole Plant
  misc_feature: MA Experiment ID: 20001248 Result: Up-regulated in Transcription
  misc_feature: MA Experiment 20001248 PARAMETER Experiment Name: At_Far-red-induction_P Parameter: Age (day) Value: 7
  misc_feature: MA Experiment 20001248 PARAMETER Experiment Name: At_Far-red-induction_P Parameter: Light Value: Far-red vs. White
  misc_feature: MA Experiment 20001248 PARAMETER Experiment Name: At_Far-red-induction_P Parameter: Organism Value: A. thaliana
  misc_feature: MA Experiment 20001248 PARAMETER Experiment Name: At_Far-red-induction_P Parameter: Plant Line Value: Columbia
  misc_feature: MA Experiment 20001248 PARAMETER Experiment Name: At_Far-red-induction_P Parameter: Timepoint (hr) Value: 4
  misc_feature: MA Experiment 20001248 PARAMETER Experiment Name: At_Far-red-induction_P Parameter: Tissue Value: Whole Plant
  misc_feature: MA Experiment ID: 20001560 Result: Up-regulated in Transcription
  misc_feature: MA Experiment 20001560 PARAMETER Experiment Name: At_Drought_Soil_Dry_P Parameter: Age (day) Value: 28
  misc_feature: MA Experiment 20001560 PARAMETER Experiment Name: At_Drought_Soil_Dry_P Parameter: Organism Value: A. thaliana
  misc_feature: MA Experiment 20001560 PARAMETER Experiment Name: At_Drought_Soil_Dry_P Parameter: Plant Line Value: WS
  misc_feature: MA Experiment 20001560 PARAMETER Experiment Name: At_Drought_Soil_Dry_P Parameter: Post Timepoint (hr) Value: None
  misc_feature: MA Experiment 20001560 PARAMETER Experiment Name: At_Drought_Soil_Dry_P Parameter: Post-Treatment Value: None
  misc_feature: MA Experiment 20001560 PARAMETER Experiment Name: At_Drought_Soil_Dry_P Parameter: Timepoint (day) Value: 14
  misc_feature: MA Experiment 20001560 PARAMETER Experiment Name: At_Drought_Soil_Dry_P Parameter: Treatment Value: Drought vs. No Drought
  misc_feature: MA Experiment ID: 20001908 Result: Up-regulated in Transcription
  misc_feature: MA Experiment 20001908 PARAMETER Experiment Name: At_Drought_Reproduction_P Parameter: Age (day) Value: 40
  misc_feature: MA Experiment 20001908 PARAMETER Experiment Name: At_Drought_Reproduction_P Parameter: Organism Value: A. thaliana
  misc_feature: MA Experiment 20001908 PARAMETER Experiment Name: At_Drought_Reproduction_P Parameter: Plant Line Value: WS
  misc_feature: MA Experiment 20001908 PARAMETER Experiment Name: At_Drought_Reproduction_P Parameter: Timepoint (day) Value: 10
  misc_feature: MA Experiment 20001908 PARAMETER Experiment Name: At_Drought_Reproduction_P Parameter: Tissue Value: Siliques
  misc_feature: MA Experiment 20001908 PARAMETER Experiment Name: At_Drought_Reproduction_P Parameter: Treatment Value: Drought vs. No Drought
gccattttcctcactagcagcaacacacttgaacactactttcgaactctctctttatctctcttgcaatgaagctctctatgcgtttgatctcagctgttctcatcatgttcatgatattcgtcgccactgggatgggaccagtcactgtggaggcacgcacttgtgagtcgcagagccataggttcaagggtacatgcgtgagtgcatcaaactgcgccaacgtgtgccacaacgaaggctttgtcggaggtaactgccgtggattccgtcgtcgttgcttctgcaccagacattgctgatctacccattctcatgcataattcaagctttgatccatcgtcgtgtgtcacttctttcttatctaatcttccgtacagtaccatgaagtaccgtacattagtgtgttctcaaataagtctttggatttgtgtgtttccggtttaaatgtaatgttaaatcaactaatgactttgagcctttgactagtaataatcaaaatctatgttctgat

SEQ ID NO: 101391 - protein, 77 aa, Arabidopsis thaliana; identical to SEQ ID NO: 27682
  peptide (1)..(77): Ceres Seq. ID no. 13607747
  misc_feature (31)..(77): Pfam Name: Gamma-thionins family Pfam Description: Gamma-thionins family
  misc_feature (1)..(77): Homolog of NCBI NO: 15226872 NR Description: plant defensin protein, putative (PDF2.2)
  misc_feature (1)..(77): Homolog of NCBI NO: 7488534 NR Description: proteinase inhibitor II - turnip
  misc_feature (1)..(77): Homolog of NCBI NO: 15226878 NR Description: plant defensin protein, putative (PDF2.3)
  misc_feature (1)..(77): Homolog of NCBI NO: 15226876 NR Description: plant defensin protein, putative (PDF2.1)
  misc_feature (1)..(77): Homolog of NCBI NO: 28624546 NR Description: defensin protein 1 [Prunus persica]
  misc_feature (1)..(77): Homolog of NCBI NO: 11387188 NR Description: Flower-specific gamma-thionin precursor (Defensin >gi|7672659|gb|AAF66591.1|AF141131_1 defensin [Helianthus annuus]
  misc_feature (1)..(77): Homolog of NCBI NO: 16225423 NR Description: putative gamma-thionin [Castanea sativa]
  misc_feature (1)..(77): Homolog of NCBI NO: 21553559 NR Description: protease inhibitor II [Arabidopsis thaliana]
  misc_feature (1)..(77): Homolog of NCBI NO: 3915102 NR Description: Gamma-thionin homolog PPT precursor
  misc_feature (1)..(77): Homolog of NCBI NO: 22330359 NR Description: plant defensin protein, putative (PDF2.4)

SEQ ID NO: 101392 - protein, 73 aa, Arabidopsis thaliana; identical to SEQ ID NO: 27683
  peptide (1)..(73): Ceres Seq. ID no. 13607748
  misc_feature (27)..(73): Pfam Name: Gamma-thionins family Pfam Description: Gamma-thionins family
  misc_feature (1)..(73): Homolog of NCBI NO: 15226872 NR Description: plant defensin protein, putative (PDF2.2)
  misc_feature (1)..(73): Homolog of NCBI NO: 7488534 NR Description: proteinase inhibitor II - turnip
  misc_feature (1)..(73): Homolog of NCBI NO: 15226878 NR Description: plant defensin protein, putative (PDF2.3)
  misc_feature (1)..(73): Homolog of NCBI NO: 15226876 NR Description: plant defensin protein, putative (PDF2.1)
  misc_feature (1)..(73): Homolog of NCBI NO: 28624546 NR Description: defensin protein 1 [Prunus persica]
  misc_feature (1)..(73): Homolog of NCBI NO: 11387188 NR Description: Flower-specific gamma-thionin precursor (Defensin >gi|7672659|gb|AAF66591.1|AF141131_1 defensin [Helianthus annuus]
  misc_feature (1)..(73): Homolog of NCBI NO: 16225423 NR Description: putative gamma-thionin [Castanea sativa]
  misc_feature (1)..(73): Homolog of NCBI NO: 21553559 NR Description: protease inhibitor II [Arabidopsis thaliana]
  misc_feature (1)..(73): Homolog of NCBI NO: 3915102 NR Description: Gamma-thionin homolog PPT precursor
  misc_feature (1)..(73): Homolog of NCBI NO: 22330359 NR Description: plant defensin protein, putative (PDF2.4)

SEQ ID NO: 101393 - protein, 64 aa, Arabidopsis thaliana; identical to SEQ ID NO: 27684
  peptide (1)..(64): Ceres Seq. ID no. 13607749
  misc_feature (18)..(64): Pfam Name: Gamma-thionins family Pfam Description: Gamma-thionins family
  misc_feature (1)..(64): Homolog of NCBI NO: 15226872 NR Description: plant defensin protein, putative (PDF2.2)
  misc_feature (1)..(64): Homolog of NCBI NO: 7488534 NR Description: proteinase inhibitor II - turnip
  misc_feature (1)..(64): Homolog of NCBI NO: 15226878 NR Description: plant defensin protein, putative (PDF2.3)
  misc_feature (1)..(64): Homolog of NCBI NO: 15226876 NR Description: plant defensin protein, putative (PDF2.1)
  misc_feature (1)..(64): Homolog of NCBI NO: 28624546 NR Description: defensin protein 1 [Prunus persica]
  misc_feature (1)..(64): Homolog of NCBI NO: 11387188 NR Description: Flower-specific gamma-thionin precursor (Defensin >gi|7672659|gb|AAF66591.1|AF141131_1 defensin [Helianthus annuus]
  misc_feature (1)..(64): Homolog of NCBI NO: 16225423 NR Description: putative gamma-thionin [Castanea sativa]
  misc_feature (1)..(64): Homolog of NCBI NO: 21553559 NR Description: protease inhibitor II [Arabidopsis thaliana]
  misc_feature (1)..(64): Homolog of NCBI NO: 3915102 NR Description: Gamma-thionin homolog PPT precursor
  misc_feature (1)..(64): Homolog of NCBI NO: 22330359 NR Description: plant defensin protein, putative (PDF2.4)

SEQ ID NO: 101394 - protein, 55 aa, Arabidopsis thaliana; identical to SEQ ID NO: 27685
  peptide (1)..(55): Ceres Seq. ID no. 13607750

SEQ ID NO: 101395 - DNA, 666 bp, Arabidopsis thaliana
  misc_feature (1)..(666): Ceres Seq. ID no. 13607755
  misc_feature: MA Experiment ID: 20000314 Result: Up-regulated in Transcription
  misc_feature: MA Experiment 20000314 PARAMETER Experiment Name: At_14day_Shoots-Roots_Sub_P Parameter: Age (day) Value: 14
  misc_feature: MA Experiment 20000314 PARAMETER Experiment Name: At_14day_Shoots-Roots_Sub_P Parameter: Organism Value: A. thaliana
  misc_feature: MA Experiment 20000314 PARAMETER Experiment Name: At_14day_Shoots-Roots_Sub_P Parameter: Plant Line Value: WS
  misc_feature: MA Experiment 20000314 PARAMETER Experiment Name: At_14day_Shoots-Roots_Sub_P Parameter: Tissue Value: Roots vs. Whole Plant
  misc_feature: MA Experiment ID: 20000315 Result: Down-regulated in Transcription
  misc_feature: MA Experiment 20000315 PARAMETER Experiment Name: At_14day_Shoots-Roots_Sub_P Parameter: Age (day) Value: 14
  misc_feature: MA Experiment 20000315 PARAMETER Experiment Name: At_14day_Shoots-Roots_Sub_P Parameter: Organism Value: A. thaliana
  misc_feature: MA Experiment 20000315 PARAMETER Experiment Name: At_14day_Shoots-Roots_Sub_P Parameter: Plant Line Value: WS
  misc_feature: MA Experiment 20000315 PARAMETER Experiment Name: At_14day_Shoots-Roots_Sub_P Parameter: Tissue Value: Shoots vs. Whole Plant
  misc_feature: MA Experiment ID: 20000440 Result: Down-regulated in Transcription
  misc_feature: MA Experiment 20000440 PARAMETER Experiment Name: At_Closed-Flower__Sub_P Parameter: Tissue Value: Closed Flower vs. Whole Plant
atggcgaattccggcgaagagaagttgaagctctactcttactggagaagctcgtgtgctcatcgtgtccgtatcgccctcgctttgaaagggcttgattatgagtatataccagtgaatttgctcaagggtgatcaattcgattcagatttcaagaagatcaatccaatgggaactgtaccagctctggtggatggagatgttgtgattaatgattcttttgcgataataatgtatctggatgagaagtaccctgagccacctttgttacctcgtgacctccataaacgagctgtgaattaccaggcaatgagtattgtcttgtctggcatacagcctcatcaaaatctggctgttattaggtatatcgaggaaaagataaatgtggaggagaagactgcctgggttaataatgctatcacaaaaggatttacagctctcgagaaactgttggtgaattgcgctgggaaacatgcgactggtgatgaaatttacctggctgatctctttctagcaccacagatccacggagcaatcaacagattccagattaacatggaaccgtacccaactcttgcaaaatgttacgaatcatacaacgaactgcctgcgtttcaaaatgcactaccggaaaagcagccagatgctccttcttccaccatctga

SEQ ID NO: 101396 - protein, 221 aa, Arabidopsis thaliana; identical to SEQ ID NO: 77595
  peptide (1)..(221): Ceres Seq. ID no. 13607756
  misc_feature (1)..(221): Homolog of NCBI NO: 15226952 NR Description: glutathione transferase, putative [Arabidopsis
  misc_feature (1)..(221): Homolog of NCBI NO: 30677995 NR Description: glutathione transferase, putative [Arabidopsis
  misc_feature (1)..(220): Homolog of NCBI NO: 28932698 NR Description: glutathione S-transferase zeta [Brassica napus]
  misc_feature (1)..(220): Homolog of NCBI NO: 28932694 NR Description: glutathione S-transferase zeta [Brassica napus]
  misc_feature (6)..(219): Homolog of NCBI NO: 15226949 NR Description: glutathione transferase, putative [Arabidopsis
  misc_feature (1)..(219): Homolog of NCBI NO: 29420155 NR Description: glutathione S-transferase Z1 [Malva pusilla]
  misc_feature (8)..(220): Homolog of NCBI NO: 11132235 NR Description: Glutathione S-transferase zeta class
  misc_feature (1)..(218): Homolog of NCBI NO: 24061762 NR Description: glutathione S-transferase [Capsicum annuum]

SEQ ID NO: 101397 - protein, 165 aa, Arabidopsis thaliana; identical to SEQ ID NO: 77596
  peptide (1)..(165): Ceres Seq. ID no. 13607757
  misc_feature (1)..(165): Homolog of NCBI NO: 15226952 NR Description: glutathione transferase, putative [Arabidopsis
  misc_feature (1)..(165): Homolog of NCBI NO: 30677995 NR Description: glutathione transferase, putative [Arabidopsis
  misc_feature (1)..(164): Homolog of NCBI NO: 28932698 NR Description: glutathione S-transferase zeta [Brassica napus]
  misc_feature (1)..(164): Homolog of NCBI NO: 28932694 NR Description: glutathione S-transferase zeta [Brassica napus]
  misc_feature (1)..(163): Homolog of NCBI NO: 15226949 NR Description: glutathione transferase, putative [Arabidopsis
  misc_feature (1)..(163): Homolog of NCBI NO: 29420155 NR Description: glutathione S-transferase Z1 [Malva pusilla]
  misc_feature (1)..(164): Homolog of NCBI NO: 11132235 NR Description: Glutathione S-transferase zeta class
  misc_feature (1)..(162): Homolog of NCBI NO: 24061762 NR Description: glutathione S-transferase [Capsicum annuum]

SEQ ID NO: 101398 - protein, 144 aa, Arabidopsis thaliana; identical to SEQ ID NO: 88276
  peptide (1)..(144): Ceres Seq. ID no. 13607758
  misc_feature (1)..(144): Homolog of NCBI NO: 15226952 NR Description: glutathione transferase, putative [Arabidopsis
  misc_feature (1)..(144): Homolog of NCBI NO: 30677995 NR Description: glutathione transferase, putative [Arabidopsis
  misc_feature (1)..(143): Homolog of NCBI NO: 28932698 NR Description: glutathione S-transferase zeta [Brassica napus]
  misc_feature (1)..(143): Homolog of NCBI NO: 28932694 NR Description: glutathione S-transferase zeta [Brassica napus]
  misc_feature (1)..(142): Homolog of NCBI NO: 15226949 NR Description: glutathione transferase, putative [Arabidopsis
  misc_feature (1)..(142): Homolog of NCBI NO: 29420155 NR Description: glutathione S-transferase Z1 [Malva pusilla]
  misc_feature (1)..(143): Homolog of NCBI NO: 11132235 NR Description: Glutathione S-transferase zeta class
  misc_feature (1)..(141): Homolog of NCBI NO: 24061762 NR Description: glutathione S-transferase [Capsicum annuum]

SEQ ID NO: 101399 - DNA, 1322 bp, Arabidopsis thaliana
  misc_feature (1)..(1322): Ceres Seq. ID no. 13607773
  misc_feature: MA Experiment ID: 108469 Result: Up-regulated in Transcription
  misc_feature: MA Experiment ID: 108561 Result: Down-regulated in Transcription
  misc_feature: MA Experiment 108561 PARAMETER Experiment Name: At_100uM_ABA_cDNA_P Parameter: Timepoint (hr) Value: 6
  misc_feature: MA Experiment 108561 PARAMETER Experiment Name: At_100uM_ABA_cDNA_P Parameter: Tissue Value: Aerial
  misc_feature: MA Experiment 108561 PARAMETER Experiment Name: At_100uM_ABA_cDNA_P Parameter: Treatment Value: 100uM ABA vs. No Treatment
  misc_feature: MA Experiment ID: 108595 Result: Up-regulated in Transcription
  misc_feature: MA Experiment 108595 PARAMETER Experiment Name: At_Ler-pi_Ovule_cDNA_P Parameter: Plant Line Value: null
  misc_feature: MA Experiment ID: 108668 Result: Up-regulated in Transcription
  misc_feature: MA Experiment 108668 PARAMETER Experiment Name: At_2mM_SA_cDNA_P Parameter: Plant Line Value: WS
  misc_feature: MA Experiment 108668 PARAMETER Experiment Name: At_2mM_SA_cDNA_P Parameter: Timepoint (hr) Value: 6
  misc_feature: MA Experiment 108668 PARAMETER Experiment Name: At_2mM_SA_cDNA_P Parameter: Treatment Value: 2mM SA vs. No Treatment
  misc_feature: MA Experiment ID: 20000068 Result: Down-regulated in Transcription
  misc_feature: MA Experiment ID: 20000090 Result: Up-regulated in Transcription
  misc_feature: MA Experiment ID: 20000111 Result: Down-regulated in Transcription
  misc_feature: MA Experiment 20000111 PARAMETER Experiment Name: At_42deg_Heat_cDNA_P Parameter: Temperature (deg C) Value: 42 vs. 22
  misc_feature: MA Experiment 20000111 PARAMETER Experiment Name: At_42deg_Heat_cDNA_P Parameter: Timepoint (hr) Value: 6
  misc_feature: MA Experiment 20000111 PARAMETER Experiment Name: At_42deg_Heat_cDNA_P Parameter: Tissue Value: Aerial
  misc_feature: MA Experiment ID: 20000144 Result: Down-regulated in Transcription
  misc_feature: MA Experiment 20000144 PARAMETER Experiment Name: At_42deg_Heat_cDNA_P Parameter: Temperature (deg C) Value: 42 vs. 22
  misc_feature: MA Experiment 20000144 PARAMETER Experiment Name: At_42deg_Heat_cDNA_P Parameter: Timepoint (hr) Value: 1
  misc_feature: MA Experiment 20000144 PARAMETER Experiment Name: At_42deg_Heat_cDNA_P Parameter: Tissue Value: Aerial
  misc_feature: MA Experiment ID: 20000173 Result: Down-regulated in Transcription
  misc_feature: MA Experiment 20000173 PARAMETER Experiment Name: At_42deg_Heat_P Parameter: Age (day) Value: 14
  misc_feature: MA Experiment 20000173 PARAMETER Experiment Name: At_42deg_Heat_P Parameter: Organism Value: A. thaliana
  misc_feature: MA Experiment 20000173 PARAMETER Experiment Name: At_42deg_Heat_P Parameter: Plant Line Value: WS
  misc_feature: MA Experiment 20000173 PARAMETER Experiment Name: At_42deg_Heat_P Parameter: Temperature (deg C) Value: 42 vs. 22
  misc_feature: MA Experiment 20000173 PARAMETER Experiment Name: At_42deg_Heat_P Parameter: Timepoint (hr) Value: 6
  misc_feature: MA Experiment 20000173 PARAMETER Experiment Name: At_42deg_Heat_P Parameter: Tissue Value: Aerial
  misc_feature: MA Experiment ID: 20000182 Result: Up-regulated in Transcription
  misc_feature: MA Experiment 20000182 PARAMETER Experiment Name: At_2mM_SA_P Parameter: Age (day) Value: 14
  misc_feature: MA Experiment 20000182 PARAMETER Experiment Name: At_2mM_SA_P Parameter: Organism Value: A. thaliana
  misc_feature: MA Experiment 20000182 PARAMETER Experiment Name: At_2mM_SA_P Parameter: Plant Line Value: WS
  misc_feature: MA Experiment 20000182 PARAMETER Experiment Name: At_2mM_SA_P Parameter: Timepoint (hr) Value: 6
  misc_feature: MA Experiment 20000182 PARAMETER Experiment Name: At_2mM_SA_P Parameter: Tissue Value: Aerial
  misc_feature: MA Experiment 20000182 PARAMETER Experiment Name: At_2mM_SA_P Parameter: Treatment Value: 2mM SA vs. No Treatment
  misc_feature: MA Experiment ID: 20000184 Result: Down-regulated in Transcription
  misc_feature: MA Experiment 20000184 PARAMETER Experiment Name: At_Shoots__P Parameter: Age (day) Value: 7
  misc_feature: MA Experiment 20000184 PARAMETER Experiment Name: At_Shoots__P Parameter: Tissue Value: Shoots vs. Whole Plant
  misc_feature: MA Experiment ID: 20000185 Result: Down-regulated in Transcription
  misc_feature: MA Experiment 20000185 PARAMETER Experiment Name: At_Roots__P Parameter: Age (day) Value: 7 vs. 21
  misc_feature: MA Experiment 20000185 PARAMETER Experiment Name: At_Roots__P Parameter: Organism Value: A. thaliana
  misc_feature: MA Experiment 20000185 PARAMETER Experiment Name: At_Roots__P Parameter: Tissue Value: Roots vs. Whole Plant
  misc_feature: MA Experiment ID: 20000235 Result: Down-regulated in Transcription
  misc_feature: MA Experiment 20000235 PARAMETER Experiment Name: At_Siliques_P Parameter: Age (day) Value: 21
  misc_feature: MA Experiment 20000235 PARAMETER Experiment Name: At_Siliques_P Parameter: Organism Value: A. thaliana
  misc_feature: MA Experiment 20000235 PARAMETER Experiment Name: At_Siliques_P Parameter: Plant Line Value: WS
  misc_feature: MA Experiment 20000235 PARAMETER Experiment Name: At_Siliques_P Parameter: Tissue Value: 5-10mm Siliques vs. Whole Plant
  misc_feature: MA Experiment ID: 20000264 Result: Down-regulated in Transcription
  misc_feature: MA Experiment 20000264 PARAMETER Experiment Name: At_Open_Flower_P Parameter: Age (day) Value: 21
  misc_feature: MA Experiment 20000264 PARAMETER Experiment Name: At_Open_Flower_P Parameter: Plant Line Value: WS
  misc_feature: MA Experiment 20000264 PARAMETER Experiment Name: At_Open_Flower_P Parameter: Tissue Value: Open Flower vs. Whole Plant
  misc_feature: MA Experiment ID: 20000265 Result: Down-regulated in Transcription
  misc_feature: MA Experiment 20000265 PARAMETER Experiment Name: At_Open_Flower_P Parameter: Age (day) Value: 21
  misc_feature: MA Experiment 20000265 PARAMETER Experiment Name: At_Open_Flower_P Parameter: Plant Line Value: WS
  misc_feature: MA Experiment 20000265 PARAMETER Experiment Name: At_Open_Flower_P Parameter: Tissue Value: Closed Flower vs. Whole Plant
  misc_feature: MA Experiment ID: 20000286 Result: Down-regulated in Transcription
  misc_feature: MA Experiment 20000286 PARAMETER Experiment Name: At_Open_Flower_P Parameter: Age (day) Value: 21
  misc_feature: MA Experiment 20000286 PARAMETER Experiment Name: At_Open_Flower_P Parameter: Plant Line Value: WS
  misc_feature: MA Experiment 20000286 PARAMETER Experiment Name: At_Open_Flower_P Parameter: Tissue Value: Half Open vs. Whole Plant
  misc_feature: MA Experiment ID: 20000439 Result: Down-regulated in Transcription
  misc_feature: MA Experiment 20000439 PARAMETER Experiment Name: At_Roots__P Parameter: Age (day) Value: 14 vs. 21
  misc_feature: MA Experiment 20000439 PARAMETER Experiment Name: At_Roots__P Parameter: Organism Value: A. thaliana
  misc_feature: MA Experiment 20000439 PARAMETER Experiment Name: At_Roots__P Parameter: Tissue Value: Roots vs. Whole Plant
  misc_feature: MA Experiment ID: 20000573 Result: Up-regulated in Transcription
  misc_feature: MA Experiment 20000573 PARAMETER Experiment Name: At_100uM_ABA_Mutants__P Parameter: Organism Value: A. thaliana
  misc_feature: MA Experiment 20000573 PARAMETER Experiment Name: At_100uM_ABA_Mutants__P Parameter: Plant Line Value: CS22 vs. Ler wt
  misc_feature: MA Experiment 20000573 PARAMETER Experiment Name: At_100uM_ABA_Mutants__P Parameter: Timepoint (hr) Value: N/A
  misc_feature: MA Experiment 20000573 PARAMETER Experiment Name: At_100uM_ABA_Mutants__P Parameter: Tissue Value: Whole Plant
  misc_feature: MA Experiment 20000573 PARAMETER Experiment Name: At_100uM_ABA_Mutants__P Parameter: Treatment Value: None
  misc_feature: MA Experiment ID: 20000574 Result: Up-regulated in Transcription
  misc_feature: MA Experiment 20000574 PARAMETER Experiment Name: At_100uM_ABA_Mutants__P Parameter: Organism Value: A. thaliana
  misc_feature: MA Experiment 20000574 PARAMETER Experiment Name: At_100uM_ABA_Mutants__P Parameter: Plant Line Value: CS23 vs. Ler wt
  misc_feature: MA Experiment 20000574 PARAMETER Experiment Name: At_100uM_ABA_Mutants__P Parameter: Timepoint (hr) Value: N/A
  misc_feature: MA Experiment 20000574 PARAMETER Experiment Name: At_100uM_ABA_Mutants__P Parameter: Tissue Value: Whole Plant
  misc_feature: MA Experiment 20000574 PARAMETER Experiment Name: At_100uM_ABA_Mutants__P Parameter: Treatment Value: None
  misc_feature: MA Experiment ID: 20000576 Result: Down-regulated in Transcription
  misc_feature: MA Experiment 20000576 PARAMETER Experiment Name: At_100uM_ABA_Mutants__P Parameter: Organism Value: A. thaliana
  misc_feature: MA Experiment 20000576 PARAMETER Experiment Name: At_100uM_ABA_Mutants__P Parameter: Plant Line Value: CS23
  misc_feature: MA Experiment 20000576 PARAMETER Experiment Name: At_100uM_ABA_Mutants__P Parameter: Timepoint (hr) Value: 6
  misc_feature: MA Experiment 20000576 PARAMETER Experiment Name: At_100uM_ABA_Mutants__P Parameter: Tissue Value: Whole Plant
  misc_feature: MA Experiment 20000576 PARAMETER Experiment Name: At_100uM_ABA_Mutants__P Parameter: Treatment Value: 1uM ABA vs. No Treatment
  misc_feature: MA Experiment ID: 20000606 Result: Up-regulated in Transcription
  misc_feature: MA Experiment 20000606 PARAMETER Experiment Name: At_CS8548_Mutant_P Parameter: Age (day) Value: 14
  misc_feature: MA Experiment 20000606 PARAMETER Experiment Name: At_CS8548_Mutant_P Parameter: Plant Line Value: CS8548 vs. wt
  misc_feature: MA Experiment 20000606 PARAMETER Experiment Name: At_CS8548_Mutant_P Parameter: Tissue Value: Whole Plant
  misc_feature: MA Experiment ID: 20000709 Result: Down-regulated in Transcription
  misc_feature: MA Experiment 20000709 PARAMETER Experiment Name: At_15mM_NH4NO3_L-to-H_P Parameter: Age (hr) Value: 14
  misc_feature: MA Experiment 20000709 PARAMETER Experiment Name: At_15mM_NH4NO3_L-to-H_P Parameter: Organism Value: A. thaliana
  misc_feature: MA Experiment 20000709 PARAMETER Experiment Name: At_15mM_NH4NO3_L-to-H_P Parameter: Plant Line Value: WS
  misc_feature: MA Experiment 20000709 PARAMETER Experiment Name: At_15mM_NH4NO3_L-to-H_P Parameter: Timepoint (hr) Value: 4
  misc_feature: MA Experiment 20000709 PARAMETER Experiment Name: At_15mM_NH4NO3_L-to-H_P Parameter: Tissue Value: Aerial
  misc_feature: MA Experiment 20000709 PARAMETER Experiment Name: At_15mM_NH4NO3_L-to-H_P Parameter: Treatment Value: 15mM NH4NO3 vs. 30mM Mannitol
  misc_feature: MA Experiment ID: 20000794 Result: Down-regulated in Transcription
  misc_feature: MA Experiment 20000794 PARAMETER Experiment Name: At_Petals_P Parameter: Age (day) Value: 23-25 days
  misc_feature: MA Experiment 20000794 PARAMETER Experiment Name: At_Petals_P Parameter: Plant Line Value: WS
  misc_feature: MA Experiment 20000794 PARAMETER Experiment Name: At_Petals_P Parameter: Tissue Value: Petals vs. Whole plant
  misc_feature: MA Experiment ID: 20001554 Result: Down-regulated in Transcription
  misc_feature: MA Experiment 20001554 PARAMETER Experiment Name: At_Drought_Soil_Dry_P Parameter: Age (day) Value: 21
  misc_feature: MA Experiment 20001554 PARAMETER Experiment Name: At_Drought_Soil_Dry_P Parameter: Organism Value: A. thaliana
  misc_feature: MA Experiment 20001554 PARAMETER Experiment Name: At_Drought_Soil_Dry_P Parameter: Plant Line Value: WS
  misc_feature: MA Experiment 20001554 PARAMETER Experiment Name: At_Drought_Soil_Dry_P Parameter: Post Timepoint (hr) Value: None
  misc_feature: MA Experiment 20001554 PARAMETER Experiment Name: At_Drought_Soil_Dry_P Parameter: Post-Treatment Value: None
  misc_feature: MA Experiment 20001554 PARAMETER Experiment Name: At_Drought_Soil_Dry_P Parameter: Timepoint (day) Value: 7
  misc_feature: MA Experiment 20001554 PARAMETER Experiment Name: At_Drought_Soil_Dry_P Parameter: Treatment Value: Drought vs. No Drought
  misc_feature: MA Experiment ID: 20001555 Result: Down-regulated in Transcription
  misc_feature: MA Experiment 20001555 PARAMETER Experiment Name: At_Drought_Soil_Dry_P Parameter: Age (day) Value: 24
  misc_feature: MA Experiment 20001555 PARAMETER Experiment Name: At_Drought_Soil_Dry_P Parameter: Organism Value: A. thaliana
  misc_feature: MA Experiment 20001555 PARAMETER Experiment Name: At_Drought_Soil_Dry_P Parameter: Plant Line Value: WS
  misc_feature: MA Experiment 20001555 PARAMETER Experiment Name: At_Drought_Soil_Dry_P Parameter: Post Timepoint (hr) Value: None
  misc_feature: MA Experiment 20001555 PARAMETER Experiment Name: At_Drought_Soil_Dry_P Parameter: Post-Treatment Value: None
  misc_feature: MA Experiment 20001555 PARAMETER Experiment Name: At_Drought_Soil_Dry_P Parameter: Timepoint (day) Value: 10
  misc_feature: MA Experiment 20001555 PARAMETER Experiment Name: At_Drought_Soil_Dry_P Parameter: Treatment Value: Drought vs. No Drought
  misc_feature: MA Experiment ID: 20001556 Result: Down-regulated in Transcription
  misc_feature: MA Experiment 20001556 PARAMETER Experiment Name: At_Drought_Soil_Dry_P Parameter: Age (day) Value: 26
  misc_feature: MA Experiment 20001556 PARAMETER Experiment Name: At_Drought_Soil_Dry_P Parameter: Organism Value: A. thaliana
  misc_feature: MA Experiment 20001556 PARAMETER Experiment Name: At_Drought_Soil_Dry_P Parameter: Plant Line Value: WS
  misc_feature: MA Experiment 20001556 PARAMETER Experiment Name: At_Drought_Soil_Dry_P Parameter: Post Timepoint (hr) Value: None
  misc_feature: MA Experiment 20001556 PARAMETER Experiment Name: At_Drought_Soil_Dry_P Parameter: Post-Treatment Value: None
  misc_feature: MA Experiment 20001556 PARAMETER Experiment Name: At_Drought_Soil_Dry_P Parameter: Timepoint (day) Value: 12
  misc_feature: MA Experiment 20001556 PARAMETER Experiment Name: At_Drought_Soil_Dry_P Parameter: Treatment Value: Drought vs. No Drought
  misc_feature: MA Experiment ID: 20001557 Result: Down-regulated in Transcription
  misc_feature: MA Experiment 20001557 PARAMETER Experiment Name: At_Drought_Soil_Dry_P Parameter: Age (day) Value: 27
  misc_feature: MA Experiment 20001557 PARAMETER Experiment Name: At_Drought_Soil_Dry_P Parameter: Organism Value: A. thaliana
  misc_feature: MA Experiment 20001557 PARAMETER Experiment Name: At_Drought_Soil_Dry_P Parameter: Plant Line Value: WS
  misc_feature: MA Experiment 20001557 PARAMETER Experiment Name: At_Drought_Soil_Dry_P Parameter: Post Timepoint (hr) Value: 3
  misc_feature: MA Experiment 20001557 PARAMETER Experiment Name: At_Drought_Soil_Dry_P Parameter: Post-Treatment Value: Re-Water vs. No Drought
  misc_feature: MA Experiment 20001557 PARAMETER Experiment Name: At_Drought_Soil_Dry_P Parameter: Timepoint (day) Value: 13
  misc_feature: MA Experiment 20001557 PARAMETER Experiment Name: At_Drought_Soil_Dry_P Parameter: Treatment Value: Drought vs. No Drought
  misc_feature: MA Experiment ID: 20001558 Result: Down-regulated in Transcription
  misc_feature: MA Experiment 20001558 PARAMETER Experiment Name: At_Drought_Soil_Dry_P Parameter: Age (day) Value: 27
  misc_feature: MA Experiment 20001558 PARAMETER Experiment Name: At_Drought_Soil_Dry_P Parameter: Organism Value: A. thaliana
  misc_feature: MA Experiment 20001558 PARAMETER Experiment Name: At_Drought_Soil_Dry_P Parameter: Plant Line Value: WS
  misc_feature: MA Experiment 20001558 PARAMETER Experiment Name: At_Drought_Soil_Dry_P Parameter: Post Timepoint (hr) Value: 6
  misc_feature: MA Experiment 20001558 PARAMETER Experiment Name: At_Drought_Soil_Dry_P Parameter: Post-Treatment Value: Re-Water vs. No Drought
  misc_feature: MA Experiment 20001558 PARAMETER Experiment Name: At_Drought_Soil_Dry_P Parameter: Timepoint (day) Value: 13
  misc_feature: MA Experiment 20001558 PARAMETER Experiment Name: At_Drought_Soil_Dry_P Parameter: Treatment Value: Drought vs. No Drought
  misc_feature: MA Experiment ID: 20001559 Result: Down-regulated in Transcription
  misc_feature: MA Experiment 20001559 PARAMETER Experiment Name: At_Drought_Soil_Dry_P Parameter: Age (day) Value: 28
  misc_feature: MA Experiment 20001559 PARAMETER Experiment Name: At_Drought_Soil_Dry_P Parameter: Organism Value: A. thaliana
  misc_feature: MA Experiment 20001559 PARAMETER Experiment Name: At_Drought_Soil_Dry_P Parameter: Plant Line Value: WS
  misc_feature: MA Experiment 20001559 PARAMETER Experiment Name: At_Drought_Soil_Dry_P Parameter: Post Timepoint (hr) Value: 29
  misc_feature: MA Experiment 20001559 PARAMETER Experiment Name: At_Drought_Soil_Dry_P Parameter: Post-Treatment Value: Re-Water vs. No Drought
  misc_feature: MA Experiment 20001559 PARAMETER Experiment Name: At_Drought_Soil_Dry_P Parameter: Timepoint (day) Value: 14
  misc_feature: MA Experiment 20001559 PARAMETER Experiment Name: At_Drought_Soil_Dry_P Parameter: Treatment Value: Drought vs. No Drought
  misc_feature: MA Experiment ID: 20001560 Result: Down-regulated in Transcription
  misc_feature: MA Experiment 20001560 PARAMETER Experiment Name: At_Drought_Soil_Dry_P Parameter: Age (day) Value: 28
  misc_feature: MA Experiment 20001560 PARAMETER Experiment Name: At_Drought_Soil_Dry_P Parameter: Organism Value: A. thaliana
  misc_feature: MA Experiment 20001560 PARAMETER Experiment Name: At_Drought_Soil_Dry_P Parameter: Plant Line Value: WS
  misc_feature: MA Experiment 20001560 PARAMETER Experiment Name: At_Drought_Soil_Dry_P Parameter: Post Timepoint (hr) Value: None
  misc_feature: MA Experiment 20001560 PARAMETER Experiment Name: At_Drought_Soil_Dry_P Parameter: Post-Treatment Value: None
  misc_feature: MA Experiment 20001560 PARAMETER Experiment Name: At_Drought_Soil_Dry_P Parameter: Timepoint (day) Value: 14
  misc_feature: MA Experiment 20001560 PARAMETER Experiment Name: At_Drought_Soil_Dry_P Parameter: Treatment Value: Drought vs. No Drought
  misc_feature: MA Experiment ID: 20001757 Result: Up-regulated in Transcription
  misc_feature: MA Experiment 20001757 PARAMETER Experiment Name: At_50mM_NH4NO3_L-to-H_P Parameter: Timepoint (hr) Value: 6
  misc_feature: MA Experiment 20001757 PARAMETER Experiment Name: At_50mM_NH4NO3_L-to-H_P Parameter: Tissue Value: Leaf
  misc_feature: MA Experiment 20001757 PARAMETER Experiment Name: At_50mM_NH4NO3_L-to-H_P Parameter: Treatment Value: 50mM NH4NO3 vs 100mM Mannitol
  misc_feature: MA Experiment ID: 20001904 Result: Down-regulated in Transcription
  misc_feature: MA Experiment 20001904 PARAMETER Experiment Name: At_Drought_Reproduction_P Parameter: Age (day) Value: 37
  misc_feature: MA Experiment 20001904 PARAMETER Experiment Name: At_Drought_Reproduction_P Parameter: Organism Value: A. thaliana
  misc_feature: MA Experiment 20001904 PARAMETER Experiment Name: At_Drought_Reproduction_P Parameter: Plant Line Value: WS
  misc_feature: MA Experiment 20001904 PARAMETER Experiment Name: At_Drought_Reproduction_P Parameter: Timepoint (day) Value: 7
  misc_feature: MA Experiment 20001904 PARAMETER Experiment Name: At_Drought_Reproduction_P Parameter: Tissue Value: Rosettes
  misc_feature: MA Experiment 20001904 PARAMETER Experiment Name: At_Drought_Reproduction_P Parameter: Treatment Value: Drought vs. No Drought
aaatgtgcctctttggttccaaagtcgctctgtaacttaagagagagtgactgttccgttgacagagcaaaatggcccaaacctattgaaaaccccaaaacccttagtttggaatctcatctcattttgcttctgttcttttccatgtaatttcaacaaagtttgaaactttgtttctatagcaactcaattacatggaaattcttaaaagtctactctttaagtcgccctcttggctgaaactcttagcttcttgttataaaacctgaagttcgaaatcattccaataccacaaataactcaactttcttcaagcatggacaatgaagatcaggagtcccttttacttcaaggggttccagataattatggaggtgttaaggtgaacttgacagaaccaatgactattgaggattttgtcccaaagctgagagcttcacttgtgtattggagcaatcaggggacgaaggggatatggttaaagcttgccgatgggcttgacaatcttattgcacctgcaaaagcagaagggtttgtgtgccaccatgccgagagggaatacaccatgcttacatcttggatcgctgatgttcctagtactcttcctgccaatgcgtctcatcgtattggagttggtgcctttgtcctaaacaagaagaccaaagaggtgcttgtggtccaggagattgatggtcatttcaaaggtacaggagtgtggaaactgcctaccggtgttgttaaagagggtgagaatatttgggaaggagcacttagggaagtggaagaagaaactggtattaagacaaaatttgtagaagtcctggctttcagggaaagccaccaagcattcttggaaataaaaacggatatatttttcctctgtgagttagaaccaaccacttttgaaatcaagaaacaagactctgagatcttagctgctaagtggatgccaattgaagaatacgtaaaccaaccctggaaccagaagaaagaactgtttaggttcatggcgaacatctgcttgaagagattgcaggagatggaatacatgggtttctccaaagtccttactacgacttcatctgggaaagagagctatctttactgcaacaccgatcacgccaacctcctcaacgcaacgcgtggcctagcctccacctctggttgaaaaacccttcttcagaacgtgtttatgtttcgttgtttcatgtccattgttcaataaaagcaccagtctcgtgtgtacaacgattggagacttctttatgtaatttaccatcatttcctcactacaacttcatatataatatatttctttggct

SEQ ID NO: 101400 - protein, 283 aa, Arabidopsis thaliana
  peptide (1)..(283): Ceres Seq. ID no. 13607774
  misc_feature (102)..(237): Pfam Name: NUDIX domain Pfam Description: NUDIX domain
  misc_feature (1)..(283): Homolog of NCBI NO: 15228147 NR Description: MutT/nudix family protein [Arabidopsis thaliana]
  misc_feature (1)..(282): Homolog of NCBI NO: 15235458 NR Description: MutT/nudix family protein [Arabidopsis thaliana] MutT/nudix family protein [Arabidopsis thaliana] MutT/nudix family protein [Arabidopsis thaliana]
  misc_feature (10)..(282): Homolog of NCBI NO: 21553511 NR Description: growth factor like protein [Arabidopsis thaliana]
  misc_feature (1)..(282): Homolog of NCBI NO: 38564302 NR Description: At2g04430 [Arabidopsis thaliana]
  misc_feature (1)..(282): Homolog of NCBI NO: 15228145 NR Description: MutT/nudix family protein [Arabidopsis thaliana]
  misc_feature (1)..(266): Homolog of NCBI NO: 18422823 NR Description: MutT/nudix family protein [Arabidopsis thaliana]
  misc_feature (1)..(266): Homolog of NCBI NO: 9758793 NR Description: MutT domain protein-like [Arabidopsis thaliana]
  misc_feature (10)..(265): Homolog of NCBI NO: 38564312 NR Description: At4g25434 [Arabidopsis thaliana]
  misc_feature (10)..(162): Homolog of NCBI NO: 30686884 NR Description: MutT/nudix family protein [Arabidopsis thaliana]
  misc_feature (161)..(265): Homolog of NCBI NO: 30686884 NR Description: MutT/nudix family protein [Arabidopsis thaliana]
MDNEDQESLLLQGVPDNYGGVKVNLTEPMTIEDFVPKLRASLVYWSNQGTKGIWLKLADGLDNLIAPAKAEGFVCHHAEREYTMLTSWIADVPSTLPANASHRIGVGAFVLNKKTKEVLVVQEIDGHFKGTGVWKLPTGVVKEGENIWEGALREVEEETGIKTKFVEVLAFRESHQAFLEIKTDIFFLCELEPTTFEIKKQDSEILAAKWMPIEEYVNQPWNQKKELFRFMANICLKRLQEMEYMGFSKVLTTTSSGKESYLYCNTDHANLLNATRGLASTSG

SEQ ID NO: 101401 - protein, 255 aa, Arabidopsis thaliana
  peptide (1)..(255): Ceres Seq. ID no. 13607775
  misc_feature (74)..(209): Pfam Name: NUDIX domain Pfam Description: NUDIX domain
  misc_feature (1)..(255): Homolog of NCBI NO: 15228147 NR Description: MutT/nudix family protein [Arabidopsis thaliana]
  misc_feature (1)..(254): Homolog of NCBI NO: 15235458 NR Description: MutT/nudix family protein [Arabidopsis thaliana] MutT/nudix family protein [Arabidopsis thaliana] MutT/nudix family protein [Arabidopsis thaliana]
  misc_feature (1)..(254): Homolog of NCBI NO: 21553511 NR Description: growth factor like protein [Arabidopsis thaliana]
  misc_feature (1)..(254): Homolog of NCBI NO: 38564302 NR Description: At2g04430 [Arabidopsis thaliana]
  misc_feature (1)..(254): Homolog of NCBI NO: 15228145 NR Description: MutT/nudix family protein [Arabidopsis thaliana]
  misc_feature (1)..(238): Homolog of NCBI NO: 18422823 NR Description: MutT/nudix family protein [Arabidopsis thaliana]
  misc_feature (1)..(238): Homolog of NCBI NO: 9758793 NR Description: MutT domain protein-like [Arabidopsis thaliana]
  misc_feature (1)..(237): Homolog of NCBI NO: 38564312 NR Description: At4g25434 [Arabidopsis thaliana]
  misc_feature (1)..(134): Homolog of NCBI NO: 30686884 NR Description: MutT/nudix family protein [Arabidopsis thaliana]
  misc_feature (133)..(237): Homolog of NCBI NO: 30686884 NR Description: MutT/nudix family protein [Arabidopsis thaliana]
MTIEDFVPKLRASLVYWSNQGTKGIWLKLADGLDNLIAPAKAEGFVCHHAEREYTMLTSWIADVPSTLPANASHRIGVGAFVLNKKTKEVLVVQEIDGHFKGTGVWKLPTGVVKEGENIWEGALREVEEETGIKTKFVEVLAFRESHQAFLEIKTDIFFLCELEPTTFEIKKQDSEILAAKWMPIEEYVNQPWNQKKELFRFMANICLKRLQEMEYMGFSKVLTTTSSGKESYLYCNTDHANLLNATRGLASTSG

SEQ ID NO: 101402 - protein, 200 aa, Arabidopsis thaliana
  peptide (1)..(200): Ceres Seq. ID no. 13607776
  misc_feature (19)..(154): Pfam Name: NUDIX domain Pfam Description: NUDIX domain
  misc_feature (1)..(200): Homolog of NCBI NO: 15228147 NR Description: MutT/nudix family protein [Arabidopsis thaliana]
  misc_feature (1)..(199): Homolog of NCBI NO: 15235458 NR Description: MutT/nudix family protein [Arabidopsis thaliana] MutT/nudix family protein [Arabidopsis thaliana] MutT/nudix family protein [Arabidopsis thaliana]
  misc_feature (1)..(199): Homolog of NCBI NO: 21553511 NR Description: growth factor like protein [Arabidopsis thaliana]
  misc_feature (1)..(199): Homolog of NCBI NO: 38564302 NR Description: At2g04430 [Arabidopsis thaliana]
  misc_feature (1)..(199): Homolog of NCBI NO: 15228145 NR Description: MutT/nudix family protein [Arabidopsis thaliana]
  misc_feature (1)..(183): Homolog of NCBI NO: 18422823 NR Description: MutT/nudix family protein [Arabidopsis thaliana]
  misc_feature (1)..(183): Homolog of NCBI NO: 9758793 NR Description: MutT domain protein-like [Arabidopsis thaliana]
  misc_feature (1)..(182): Homolog of NCBI NO: 38564312 NR Description: At4g25434 [Arabidopsis thaliana]
  misc_feature (1)..(79): Homolog of NCBI NO: 30686884 NR Description: MutT/nudix family protein [Arabidopsis thaliana]
  misc_feature (78)..(182): Homolog of NCBI NO: 30686884 NR Description: MutT/nudix family protein [Arabidopsis thaliana]
MLTSWIADVPSTLPANASHRIGVGAFVLNKKTKEVLVVQEIDGHFKGTGVWKLPTGVVKEGENIWEGALREVEEETGIKTKFVEVLAFRESHQAFLEIKTDIFFLCELEPTTFEIKKQDSEILAAKWMPIEEYVNQPWNQKKELFRFMANICLKRLQEMEYMGFSKVLTTTSSGKESYLYCNTDHANLLNATRGLASTSG

SEQ ID NO: 101403 - DNA, 1338 bp, Arabidopsis thaliana
  misc_feature (1)..(1338): Ceres Seq. ID no. 13607777
  misc_feature: MA Experiment ID: 20000184 Result: Up-regulated in Transcription
  misc_feature: MA Experiment 20000184 PARAMETER Experiment Name: At_Shoots__P Parameter: Age (day) Value: 7
  misc_feature: MA Experiment 20000184 PARAMETER Experiment Name: At_Shoots__P Parameter: Tissue Value: Shoots vs. Whole Plant
  misc_feature: MA Experiment ID: 20000234 Result: Up-regulated in Transcription
  misc_feature: MA Experiment 20000234 PARAMETER Experiment Name: At_Siliques_P Parameter: Age (day) Value: 21
  misc_feature: MA Experiment 20000234 PARAMETER Experiment Name: At_Siliques_P Parameter: Organism Value: A. thaliana
  misc_feature: MA Experiment 20000234 PARAMETER Experiment Name: At_Siliques_P Parameter: Plant Line Value: WS
  misc_feature: MA Experiment 20000234 PARAMETER Experiment Name: At_Siliques_P Parameter: Tissue Value: Less Than 5mm Siliques vs. Whole Plant
  misc_feature: MA Experiment ID: 20000235 Result: Up-regulated in Transcription
  misc_feature: MA Experiment 20000235 PARAMETER Experiment Name: At_Siliques_P Parameter: Age (day) Value: 21
  misc_feature: MA Experiment 20000235 PARAMETER Experiment Name: At_Siliques_P Parameter: Organism Value: A. thaliana
  misc_feature: MA Experiment 20000235 PARAMETER Experiment Name: At_Siliques_P Parameter: Plant Line Value: WS
  misc_feature: MA Experiment 20000235 PARAMETER Experiment Name: At_Siliques_P Parameter: Tissue Value: 5-10mm Siliques vs. Whole Plant
  misc_feature: MA Experiment ID: 20000436 Result: Up-regulated in Transcription
  misc_feature: MA Experiment 20000436 PARAMETER Experiment Name: At_Drought_P Parameter: Age (day) Value: 7
  misc_feature: MA Experiment 20000436 PARAMETER Experiment Name: At_Drought_P Parameter: Organism Value: A. thaliana
  misc_feature: MA Experiment 20000436 PARAMETER Experiment Name: At_Drought_P Parameter: Plant Line Value: WS
  misc_feature: MA Experiment 20000436 PARAMETER Experiment Name: At_Drought_P Parameter: Timepoint (hr) Value: 12
  misc_feature: MA Experiment 20000436 PARAMETER Experiment Name: At_Drought_P Parameter: Tissue Value: Whole Plant
  misc_feature: MA Experiment 20000436 PARAMETER Experiment Name: At_Drought_P Parameter: Treatment Value: Drought vs. No Drought
  misc_feature: MA Experiment ID: 20000495 Result: Up-regulated in Transcription
  misc_feature: MA Experiment 20000495 PARAMETER Experiment Name: At_Guard_Cells_P Parameter: Harvest Date Value: 8/2/2002
  misc_feature: MA Experiment 20000495 PARAMETER Experiment Name: At_Guard_Cells_P Parameter: Organism Value: A. thaliana
  misc_feature: MA Experiment 20000495 PARAMETER Experiment Name: At_Guard_Cells_P Parameter: Tissue Value: Guard Cells vs. Leaves
  misc_feature: MA Experiment ID: 20000794 Result: Down-regulated in Transcription
  misc_feature: MA Experiment 20000794 PARAMETER Experiment Name: At_Petals_P Parameter: Age (day) Value: 23-25 days
  misc_feature: MA Experiment 20000794 PARAMETER Experiment Name: At_Petals_P Parameter: Plant Line Value: WS
  misc_feature: MA Experiment 20000794 PARAMETER Experiment Name: At_Petals_P Parameter: Tissue Value: Petals vs. Whole plant
  misc_feature: MA Experiment ID: 20001248 Result: Down-regulated in Transcription
  misc_feature: MA Experiment 20001248 PARAMETER Experiment Name: At_Far-red-induction_P Parameter: Age (day) Value: 7
  misc_feature: MA Experiment 20001248 PARAMETER Experiment Name: At_Far-red-induction_P Parameter: Light Value: Far-red vs. White
  misc_feature: MA Experiment 20001248 PARAMETER Experiment Name: At_Far-red-induction_P Parameter: Organism Value: A. thaliana
  misc_feature: MA Experiment 20001248 PARAMETER Experiment Name: At_Far-red-induction_P Parameter: Plant Line Value: Columbia
  misc_feature: MA Experiment 20001248 PARAMETER Experiment Name: At_Far-red-induction_P Parameter: Timepoint (hr) Value: 4
  misc_feature: MA Experiment 20001248 PARAMETER Experiment Name: At_Far-red-induction_P Parameter: Tissue Value: Whole Plant
  misc_feature: MA Experiment ID: 20001451 Result: Up-regulated in Transcription
  misc_feature: MA Experiment 20001451 PARAMETER Experiment Name: At_Far-red-induction_P Parameter: Age (day) Value: 7
  misc_feature: MA Experiment 20001451 PARAMETER Experiment Name: At_Far-red-induction_P Parameter: Light Value: Far-red vs. White
  misc_feature: MA Experiment 20001451 PARAMETER Experiment Name: At_Far-red-induction_P Parameter: Organism Value: A. thaliana
  misc_feature: MA Experiment 20001451 PARAMETER Experiment Name: At_Far-red-induction_P Parameter: Plant Line Value: Columbia
  misc_feature: MA Experiment 20001451 PARAMETER Experiment Name: At_Far-red-induction_P Parameter: Timepoint (hr) Value: 24
  misc_feature: MA Experiment 20001451 PARAMETER Experiment Name: At_Far-red-induction_P Parameter: Tissue Value: Whole Plant
  misc_feature: MA Experiment ID: 20001556 Result: Down-regulated in Transcription
  misc_feature: MA Experiment 20001556 PARAMETER Experiment Name: At_Drought_Soil_Dry_P Parameter: Age (day) Value: 26
  misc_feature: MA Experiment 20001556 PARAMETER Experiment Name: At_Drought_Soil_Dry_P Parameter: Organism Value: A. thaliana
  misc_feature: MA Experiment 20001556 PARAMETER Experiment Name: At_Drought_Soil_Dry_P Parameter: Plant Line Value: WS
  misc_feature: MA Experiment 20001556 PARAMETER Experiment Name: At_Drought_Soil_Dry_P Parameter: Post Timepoint (hr) Value: None
  misc_feature: MA Experiment 20001556 PARAMETER Experiment Name: At_Drought_Soil_Dry_P Parameter: Post-Treatment Value: None
  misc_feature: MA Experiment 20001556 PARAMETER Experiment Name: At_Drought_Soil_Dry_P Parameter: Timepoint (day) Value: 12
  misc_feature: MA Experiment 20001556 PARAMETER Experiment Name: At_Drought_Soil_Dry_P Parameter: Treatment Value: Drought vs. No Drought
  misc_feature: MA Experiment ID: 20001557 Result: Down-regulated in Transcription
  misc_feature: MA Experiment 20001557 PARAMETER Experiment Name: At_Drought_Soil_Dry_P Parameter: Age (day) Value: 27
  misc_feature: MA Experiment 20001557 PARAMETER Experiment Name: At_Drought_Soil_Dry_P Parameter: Organism Value: A. thaliana
  misc_feature: MA Experiment 20001557 PARAMETER Experiment Name: At_Drought_Soil_Dry_P Parameter: Plant Line Value: WS
  misc_feature: MA Experiment 20001557 PARAMETER Experiment Name: At_Drought_Soil_Dry_P Parameter: Post Timepoint (hr) Value: 3
  misc_feature: MA Experiment 20001557 PARAMETER Experiment Name: At_Drought_Soil_Dry_P Parameter: Post-Treatment Value: Re-Water vs. No Drought
  misc_feature: MA Experiment 20001557 PARAMETER Experiment Name: At_Drought_Soil_Dry_P Parameter: Timepoint (day) Value: 13
  misc_feature: MA Experiment 20001557 PARAMETER Experiment Name: At_Drought_Soil_Dry_P Parameter: Treatment Value: Drought vs. No Drought
  misc_feature: MA Experiment ID: 20001558 Result: Down-regulated in Transcription
  misc_feature: MA Experiment 20001558 PARAMETER Experiment Name: At_Drought_Soil_Dry_P Parameter: Age (day) Value: 27
  misc_feature: MA Experiment 20001558 PARAMETER Experiment Name: At_Drought_Soil_Dry_P Parameter: Organism Value: A. thaliana
  misc_feature: MA Experiment 20001558 PARAMETER Experiment Name: At_Drought_Soil_Dry_P Parameter: Plant Line Value: WS
  misc_feature: MA Experiment 20001558 PARAMETER Experiment Name: At_Drought_Soil_Dry_P Parameter: Post Timepoint (hr) Value: 6
  misc_feature: MA Experiment 20001558 PARAMETER Experiment Name: At_Drought_Soil_Dry_P Parameter: Post-Treatment Value: Re-Water vs. No Drought
  misc_feature: MA Experiment 20001558 PARAMETER Experiment Name: At_Drought_Soil_Dry_P Parameter: Timepoint (day) Value: 13
  misc_feature: MA Experiment 20001558 PARAMETER Experiment Name: At_Drought_Soil_Dry_P Parameter: Treatment Value: Drought vs. No Drought
agagatgatcaaacaatggcgactttgattctatcattcttgcttcttcttctagcaacaaagcttcctgaatcactagctggtcactgcaccaccacgacggcgacgaaaagcttcgagaaatgtatctctcttccaacacaacaagcgtcaatcgcgtggacataccatccacacaacgctactctcgacctttgtttctttggaactttcatctcaccttccgggtgggttggatgggggattaacccggattccccggcgcagatgactggttctcgtgtcctcatcgcctttccagatccgaattctggtcagctcatcctccttccttacgttcttgactcttcagtcaagcttcagaaaggtcctctgctttcccgtccgcttgaccttgtccgtctctcttcctcctctgcttctctctacggtggtaaaatggccactatccgtaatggtgcttccgttcagatttatgcctctgttaagctctcctcgaacaatactaagatccaccatgtttggaacagaggtctttatgtccaaggttactctcccaccattcatcctactacttccaccgatctctcctccttctccacctttgatgtcacttcaggatttgcaactgttaatcaaaacagcggttcccgagctttaaaagtgactcacggagtagtcaacgcgatatcgtggggttttctcctcccggcgggagcagtaacagctagatacctccgccaaatgcaatcaataggacccacttggttctacatccacgcagcaatacagctaaccggtttcctcctaggaaccattggcttctccattggaatcgtgctcggccataattcccctggagtgacctatgggttacatcggagcctcgggatagctactttcacagcagcggcgctgcaaacactggctttgctgttcagaccaaagacgaccaataagttccggaggtactggaagtcttaccatcattttgtcgggtacgcgtgtgtggtgatgggcgtggtgaatgtgttccaagggtttgaggttttaagggaaggaaggtcgtacgcaaagctcggttactgtctatgtctgtcgacgctggttggtgtctgcgtggccatggaagttaactcgtgggttgtgttttgtcgaaaggctaaagaggagaagatgaagagagatggtttgaccggtgtcgatagatgcagtgggagtcatagttaggtcttgggtcctaattataagacagaaaaagagacacaatatcatttatatatctttgcttagtaccctcatgtacaatgtaacttgttggttcaaagttgacttacc

SEQ ID NO: 101404 - protein, 409 aa, Arabidopsis thaliana
  peptide (1)..(409): Ceres Seq. ID no. 13607778
  misc_feature (90)..(231): Pfam Name: Protein of unknown function (DUF568) Pfam Description: Protein of unknown function (DUF568)
  misc_feature (6)..(409): Homolog of NCBI NO: 18395877 NR Description: auxin-induced protein, putative [Arabidopsis >gi|20197988|gb|AAD22321.2| expressed protein [Arabidopsis
  misc_feature (6)..(409): Homolog of NCBI NO: 21536849 NR Description: unknown [Arabidopsis thaliana]
  misc_feature (4)..(395): Homolog of NCBI NO: 24414274 NR Description: Hypothetical protein [Oryza sativa (japonica
  misc_feature (133)..(409): Homolog of NCBI NO: 25411125 NR Description: hypothetical protein At2g04850 [imported] -
  misc_feature (6)..(213): Homolog of NCBI NO: 25411125 NR Description: hypothetical protein At2g04850 [imported] -
  misc_feature (14)..(389): Homolog of NCBI NO: 18421491 NR Description: auxin-induced protein family [Arabidopsis >gi|9758647|dbj|BAB09271.1| gene_id:MXH1.11~pir||T10200~similar unknown protein [Arabidopsis thaliana]
  misc_feature (14)..(389): Homolog of NCBI NO: 21592781 NR Description: putative membrane protein [Arabidopsis thaliana]
  misc_feature (3)..(394): Homolog of NCBI NO: 15235545 NR Description: auxin-induced protein, putative [Arabidopsis
  misc_feature (3)..(394): Homolog of NCBI NO: 21593814 NR Description: unknown [Arabidopsis thaliana]
  misc_feature (11)..(394): Homolog of NCBI NO: 18404500 NR Description: auxin-induced protein family [Arabidopsis >gi|9294186|dbj|BAB02088.1| similarity to unknown protein [Arabidopsis thaliana]
RDDQTMATLILSFLLLLLATKLPESLAGHCTTTTATKSFEKCISLPTQQASIAWTYHPHNATLDLCFFGTFISPSGWVGWGINPDSPAQMTGSRVLIAFPDPNSGQLILLPYVLDSSVKLQKGPLLSRPLDLVRLSSSSASLYGGKMATIRNGASVQIYASVKLSSNNTKIHHVWNRGLYVQGYSPTIHPTTSTDLSSFSTFDVTSGFATVNQNSGSRALKVTHGVVNAISWGFLLPAGAVTARYLRQMQSIGPTWFYIHAAIQLTGFLLGTIGFSIGIVLGHNSPGVTYGLHRSLGIATFTAAALQTLALLFRPKTTNKFRRYWKSYHHFVGYACVVMGVVNVFQGFEVLREGRSYAKLGYCLCLSTLVGVCVAMEVNSWVVFCRKAKEEKMKRDGLTGVDRCSGSHS

SEQ ID NO: 101405 - protein, 404 aa, Arabidopsis thaliana
  peptide (1)..(404): Ceres Seq. ID no. 13607779
  misc_feature (85)..(226): Pfam Name: Protein of unknown function (DUF568) Pfam Description: Protein of unknown function (DUF568)
  misc_feature (1)..(404): Homolog of NCBI NO: 18395877 NR Description: auxin-induced protein, putative [Arabidopsis >gi|20197988|gb|AAD22321.2| expressed protein [Arabidopsis
  misc_feature (1)..(404): Homolog of NCBI NO: 21536849 NR Description: unknown [Arabidopsis thaliana]
  misc_feature (1)..(390): Homolog of NCBI NO: 24414274 NR Description: Hypothetical protein [Oryza sativa (japonica
  misc_feature (128)..(404): Homolog of NCBI NO: 25411125 NR Description: hypothetical protein At2g04850 [imported] -
  misc_feature (1)..(208): Homolog of NCBI NO: 25411125 NR Description: hypothetical protein At2g04850 [imported] -
  misc_feature (9)..(384): Homolog of NCBI NO: 18421491 NR Description: auxin-induced protein family [Arabidopsis >gi|9758647|dbj|BAB09271.1| gene_id:MXH1.11~pir||T10200~similar unknown protein [Arabidopsis thaliana]
  misc_feature (9)..(384): Homolog of NCBI NO: 21592781 NR Description: putative membrane protein [Arabidopsis thaliana]
  misc_feature (1)..(389): Homolog of NCBI NO: 15235545 NR Description: auxin-induced protein, putative [Arabidopsis
  misc_feature (1)..(389): Homolog of NCBI NO: 21593814 NR Description: unknown [Arabidopsis thaliana]
  misc_feature (6)..(389): Homolog of NCBI NO: 18404500 NR Description: auxin-induced protein family [Arabidopsis >gi|9294186|dbj|BAB02088.1| similarity to unknown protein [Arabidopsis thaliana]
MATLILSFLLLLLATKLPESLAGHCTTTTATKSFEKCISLPTQQASIAWTYHPHNATLDLCFFGTFISPSGWVGWGINPDSPAQMTGSRVLIAFPDPNSGQLILLPYVLDSSVKLQKGPLLSRPLDLVRLSSSSASLYGGKMATIRNGASVQIYASVKLSSNNTKIHHVWNRGLYVQGYSPTIHPTTSTDLSSFSTFDVTSGFATVNQNSGSRALKVTHGVVNAISWGFLLPAGAVTARYLRQMQSIGPTWFYIHAAIQLTGFLLGTIGFSIGIVLGHNSPGVTYGLHRSLGIATFTAAALQTLALLFRPKTTNKFRRYWKSYHHFVGYACVVMGVVNVFQGFEVLREGRSYAKLGYCLCLSTLVGVCVAMEVNSWVVFCRKAKEEKMKRDGLTGVDRCSGSHS

SEQ ID NO: 101406 - protein, 320 aa, Arabidopsis thaliana; identical to SEQ ID NO: 40238
  peptide (1)..(320): Ceres Seq. ID no. 13607780
  misc_feature (1)..(142): Pfam Name: Protein of unknown function (DUF568) Pfam Description: Protein of unknown function (DUF568)
  misc_feature (1)..(320): Homolog of NCBI NO: 18395877 NR Description: auxin-induced protein, putative [Arabidopsis >gi|20197988|gb|AAD22321.2| expressed protein [Arabidopsis
  misc_feature (1)..(320): Homolog of NCBI NO: 21536849 NR Description: unknown [Arabidopsis thaliana]
  misc_feature (1)..(306): Homolog of NCBI NO: 24414274 NR Description: Hypothetical protein [Oryza sativa (japonica
  misc_feature (44)..(320): Homolog of NCBI NO: 25411125 NR Description: hypothetical protein At2g04850 [imported] -
  misc_feature (1)..(124): Homolog of NCBI NO: 25411125 NR Description: hypothetical protein At2g04850 [imported] -
  misc_feature (1)..(300): Homolog of NCBI NO: 18421491 NR Description: auxin-induced protein family [Arabidopsis >gi|9758647|dbj|BAB09271.1| gene_id:MXH1.11~pir||T10200~similar unknown protein [Arabidopsis thaliana]
  misc_feature (1)..(300): Homolog of NCBI NO: 21592781 NR Description: putative membrane protein [Arabidopsis thaliana]
  misc_feature (1)..(305): Homolog of NCBI NO: 15235545 NR Description: auxin-induced protein, putative [Arabidopsis
  misc_feature (1)..(305): Homolog of NCBI NO: 21593814 NR Description: unknown [Arabidopsis thaliana]
  misc_feature (1)..(305): Homolog of NCBI NO: 18404500 NR Description: auxin-induced protein family [Arabidopsis >gi|9294186|dbj|BAB02088.1| similarity to unknown protein [Arabidopsis thaliana]

SEQ ID NO: 101407 - DNA, 1284 bp, Arabidopsis thaliana
  misc_feature (1)..(1284): Ceres Seq. ID no. 13607788
  misc_feature: MA Experiment ID: 108433 Result: Up-regulated in Transcription
  misc_feature: MA Experiment 108433 PARAMETER Experiment Name: At_rhl_Mutant2_cDNA_P Parameter: Age (day) Value: 7
  misc_feature: MA Experiment 108433 PARAMETER Experiment Name: At_rhl_Mutant2_cDNA_P Parameter: Organism Value: A. thaliana
  misc_feature: MA Experiment 108433 PARAMETER Experiment Name: At_rhl_Mutant2_cDNA_P Parameter: Plant Line Value: rhl Mutant vs. wt landsburg
  misc_feature: MA Experiment 108433 PARAMETER Experiment Name: At_rhl_Mutant2_cDNA_P Parameter: Tissue Value: Roots
  misc_feature: MA Experiment ID: 108462 Result: Up-regulated in Transcription
  misc_feature: MA Experiment 108462 PARAMETER Experiment Name: At_Germinating_Seeds_cDNA_P Parameter: Age (day) Value: 2 vs. 0
  misc_feature: MA Experiment 108462 PARAMETER Experiment Name: At_Germinating_Seeds_cDNA_P Parameter: Tissue Value: Germinating Seeds
  misc_feature: MA Experiment ID: 108569 Result: Down-regulated in Transcription
  misc_feature: MA Experiment 108569 PARAMETER Experiment Name: At_0.001%_MeJA__cDNA_P Parameter: Timepoint (hr) Value: 6
  misc_feature: MA Experiment 108569 PARAMETER Experiment Name: At_0.001%_MeJA__cDNA_P Parameter: Tissue Value: Aerial
  misc_feature: MA Experiment 108569 PARAMETER Experiment Name: At_0.001%_MeJA__cDNA_P Parameter: Treatment Value: 0.001% MeJA vs. No Treatment
  misc_feature: MA Experiment ID: 20000070 Result: Down-regulated in Transcription
  misc_feature: MA Experiment 20000070 PARAMETER Experiment Name: At_100uM_ABA_Mutants_cDNA_P Parameter: Plant Line Value: CS24
  misc_feature: MA Experiment 20000070 PARAMETER Experiment Name: At_100uM_ABA_Mutants_cDNA_P Parameter: Timepoint (hr) Value: 6
  misc_feature: MA Experiment 20000070 PARAMETER Experiment Name: At_100uM_ABA_Mutants_cDNA_P Parameter: Tissue Value: Aerial
  misc_feature: MA Experiment 20000070 PARAMETER Experiment Name: At_100uM_ABA_Mutants_cDNA_P Parameter: Treatment Value: 100uM ABA vs. No Treatment
  misc_feature: MA Experiment ID: 20000071 Result: Down-regulated in Transcription
  misc_feature: MA Experiment 20000071 PARAMETER Experiment Name: At_100uM_ABA_Mutants_cDNA_P Parameter: Plant Line Value: CS8104
  misc_feature: MA Experiment 20000071 PARAMETER Experiment Name: At_100uM_ABA_Mutants_cDNA_P Parameter: Timepoint (hr) Value: 6
  misc_feature: MA Experiment 20000071 PARAMETER Experiment Name: At_100uM_ABA_Mutants_cDNA_P Parameter: Tissue Value: Aerial
  misc_feature: MA Experiment 20000071 PARAMETER Experiment Name: At_100uM_ABA_Mutants_cDNA_P Parameter: Treatment Value: 100uM ABA vs. No Treatment
  misc_feature: MA Experiment ID: 20000072 Result: Down-regulated in Transcription
  misc_feature: MA Experiment 20000072 PARAMETER Experiment Name: At_100uM_ABA_Mutants_cDNA_P Parameter: Plant Line Value: CS8105
  misc_feature: MA Experiment 20000072 PARAMETER Experiment Name: At_100uM_ABA_Mutants_cDNA_P Parameter: Timepoint (hr) Value: 6
  misc_feature: MA Experiment 20000072 PARAMETER Experiment Name: At_100uM_ABA_Mutants_cDNA_P Parameter: Tissue Value: Aerial
  misc_feature: MA Experiment 20000072 PARAMETER Experiment Name: At_100uM_ABA_Mutants_cDNA_P Parameter: Treatment Value: 100uM ABA vs. No Treatment
  misc_feature: MA Experiment ID: 20000111 Result: Up-regulated in Transcription
  misc_feature: MA Experiment 20000111 PARAMETER Experiment Name: At_42deg_Heat_cDNA_P Parameter: Temperature (deg C) Value: 42 vs. 22
  misc_feature: MA Experiment 20000111 PARAMETER Experiment Name: At_42deg_Heat_cDNA_P Parameter: Timepoint (hr) Value: 6
  misc_feature: MA Experiment 20000111 PARAMETER Experiment Name: At_42deg_Heat_cDNA_P Parameter: Tissue Value: Aerial
  misc_feature: MA Experiment ID: 20000180 Result: Up-regulated in Transcription
  misc_feature: MA Experiment 20000180 PARAMETER Experiment Name: At_Germinating_Seeds_P Parameter: Age (hr) Value: 24 vs. 0
  misc_feature: MA Experiment 20000180 PARAMETER Experiment Name: At_Germinating_Seeds_P Parameter: Tissue Value: Germinating Seeds
  misc_feature: MA Experiment ID: 20000227 Result: Up-regulated in Transcription
  misc_feature: MA Experiment 20000227 PARAMETER Experiment Name: At_Root-Tips-vs-Tops_P Parameter: Tissue Value: Root Tips vs. Root Tops
  misc_feature: MA Experiment ID: 20000235 Result: Down-regulated in Transcription
  misc_feature: MA Experiment 20000235 PARAMETER Experiment Name: At_Siliques_P Parameter: Age (day) Value: 21
  misc_feature: MA Experiment 20000235 PARAMETER Experiment Name: At_Siliques_P Parameter: Organism Value: A. thaliana
  misc_feature: MA Experiment 20000235 PARAMETER Experiment Name: At_Siliques_P Parameter: Plant Line Value: WS
  misc_feature: MA Experiment 20000235 PARAMETER Experiment Name: At_Siliques_P Parameter: Tissue Value: 5-10mm Siliques vs. Whole Plant
  misc_feature: MA Experiment ID: 20000264 Result: Down-regulated in Transcription
  misc_feature: MA Experiment 20000264 PARAMETER Experiment Name: At_Open_Flower_P Parameter: Age (day) Value: 21
  misc_feature: MA Experiment 20000264 PARAMETER Experiment Name: At_Open_Flower_P Parameter: Plant Line Value: WS
  misc_feature: MA Experiment 20000264 PARAMETER Experiment Name: At_Open_Flower_P Parameter: Tissue Value: Open Flower vs. Whole Plant
  misc_feature: MA Experiment ID: 20000265 Result: Down-regulated in Transcription
  misc_feature: MA Experiment 20000265 PARAMETER Experiment Name: At_Open_Flower_P Parameter: Age (day) Value: 21
  misc_feature: MA Experiment 20000265 PARAMETER Experiment Name: At_Open_Flower_P Parameter: Plant Line Value: WS
  misc_feature: MA Experiment 20000265 PARAMETER Experiment Name: At_Open_Flower_P Parameter: Tissue Value: Closed Flower vs. Whole Plant
  misc_feature: MA Experiment ID: 20000268 Result: Down-regulated in Transcription
  misc_feature: MA Experiment 20000268 PARAMETER Experiment Name: At_100mM_NaCl__P Parameter: Age (day) Value: 14
  misc_feature: MA Experiment 20000268 PARAMETER Experiment Name: At_100mM_NaCl__P Parameter: Organism Value: A. thaliana
  misc_feature: MA Experiment 20000268 PARAMETER Experiment Name: At_100mM_NaCl__P Parameter: Plant Line Value: WS
  misc_feature: MA Experiment 20000268 PARAMETER Experiment Name: At_100mM_NaCl__P Parameter: Timepoint (hr) Value: 6
  misc_feature: MA Experiment 20000268 PARAMETER Experiment Name: At_100mM_NaCl__P Parameter: Tissue Value: Whole Plant
  misc_feature: MA Experiment 20000268 PARAMETER Experiment Name: At_100mM_NaCl__P Parameter: Treatment Value: 100mM NaCl vs. No Treatment
  misc_feature: MA Experiment ID: 20000308 Result: Down-regulated in Transcription
  misc_feature: MA Experiment 20000308 PARAMETER Experiment Name: At_100mM_NaCl__P Parameter: Age (day) Value: 17
  misc_feature: MA Experiment 20000308 PARAMETER Experiment Name: At_100mM_NaCl__P Parameter: Organism Value: A. thaliana
  misc_feature: MA Experiment 20000308 PARAMETER Experiment Name: At_100mM_NaCl__P Parameter: Plant Line Value: WS
  misc_feature: MA Experiment 20000308 PARAMETER Experiment Name: At_100mM_NaCl__P Parameter: Timepoint (hr) Value: 72
  misc_feature: MA Experiment 20000308 PARAMETER Experiment Name: At_100mM_NaCl__P Parameter: Tissue Value: Whole Plant
  misc_feature: MA Experiment 20000308 PARAMETER Experiment Name: At_100mM_NaCl__P Parameter: Treatment Value: 100mM NaCl vs. No Treatment
  misc_feature: MA Experiment ID: 20000437 Result: Down-regulated in Transcription
  misc_feature: MA Experiment 20000437 PARAMETER Experiment Name: At_Drought_P Parameter: Age (day) Value: 8
  misc_feature: MA Experiment 20000437 PARAMETER Experiment Name: At_Drought_P Parameter: Organism Value: A. thaliana
  misc_feature: MA Experiment 20000437 PARAMETER Experiment Name: At_Drought_P Parameter: Plant Line Value: WS
  misc_feature: MA Experiment 20000437 PARAMETER Experiment Name: At_Drought_P Parameter: Timepoint (hr) Value: 24
  misc_feature: MA Experiment 20000437 PARAMETER Experiment Name: At_Drought_P Parameter: Tissue Value: Whole Plant
  misc_feature: MA Experiment 20000437 PARAMETER Experiment Name: At_Drought_P Parameter: Treatment Value: Drought vs. No Drought
  misc_feature: MA Experiment ID: 20000439 Result: Down-regulated in Transcription
  misc_feature: MA Experiment 20000439 PARAMETER Experiment Name: At_Roots__P Parameter: Age (day) Value: 14 vs. 21
  misc_feature: MA Experiment 20000439 PARAMETER Experiment Name: At_Roots__P Parameter: Organism Value: A. thaliana
  misc_feature: MA Experiment 20000439 PARAMETER Experiment Name: At_Roots__P Parameter: Tissue Value: Roots vs. Whole Plant
  misc_feature: MA Experiment ID: 20000441 Result: Up-regulated in Transcription
  misc_feature: MA Experiment 20000441 PARAMETER Experiment Name: At_1uM_BR-BRZ__P Parameter: Tissue Value: Shoot Apices
  misc_feature: MA Experiment 20000441 PARAMETER Experiment Name: At_1uM_BR-BRZ__P Parameter: Treatment Value: 1uM BR vs. No Treatment
  misc_feature: MA Experiment ID: 20000445 Result: Up-regulated in Transcription
  misc_feature: MA Experiment 20000445 PARAMETER Experiment Name: At_100uM_NAA__P Parameter: Age (day) Value: 14
  misc_feature: MA Experiment 20000445 PARAMETER Experiment Name: At_100uM_NAA__P Parameter: Organism Value: A. thaliana
  misc_feature: MA Experiment 20000445 PARAMETER Experiment Name: At_100uM_NAA__P Parameter: Plant Line Value: WS
  misc_feature: MA Experiment 20000445 PARAMETER Experiment Name: At_100uM_NAA__P Parameter: Timepoint (hr) Value: 6
  misc_feature: MA Experiment 20000445 PARAMETER Experiment Name: At_100uM_NAA__P Parameter: Tissue Value: Aerial
  misc_feature: MA Experiment 20000445 PARAMETER Experiment Name: At_100uM_NAA__P Parameter: Treatment Value: 100uM NAA vs. No Treatment
  misc_feature: MA Experiment ID: 20000460 Result: Up-regulated in Transcription
  misc_feature: MA Experiment 20000460 PARAMETER Experiment Name: At_10percent_PEG_P Parameter: Age (day) Value: 12
  misc_feature: MA Experiment 20000460 PARAMETER Experiment Name: At_10percent_PEG_P Parameter: Organism Value: A. thaliana
  misc_feature: MA Experiment 20000460 PARAMETER Experiment Name: At_10percent_PEG_P Parameter: Plant Line Value: WS
  misc_feature: MA Experiment 20000460 PARAMETER Experiment Name: At_10percent_PEG_P Parameter: Timepoint (day) Value: 12
  misc_feature: MA Experiment 20000460 PARAMETER Experiment Name: At_10percent_PEG_P Parameter: Tissue Value: Whole Plant
  misc_feature: MA Experiment 20000460 PARAMETER Experiment Name: At_10percent_PEG_P Parameter: Treatment Value: 10percent PEG vs. No Treatment
  misc_feature: MA Experiment ID: 20000527 Result: Up-regulated in Transcription
  misc_feature: MA Experiment 20000527 PARAMETER Experiment Name: At_10percent_PEG_P Parameter: Age (day) Value: 20
  misc_feature: MA Experiment 20000527 PARAMETER Experiment Name: At_10percent_PEG_P Parameter: Organism Value: A. thaliana
  misc_feature: MA Experiment 20000527 PARAMETER Experiment Name: At_10percent_PEG_P Parameter: Plant Line Value: WS
  misc_feature: MA Experiment 20000527 PARAMETER Experiment Name: At_10percent_PEG_P Parameter: Timepoint (day) Value: 20
  misc_feature: MA Experiment 20000527 PARAMETER Experiment Name: At_10percent_PEG_P Parameter: Tissue Value: Whole Plant
  misc_feature: MA Experiment 20000527 PARAMETER Experiment Name: At_10percent_PEG_P Parameter: Treatment Value: 10percent PEG vs. No Treatment
  misc_feature: MA Experiment ID: 20000573 Result: Down-regulated in Transcription
  misc_feature: MA Experiment 20000573 PARAMETER Experiment Name: At_100uM_ABA_Mutants__P Parameter: Organism Value: A. thaliana
  misc_feature: MA Experiment 20000573 PARAMETER Experiment Name: At_100uM_ABA_Mutants__P Parameter: Plant Line Value: CS22 vs. Ler wt
  misc_feature: MA Experiment 20000573 PARAMETER Experiment Name: At_100uM_ABA_Mutants__P Parameter: Timepoint (hr) Value: N/A
  misc_feature: MA Experiment 20000573 PARAMETER Experiment Name: At_100uM_ABA_Mutants__P Parameter: Tissue Value: Whole Plant
  misc_feature: MA Experiment 20000573 PARAMETER Experiment Name: At_100uM_ABA_Mutants__P Parameter: Treatment Value: None
  misc_feature: MA Experiment ID: 20000574 Result: Down-regulated in Transcription
  misc_feature: MA Experiment 20000574 PARAMETER Experiment Name: At_100uM_ABA_Mutants__P Parameter: Organism Value: A. thaliana
  misc_feature: MA Experiment 20000574 PARAMETER Experiment Name: At_100uM_ABA_Mutants__P Parameter: Plant Line Value: CS23 vs. Ler wt
  misc_feature: MA Experiment 20000574 PARAMETER Experiment Name: At_100uM_ABA_Mutants__P Parameter: Timepoint (hr) Value: N/A
  misc_feature: MA Experiment 20000574 PARAMETER Experiment Name: At_100uM_ABA_Mutants__P Parameter: Tissue Value: Whole Plant
  misc_feature: MA Experiment 20000574 PARAMETER Experiment Name: At_100uM_ABA_Mutants__P Parameter: Treatment Value: None
  misc_feature: MA Experiment ID: 20000794 Result: Down-regulated in Transcription
  misc_feature: MA Experiment 20000794 PARAMETER Experiment Name: At_Petals_P Parameter: Age (day) Value: 23-25 days
  misc_feature: MA Experiment 20000794 PARAMETER Experiment Name: At_Petals_P Parameter: Plant Line Value: WS
  misc_feature: MA Experiment 20000794 PARAMETER Experiment Name: At_Petals_P Parameter: Tissue Value: Petals vs. Whole plant
  misc_feature: MA Experiment ID: 20001247 Result: Up-regulated in Transcription
  misc_feature: MA Experiment 20001247 PARAMETER Experiment Name: At_Far-red-induction_P Parameter: Age (day) Value: 7
  misc_feature: MA Experiment 20001247 PARAMETER Experiment Name: At_Far-red-induction_P Parameter: Light Value: Far-red vs. White
  misc_feature: MA Experiment 20001247 PARAMETER Experiment Name: At_Far-red-induction_P Parameter: Organism Value: A. thaliana
  misc_feature: MA Experiment 20001247 PARAMETER Experiment Name: At_Far-red-induction_P Parameter: Plant Line Value: Columbia
  misc_feature: MA Experiment 20001247 PARAMETER Experiment Name: At_Far-red-induction_P Parameter: Timepoint (hr) Value: 1
  misc_feature: MA Experiment 20001247 PARAMETER Experiment Name: At_Far-red-induction_P Parameter: Tissue Value: Whole Plant
  misc_feature: MA Experiment ID: 20001450 Result: Up-regulated in Transcription
  misc_feature: MA Experiment 20001450 PARAMETER Experiment Name: At_Far-red-induction_P Parameter: Age (day) Value: 7
  misc_feature: MA Experiment 20001450 PARAMETER Experiment Name: At_Far-red-induction_P Parameter: Light Value: Far-red vs. White
  misc_feature: MA Experiment 20001450 PARAMETER Experiment Name: At_Far-red-induction_P Parameter: Organism Value: A. thaliana
  misc_feature: MA Experiment 20001450 PARAMETER Experiment Name: At_Far-red-induction_P Parameter: Plant Line Value: Columbia
  misc_feature: MA Experiment 20001450 PARAMETER Experiment Name: At_Far-red-induction_P Parameter: Timepoint (hr) Value: 8
  misc_feature: MA Experiment 20001450 PARAMETER Experiment Name: At_Far-red-induction_P Parameter: Tissue Value: Whole Plant
  misc_feature: MA Experiment ID: 20001451 Result: Up-regulated in Transcription
  misc_feature: MA Experiment 20001451 PARAMETER Experiment Name: At_Far-red-induction_P Parameter: Age (day) Value: 7
  misc_feature: MA Experiment 20001451 PARAMETER Experiment Name: At_Far-red-induction_P Parameter: Light Value: Far-red vs. White
  misc_feature: MA Experiment 20001451 PARAMETER Experiment Name: At_Far-red-induction_P Parameter: Organism Value: A. thaliana
  misc_feature: MA Experiment 20001451 PARAMETER Experiment Name: At_Far-red-induction_P Parameter: Plant Line Value: Columbia
  misc_feature: MA Experiment 20001451 PARAMETER Experiment Name: At_Far-red-induction_P Parameter: Timepoint (hr) Value: 24
  misc_feature: MA Experiment 20001451 PARAMETER Experiment Name: At_Far-red-induction_P Parameter: Tissue Value: Whole Plant
  misc_feature: MA Experiment ID: 20001554 Result: Down-regulated in Transcription
  misc_feature: MA Experiment 20001554 PARAMETER Experiment Name: At_Drought_Soil_Dry_P Parameter: Age (day) Value: 21
  misc_feature: MA Experiment 20001554 PARAMETER Experiment Name: At_Drought_Soil_Dry_P Parameter: Organism Value: A. thaliana
  misc_feature: MA Experiment 20001554 PARAMETER Experiment Name: At_Drought_Soil_Dry_P Parameter: Plant Line Value: WS
  misc_feature: MA Experiment 20001554 PARAMETER Experiment Name: At_Drought_Soil_Dry_P Parameter: Post Timepoint (hr) Value: None
  misc_feature: MA Experiment 20001554 PARAMETER Experiment Name: At_Drought_Soil_Dry_P Parameter: Post-Treatment Value: None
  misc_feature: MA Experiment 20001554 PARAMETER Experiment Name: At_Drought_Soil_Dry_P Parameter: Timepoint (day) Value: 7
  misc_feature: MA Experiment 20001554 PARAMETER Experiment Name: At_Drought_Soil_Dry_P Parameter: Treatment Value: Drought vs. No Drought
  misc_feature: MA Experiment ID: 20001555 Result: Down-regulated in Transcription
  misc_feature: MA Experiment 20001555 PARAMETER Experiment Name: At_Drought_Soil_Dry_P Parameter: Age (day) Value: 24
  misc_feature: MA Experiment 20001555 PARAMETER Experiment Name: At_Drought_Soil_Dry_P Parameter: Organism Value: A. thaliana
  misc_feature: MA Experiment 20001555 PARAMETER Experiment Name: At_Drought_Soil_Dry_P Parameter: Plant Line Value: WS
  misc_feature: MA Experiment 20001555 PARAMETER Experiment Name: At_Drought_Soil_Dry_P Parameter: Post Timepoint (hr) Value: None
  misc_feature: MA Experiment 20001555 PARAMETER Experiment Name: At_Drought_Soil_Dry_P Parameter: Post-Treatment Value: None
  misc_feature: MA Experiment 20001555 PARAMETER Experiment Name: At_Drought_Soil_Dry_P Parameter: Timepoint (day) Value: 10
  misc_feature: MA Experiment 20001555 PARAMETER Experiment Name: At_Drought_Soil_Dry_P Parameter: Treatment Value: Drought vs. No Drought
  misc_feature: MA Experiment ID: 20001556 Result: Down-regulated in Transcription
  misc_feature: MA Experiment 20001556 PARAMETER Experiment Name: At_Drought_Soil_Dry_P Parameter: Age (day) Value: 26
  misc_feature: MA Experiment 20001556 PARAMETER Experiment Name: At_Drought_Soil_Dry_P Parameter: Organism Value: A. thaliana
  misc_feature: MA Experiment 20001556 PARAMETER Experiment Name: At_Drought_Soil_Dry_P Parameter: Plant Line Value: WS
  misc_feature: MA Experiment 20001556 PARAMETER Experiment Name: At_Drought_Soil_Dry_P Parameter: Post Timepoint (hr) Value: None
  misc_feature: MA Experiment 20001556 PARAMETER Experiment Name: At_Drought_Soil_Dry_P Parameter: Post-Treatment Value: None
  misc_feature: MA Experiment 20001556 PARAMETER Experiment Name: At_Drought_Soil_Dry_P Parameter: Timepoint (day) Value: 12
  misc_feature: MA Experiment 20001556 PARAMETER Experiment Name: At_Drought_Soil_Dry_P Parameter: Treatment Value: Drought vs. No Drought
  misc_feature: MA Experiment ID: 20001904 Result: Down-regulated in Transcription
  misc_feature: MA Experiment 20001904 PARAMETER Experiment Name: At_Drought_Reproduction_P Parameter: Age (day) Value: 37
  misc_feature: MA Experiment 20001904 PARAMETER Experiment Name: At_Drought_Reproduction_P Parameter: Organism Value: A. thaliana
  misc_feature: MA Experiment 20001904 PARAMETER Experiment Name: At_Drought_Reproduction_P Parameter: Plant Line Value: WS
  misc_feature: MA Experiment 20001904 PARAMETER Experiment Name: At_Drought_Reproduction_P Parameter: Timepoint (day) Value: 7
  misc_feature: MA Experiment 20001904 PARAMETER Experiment Name: At_Drought_Reproduction_P Parameter: Tissue Value: Rosettes
  misc_feature: MA Experiment 20001904 PARAMETER Experiment Name: At_Drought_Reproduction_P Parameter: Treatment Value: Drought vs. No Drought
  misc_feature: MA Experiment ID: 20001911 Result: Down-regulated in Transcription
  misc_feature: MA Experiment 20001911 PARAMETER Experiment Name: At_Drought_Reproduction_P Parameter: Age (day) Value: 40
  misc_feature: MA Experiment 20001911 PARAMETER Experiment Name: At_Drought_Reproduction_P Parameter: Organism Value: A. thaliana
  misc_feature: MA Experiment 20001911 PARAMETER Experiment Name: At_Drought_Reproduction_P Parameter: Plant Line Value: WS
  misc_feature: MA Experiment 20001911 PARAMETER Experiment Name: At_Drought_Reproduction_P Parameter: Timepoint (day) Value: 10
  misc_feature: MA Experiment 20001911 PARAMETER Experiment Name: At_Drought_Reproduction_P Parameter: Tissue Value: Flowers
  misc_feature: MA Experiment 20001911 PARAMETER Experiment Name: At_Drought_Reproduction_P Parameter: Treatment Value: Drought vs. No Drought
atgtactaagcacattttctttttctggtatagggtttacgtaaaacatgcgacaacgacaaagattgccggaaaactagccggaacttaggggagctaggtgagaccagcggcggttccatcctcgtgagtaaagcagtgatcgtcggtccgttcaaatccgacaacttcacaaccatcaccgatgctattgcagccgcacctaataacactagaccagaggatggttactttgttatctacgcaagagaaggtgtctatgaagaatatattgttgttcccatcaacaaaaagaacttaatgcttatgggagatgggatcaataagacgattattacagggaaccataatgttgttgatggttggactacgtataattgctcgagcttcgctgtggttggagagcggttcatggcggttgatgttacattcagaaacacagccggacctgaaaaacatcaggcagtggctttgaggaacaatgcggaaggatcaagtttttatcggtgtagttttgaaggctatcaagatactctctacgtccattctcttagacaattctatcgcgaatgcgatatatatggtaccgtcgattttatattcggaaatgcagccgcaatttttcaaaactgcaacatatatgctcgaaaaccgatggccaagcaaaagaacgcaataacagcgcatggaagactcgatccaaaccagaataccggaatctctatcatcaattgtacaataaaagccgccccagatcttgcagctgagcctaaatctgccatgacattcttagggagaccgtggaagccatactcaaggacggttttcatgcaatcatacattagtgacattgttcaaccagtcggatggctcgaatggaacggtacaattggactagacacaatctactacggtgagtatagtaactttggaccaggtgctaacacgaaccagagagtgcagtggttagggtacaatttattgaacttggcagaagccatgaacttcacggtctacaacttcaccatgggagatacatggttgcctcaaaccgatattcctttctatggtggtttgcttagcaaagaatgaaattgatgaacaacatattatatgtaaacatatttaattatacgtacttcctcatttaaaaaataaatcaagaaattttcatttgttctagttgttgggacgagtcaatgggagtggttctcatgtaaatctagacgtgcttctaactttatttattgcttcagataaccaataaagctaagttttgatgcc

SEQ ID NO: 101408 - protein, 263 aa, Arabidopsis thaliana
  peptide (1)..(263): Ceres Seq. ID no. 13607789
  misc_feature (1)..(245): Pfam Name: Pectinesterase Pfam Description: Pectinesterase
  misc_feature (1)..(263): Homolog of NCBI NO: 6630558 NR Description: putative pectinesterase [Arabidopsis thaliana]
  misc_feature (1)..(263): Homolog of NCBI NO: 30681457 NR Description: pectinesterase, putative [Arabidopsis thaliana]
  misc_feature (1)..(263): Homolog of NCBI NO: 15238378 NR Description: pectinesterase, putative [Arabidopsis thaliana]
  misc_feature (1)..(263): Homolog of NCBI NO: 18398974 NR Description: pectinesterase, putative [Arabidopsis thaliana]
  misc_feature (1)..(263): Homolog of NCBI NO: 21618192 NR Description: putative pectinesterase [Arabidopsis thaliana]
  misc_feature (1)..(261): Homolog of NCBI NO: 18411914 NR Description: expressed protein [Arabidopsis thaliana]
  misc_feature (1)..(261): Homolog of NCBI NO: 19424045 NR Description: unknown protein [Arabidopsis thaliana]
  misc_feature (1)..(261): Homolog of NCBI NO: 18379010 NR Description: pectinesterase family [Arabidopsis thaliana]
  misc_feature (1)..(259): Homolog of NCBI NO: 34894528 NR Description: putative pectinesterase [Oryza sativa (japonica group)] >gi|20805092|dbj|BAB92764.1| putative pectinesterase
  misc_feature (1)..(261): Homolog of NCBI NO: 18407388 NR Description: pectinesterase family [Arabidopsis thaliana]
MLMGDGINKTIITGNHNVVDGWTTYNCSSFAVVGERFMAVDVTFRNTAGPEKHQAVALRNNAEGSSFYRCSFEGYQDTLYVHSLRQFYRECDIYGTVDFIFGNAAAIFQNCNIYARKPMAKQKNAITAHGRLDPNQNTGISIINCTIKAAPDLAAEPKSAMTFLGRPWKPYSRTVFMQSYISDIVQPVGWLEWNGTIGLDTIYYGEYSNFGPGANTNQRVQWLGYNLLNLAEAMNFTVYNFTMGDTWLPQTDIPFYGGLLSKE

SEQ ID NO: 101409 - protein, 261 aa, Arabidopsis thaliana
  peptide (1)..(261): Ceres Seq. ID no. 13607790
  misc_feature (1)..(243): Pfam Name: Pectinesterase Pfam Description: Pectinesterase
  misc_feature (1)..(261): Homolog of NCBI NO: 6630558 NR Description: putative pectinesterase [Arabidopsis thaliana]
  misc_feature (1)..(261): Homolog of NCBI NO: 30681457 NR Description: pectinesterase, putative [Arabidopsis thaliana]
  misc_feature (1)..(261): Homolog of NCBI NO: 15238378 NR Description: pectinesterase, putative [Arabidopsis thaliana]
  misc_feature (1)..(261): Homolog of NCBI NO: 18398974 NR Description: pectinesterase, putative [Arabidopsis thaliana]
  misc_feature (1)..(261): Homolog of NCBI NO: 21618192 NR Description: putative pectinesterase [Arabidopsis thaliana]
  misc_feature (1)..(259): Homolog of NCBI NO: 18411914 NR Description: expressed protein [Arabidopsis thaliana]
  misc_feature (1)..(259): Homolog of NCBI NO: 19424045 NR Description: unknown protein [Arabidopsis thaliana]
  misc_feature (1)..(259): Homolog of NCBI NO: 18379010 NR Description: pectinesterase family [Arabidopsis thaliana]
  misc_feature (1)..(257): Homolog of NCBI NO: 34894528 NR Description: putative pectinesterase [Oryza sativa (japonica group)] >gi|20805092|dbj|BAB92764.1| putative pectinesterase
  misc_feature (1)..(259): Homolog of NCBI NO: 18407388 NR Description: pectinesterase family [Arabidopsis thaliana]
MGDGINKTIITGNHNVVDGWTTYNCSSFAVVGERFMAVDVTFRNTAGPEKHQAVALRNNAEGSSFYRCSFEGYQDTLYVHSLRQFYRECDIYGTVDFIFGNAAAIFQNCNIYARKPMAKQKNAITAHGRLDPNQNTGISIINCTIKAAPDLAAEPKSAMTFLGRPWKPYSRTVFMQSYISDIVQPVGWLEWNGTIGLDTIYYGEYSNFGPGANTNQRVQWLGYNLLNLAEAMNFTVYNFTMGDTWLPQTDIPFYGGLLSKE

SEQ ID NO: 101410 - protein, 226 aa, Arabidopsis thaliana
  peptide (1)..(226): Ceres Seq. ID no. 13607791
  misc_feature (1)..(208): Pfam Name: Pectinesterase Pfam Description: Pectinesterase
  misc_feature (1)..(226): Homolog of NCBI NO: 6630558 NR Description: putative pectinesterase [Arabidopsis thaliana]
  misc_feature (1)..(226): Homolog of NCBI NO: 30681457 NR Description: pectinesterase, putative [Arabidopsis thaliana]
  misc_feature (1)..(226): Homolog of NCBI NO: 15238378 NR Description: pectinesterase, putative [Arabidopsis thaliana]
  misc_feature (1)..(226): Homolog of NCBI NO: 18398974 NR Description: pectinesterase, putative [Arabidopsis thaliana]
  misc_feature (1)..(226): Homolog of NCBI NO: 21618192 NR Description: putative pectinesterase [Arabidopsis thaliana]
  misc_feature (1)..(224): Homolog of NCBI NO: 18411914 NR Description: expressed protein [Arabidopsis thaliana]
  misc_feature (1)..(224): Homolog of NCBI NO: 19424045 NR Description: unknown protein [Arabidopsis thaliana]
  misc_feature (1)..(224): Homolog of NCBI NO: 18379010 NR Description: pectinesterase family [Arabidopsis thaliana]
  misc_feature (1)..(222): Homolog of NCBI NO: 34894528 NR Description: putative pectinesterase [Oryza sativa (japonica group)] >gi|20805092|dbj|BAB92764.1| putative pectinesterase
  misc_feature (1)..(224): Homolog of NCBI NO: 18407388 NR Description: pectinesterase family [Arabidopsis thaliana]
MAVDVTFRNTAGPEKHQAVALRNNAEGSSFYRCSFEGYQDTLYVHSLRQFYRECDIYGTVDFIFGNAAAIFQNCNIYARKPMAKQKNAITAHGRLDPNQNTGISIINCTIKAAPDLAAEPKSAMTFLGRPWKPYSRTVFMQSYISDIVQPVGWLEWNGTIGLDTIYYGEYSNFGPGANTNQRVQWLGYNLLNLAEAMNFTVYNFTMGDTWLPQTDIPFYGGLLSKE

SEQ ID NO: 101411 - DNA, 1445 bp, Arabidopsis thaliana
  misc_feature (1)..(1445): Ceres Seq. ID no. 13607801
  misc_feature: MA Experiment ID: 108595 Result: Down-regulated in Transcription
  misc_feature: MA Experiment 108595 PARAMETER Experiment Name: At_Ler-pi_Ovule_cDNA_P Parameter: Plant Line Value: null
  misc_feature: MA Experiment ID: 20000173 Result: Down-regulated in Transcription
  misc_feature: MA Experiment 20000173 PARAMETER Experiment Name: At_42deg_Heat_P Parameter: Age (day) Value: 14
  misc_feature: MA Experiment 20000173 PARAMETER Experiment Name: At_42deg_Heat_P Parameter: Organism Value: A. thaliana
  misc_feature: MA Experiment 20000173 PARAMETER Experiment Name: At_42deg_Heat_P Parameter: Plant Line Value: WS
  misc_feature: MA Experiment 20000173 PARAMETER Experiment Name: At_42deg_Heat_P Parameter: Temperature (deg C) Value: 42 vs. 22
  misc_feature: MA Experiment 20000173 PARAMETER Experiment Name: At_42deg_Heat_P Parameter: Timepoint (hr) Value: 6
  misc_feature: MA Experiment 20000173 PARAMETER Experiment Name: At_42deg_Heat_P Parameter: Tissue Value: Aerial
ggagaagctattctcagattcacgacaccagttcgtcacaagcttcgagcccagctcggaaaacaaaattggaacttgctgcataaagtttagtttttttattgaatttggaaggatgattgggaatccagtaattcaagttccatcatcactaatgccatcatcctccatgattgcttgtcctcgagtttcacccaatggggttccttatcttccaccaaaacctagaactaggcatttagtggtcagagctgcatccaattccgatgctgctcatggtcaaccatcgtctgatggggggaagaatcctctcaccgttgttttggatgtgcccaggaatatatggagacagactttaaaacctttgagtgattttgggtttggtaagagaagtatttgggaaggtggtgttggtttgtttattgtctctggagctactcttcttgctcttagctgggcttggttgcgaggttttcaaatgcggtcgaagtttaggaaatatcagactgtgtttgagcttagtcatgcttctggtatttgcacgggaacaccggttaggatccgtggggttactgttggtacgattatccgtgttaatccttccttgaagaatattgaagctgttgctgagatagaagatgataagattattatcccgaggaattcattggttgaggtgaatcagtctggtcttctaatggaaactatgatcgacattatgcctaggaatccgataccagaaccttcagtaggacctctgcatcctgaatgtggtaaggaaggtctgatcgtttgtgataggcagacaataaaaggagtgcaaggagttagtttagatgaattagttggaattttcactcgtattggacgcgaagttgaggccattggtgttgccaatacgtattcgcttgctgagagagctgcttcggttattgaggaagcaaggccattgctcaaaaagattcaagccatggctgaagatgctcaacctttgctctctgagtttcgtgatagcggcttgctcaaggaagttgagtgtcttactcgaagccttacccaagcttctgacgatttgagaaaggttaattcgtcaattatgactcctgagaatacagaactcatacagaagtcaatctacactctggtttatactttgaagaacgtcgagagtataagctcagatattctgggattcacaggagatgaagccacaagaaaaaaccttaaactactcatcaaatccctaagcaggctactatgatcagcctgtagattttagactggataaataaaatccagaattttatggtaagcaagttttaaaaattcgaaaaatgtgttgtttcttctttagagttatttttgttttcgttttgtgttctgagattggggtttaatggagagacataattcagtttttataagaacaaaaatgtttgtttctc

SEQ ID NO: 101412 - protein, 419 aa, Arabidopsis thaliana
  peptide (1)..(419): Ceres Seq. ID no. 13607802
  misc_feature (137)..(273): Pfam Name: mce related protein Pfam Description: mce related protein
  misc_feature (39)..(419): Homolog of NCBI NO: 18402572 NR Description: expressed protein [Arabidopsis thaliana] dbj|BAA17049.1~gene_id:MQC12.6~similar to unknown protein thaliana] >gi|15081676|gb|AAK82493.1| AT3g20320/MQC12_7
  misc_feature (57)..(419): Homolog of NCBI NO: 21553847 NR Description: unknown [Arabidopsis thaliana]
  misc_feature (53)..(419): Homolog of NCBI NO: 34906054 NR Description: P0698H10.22 [Oryza sativa (japonica
  misc_feature (130)..(406): Homolog of NCBI NO: 23043318 NR Description: hypothetical protein [Trichodesmium erythraeum
  misc_feature (123)..(416): Homolog of NCBI NO: 23128989 NR Description: hypothetical protein [Nostoc punctiforme]
  misc_feature (130)..(416): Homolog of NCBI NO: 22299950 NR Description: ORF_ID:tll2407~hypothetical protein
  misc_feature (129)..(416): Homolog of NCBI NO: 17227677 NR Description: hypothetical protein [Nostoc sp. PCC 7120]
  misc_feature (129)..(351): Homolog of NCBI NO: 37523684 NR Description: hypothetical protein glr4115 [Gloeobacter
  misc_feature (322)..(419): Homolog of NCBI NO: 37523684 NR Description: hypothetical protein glr4115 [Gloeobacter
  misc_feature (130)..(395): Homolog of NCBI NO: 16329641 NR Description: hypothetical protein [Synechocystis sp. PCC 6803]
EKLFSDSRHQFVTSFEPSSENKIGTCCIKFSFFIEFGRMIGNPVIQVPSSLMPSSSMIACPRVSPNGVPYLPPKPRTRHLVVRAASNSDAAHGQPSSDGGKNPLTVVLDVPRNIWRQTLKPLSDFGFGKRSIWEGGVGLFIVSGATLLALSWAWLRGFQMRSKFRKYQTVFELSHASGICTGTPVRIRGVTVGTIIRVNPSLKNIEAVAEIEDDKIIIPRNSLVEVNQSGLLMETMIDIMPRNPIPEPSVGPLHPECGKEGLIVCDRQTIKGVQGVSLDELVGIFTRIGREVEAIGVANTYSLAERAASVIEEARPLLKKIQAMAEDAQPLLSEFRDSGLLKEVECLTRSLTQASDDLRKVNSSIMTPENTELIQKSIYTLVYTLKNVESISSDILGFTGDEATRKNLKLLIKSLSRLL

SEQ ID NO: 101413 - protein, 381 aa, Arabidopsis thaliana; identical to SEQ ID NO: 30312
  peptide (1)..(381): Ceres Seq. ID no. 13607803
  misc_feature (99)..(235): Pfam Name: mce related protein Pfam Description: mce related protein
  misc_feature (1)..(381): Homolog of NCBI NO: 18402572 NR Description: expressed protein [Arabidopsis thaliana] dbj|BAA17049.1~gene_id:MQC12.6~similar to unknown protein thaliana] >gi|15081676|gb|AAK82493.1| AT3g20320/MQC12_7
  misc_feature (19)..(381): Homolog of NCBI NO: 21553847 NR Description: unknown [Arabidopsis thaliana]
  misc_feature (15)..(381): Homolog of NCBI NO: 34906054 NR Description: P0698H10.22 [Oryza sativa (japonica
  misc_feature (92)..(368): Homolog of NCBI NO: 23043318 NR Description: hypothetical protein [Trichodesmium erythraeum
  misc_feature (85)..(378): Homolog of NCBI NO: 23128989 NR Description: hypothetical protein [Nostoc punctiforme]
  misc_feature (92)..(378): Homolog of NCBI NO: 22299950 NR Description: ORF_ID:tll2407~hypothetical protein
  misc_feature (91)..(378): Homolog of NCBI NO: 17227677 NR Description: hypothetical protein [Nostoc sp. PCC 7120]
  misc_feature (91)..(313): Homolog of NCBI NO: 37523684 NR Description: hypothetical protein glr4115 [Gloeobacter
  misc_feature (284)..(381): Homolog of NCBI NO: 37523684 NR Description: hypothetical protein glr4115 [Gloeobacter
  misc_feature (92)..(357): Homolog of NCBI NO: 16329641 NR Description: hypothetical protein [Synechocystis sp. PCC 6803]

SEQ ID NO: 101414 - protein, 368 aa, Arabidopsis thaliana; identical to SEQ ID NO: 30313
  peptide (1)..(368): Ceres Seq. ID no. 13607804
  misc_feature (86)..(222): Pfam Name: mce related protein Pfam Description: mce related protein
  misc_feature (1)..(368): Homolog of NCBI NO: 18402572 NR Description: expressed protein [Arabidopsis thaliana] dbj|BAA17049.1~gene_id:MQC12.6~similar to unknown protein thaliana] >gi|15081676|gb|AAK82493.1| AT3g20320/MQC12_7
  misc_feature (6)..(368): Homolog of NCBI NO: 21553847 NR Description: unknown [Arabidopsis thaliana]
  misc_feature (2)..(368): Homolog of NCBI NO: 34906054 NR Description: P0698H10.22 [Oryza sativa (japonica
  misc_feature (79)..(355): Homolog of NCBI NO: 23043318 NR Description: hypothetical protein [Trichodesmium erythraeum
  misc_feature (72)..(365): Homolog of NCBI NO: 23128989 NR Description: hypothetical protein [Nostoc punctiforme]
  misc_feature (79)..(365): Homolog of NCBI NO: 22299950 NR Description: ORF_ID:tll2407~hypothetical protein
  misc_feature (78)..(365): Homolog of NCBI NO: 17227677 NR Description: hypothetical protein [Nostoc sp. PCC 7120]
  misc_feature (78)..(300): Homolog of NCBI NO: 37523684 NR Description: hypothetical protein glr4115 [Gloeobacter
  misc_feature (271)..(368): Homolog of NCBI NO: 37523684 NR Description: hypothetical protein glr4115 [Gloeobacter
  misc_feature (79)..(344): Homolog of NCBI NO: 16329641 NR Description: hypothetical protein [Synechocystis sp. PCC 6803]

SEQ ID NO: 101415 - DNA, 1897 bp, Arabidopsis thaliana
  misc_feature (1)..(1897): Ceres Seq. ID no. 13607813
  misc_feature: MA Experiment ID: 20000173 Result: Down-regulated in Transcription
  misc_feature: MA Experiment 20000173 PARAMETER Experiment Name: At_42deg_Heat_P Parameter: Age (day) Value: 14
  misc_feature: MA Experiment 20000173 PARAMETER Experiment Name: At_42deg_Heat_P Parameter: Organism Value: A. thaliana
  misc_feature: MA Experiment 20000173 PARAMETER Experiment Name: At_42deg_Heat_P Parameter: Plant Line Value: WS
  misc_feature: MA Experiment 20000173 PARAMETER Experiment Name: At_42deg_Heat_P Parameter: Temperature (deg C) Value: 42 vs. 22
  misc_feature: MA Experiment 20000173 PARAMETER Experiment Name: At_42deg_Heat_P Parameter: Timepoint (hr) Value: 6
  misc_feature: MA Experiment 20000173 PARAMETER Experiment Name: At_42deg_Heat_P Parameter: Tissue Value: Aerial
  misc_feature: MA Experiment ID: 20000180 Result: Up-regulated in Transcription
  misc_feature: MA Experiment 20000180 PARAMETER Experiment Name: At_Germinating_Seeds_P Parameter: Age (hr) Value: 24 vs. 0
  misc_feature: MA Experiment 20000180 PARAMETER Experiment Name: At_Germinating_Seeds_P Parameter: Tissue Value: Germinating Seeds
  misc_feature: MA Experiment ID: 20000182 Result: Up-regulated in Transcription
  misc_feature: MA Experiment 20000182 PARAMETER Experiment Name: At_2mM_SA_P Parameter: Age (day) Value: 14
  misc_feature: MA Experiment 20000182 PARAMETER Experiment Name: At_2mM_SA_P Parameter: Organism Value: A. thaliana
  misc_feature: MA Experiment 20000182 PARAMETER Experiment Name: At_2mM_SA_P Parameter: Plant Line Value: WS
  misc_feature: MA Experiment 20000182 PARAMETER Experiment Name: At_2mM_SA_P Parameter: Timepoint (hr) Value: 6
  misc_feature: MA Experiment 20000182 PARAMETER Experiment Name: At_2mM_SA_P Parameter: Tissue Value: Aerial
  misc_feature: MA Experiment 20000182 PARAMETER Experiment Name: At_2mM_SA_P Parameter: Treatment Value: 2mM SA vs. No Treatment
  misc_feature: MA Experiment ID: 20000184 Result: Down-regulated in Transcription
  misc_feature: MA Experiment 20000184 PARAMETER Experiment Name: At_Shoots__P Parameter: Age (day) Value: 7
  misc_feature: MA Experiment 20000184 PARAMETER Experiment Name: At_Shoots__P Parameter: Tissue Value: Shoots vs. Whole Plant
  misc_feature: MA Experiment ID: 20000185 Result: Up-regulated in Transcription
  misc_feature: MA Experiment 20000185 PARAMETER Experiment Name: At_Roots__P Parameter: Age (day) Value: 7 vs. 21
  misc_feature: MA Experiment 20000185 PARAMETER Experiment Name: At_Roots__P Parameter: Organism Value: A. thaliana
  misc_feature: MA Experiment 20000185 PARAMETER Experiment Name: At_Roots__P Parameter: Tissue Value: Roots vs. Whole Plant
  misc_feature: MA Experiment ID: 20000438 Result: Down-regulated in Transcription
  misc_feature: MA Experiment 20000438 PARAMETER Experiment Name: At_Shoots__P Parameter: Age (day) Value: 14
  misc_feature: MA Experiment 20000438 PARAMETER Experiment Name: At_Shoots__P Parameter: Tissue Value: Shoots vs. Whole Plant
  misc_feature: MA Experiment ID: 20000439 Result: Up-regulated in Transcription
  misc_feature: MA Experiment 20000439 PARAMETER Experiment Name: At_Roots__P Parameter: Age (day) Value: 14 vs. 21
  misc_feature: MA Experiment 20000439 PARAMETER Experiment Name: At_Roots__P Parameter: Organism Value: A. thaliana
  misc_feature: MA Experiment 20000439 PARAMETER Experiment Name: At_Roots__P Parameter: Tissue Value: Roots vs. Whole Plant
  misc_feature: MA Experiment ID: 20000453 Result: Up-regulated in Transcription
  misc_feature: MA Experiment 20000453 PARAMETER Experiment Name: At_100uM_ABA_P Parameter: Age (day) Value: 15
  misc_feature: MA Experiment 20000453 PARAMETER Experiment Name: At_100uM_ABA_P Parameter: Organism Value: A. thaliana
  misc_feature: MA Experiment 20000453 PARAMETER Experiment Name: At_100uM_ABA_P Parameter: Plant Line Value: WS
  misc_feature: MA Experiment 20000453 PARAMETER Experiment Name: At_100uM_ABA_P Parameter: Timepoint (hr) Value: 24
  misc_feature: MA Experiment 20000453 PARAMETER Experiment Name: At_100uM_ABA_P Parameter: Tissue Value: Aerial
  misc_feature: MA Experiment 20000453 PARAMETER Experiment Name: At_100uM_ABA_P Parameter: Treatment Value: 100uM ABA vs. No Treatment
  misc_feature: MA Experiment ID: 20000527 Result: Down-regulated in Transcription
  misc_feature: MA Experiment 20000527 PARAMETER Experiment Name: At_10percent_PEG_P Parameter: Age (day) Value: 20
  misc_feature: MA Experiment 20000527 PARAMETER Experiment Name: At_10percent_PEG_P Parameter: Organism Value: A. thaliana
  misc_feature: MA Experiment 20000527 PARAMETER Experiment Name: At_10percent_PEG_P Parameter: Plant Line Value: WS
  misc_feature: MA Experiment 20000527 PARAMETER Experiment Name: At_10percent_PEG_P Parameter: Timepoint (day) Value: 20
  misc_feature: MA Experiment 20000527 PARAMETER Experiment Name: At_10percent_PEG_P Parameter: Tissue Value: Whole Plant
  misc_feature: MA Experiment 20000527 PARAMETER Experiment Name: At_10percent_PEG_P Parameter: Treatment Value: 10percent PEG vs. No Treatment
  misc_feature: MA Experiment ID: 20000574 Result: Up-regulated in Transcription
  misc_feature: MA Experiment 20000574 PARAMETER Experiment Name: At_100uM_ABA_Mutants__P Parameter: Organism Value: A. thaliana
  misc_feature: MA Experiment 20000574 PARAMETER Experiment Name: At_100uM_ABA_Mutants__P Parameter: Plant Line Value: CS23 vs. Ler wt
  misc_feature: MA Experiment 20000574 PARAMETER Experiment Name: At_100uM_ABA_Mutants__P Parameter: Timepoint (hr) Value: N/A
  misc_feature: MA Experiment 20000574 PARAMETER Experiment Name: At_100uM_ABA_Mutants__P Parameter: Tissue Value: Whole Plant
  misc_feature: MA Experiment 20000574 PARAMETER Experiment Name: At_100uM_ABA_Mutants__P Parameter: Treatment Value: None
  misc_feature: MA Experiment ID: 20001248 Result: Down-regulated in Transcription
  misc_feature: MA Experiment 20001248 PARAMETER Experiment Name: At_Far-red-induction_P Parameter: Age (day) Value: 7
  misc_feature: MA Experiment 20001248 PARAMETER Experiment Name: At_Far-red-induction_P Parameter: Light Value: Far-red vs. White
  misc_feature: MA Experiment 20001248 PARAMETER Experiment Name: At_Far-red-induction_P Parameter: Organism Value: A. thaliana
  misc_feature: MA Experiment 20001248 PARAMETER Experiment Name: At_Far-red-induction_P Parameter: Plant Line Value: Columbia
  misc_feature: MA Experiment 20001248 PARAMETER Experiment Name: At_Far-red-induction_P Parameter: Timepoint (hr) Value: 4
  misc_feature: MA Experiment 20001248 PARAMETER Experiment Name: At_Far-red-induction_P Parameter: Tissue Value: Whole Plant
  misc_feature: MA Experiment ID: 20001450 Result: Down-regulated in Transcription
  misc_feature: MA Experiment 20001450 PARAMETER Experiment Name: At_Far-red-induction_P Parameter: Age (day) Value: 7
  misc_feature: MA Experiment 20001450 PARAMETER Experiment Name: At_Far-red-induction_P Parameter: Light Value: Far-red vs. White
  misc_feature: MA Experiment 20001450 PARAMETER Experiment Name: At_Far-red-induction_P Parameter: Organism Value: A. thaliana
  misc_feature: MA Experiment 20001450 PARAMETER Experiment Name: At_Far-red-induction_P Parameter: Plant Line Value: Columbia
  misc_feature: MA Experiment 20001450 PARAMETER Experiment Name: At_Far-red-induction_P Parameter: Timepoint (hr) Value: 8
  misc_feature: MA Experiment 20001450 PARAMETER Experiment Name: At_Far-red-induction_P Parameter: Tissue Value: Whole Plant
  misc_feature: MA Experiment ID: 20001451 Result: Down-regulated in Transcription
  misc_feature: MA Experiment 20001451 PARAMETER Experiment Name: At_Far-red-induction_P Parameter: Age (day) Value: 7
  misc_feature: MA Experiment 20001451 PARAMETER Experiment Name: At_Far-red-induction_P Parameter: Light Value: Far-red vs. White
  misc_feature: MA Experiment 20001451 PARAMETER Experiment Name: At_Far-red-induction_P Parameter: Organism Value: A. thaliana
  misc_feature: MA Experiment 20001451 PARAMETER Experiment Name: At_Far-red-induction_P Parameter: Plant Line Value: Columbia
  misc_feature: MA Experiment 20001451 PARAMETER Experiment Name: At_Far-red-induction_P Parameter: Timepoint (hr) Value: 24
  misc_feature: MA Experiment 20001451 PARAMETER Experiment Name: At_Far-red-induction_P Parameter: Tissue Value: Whole Plant
  misc_feature: MA Experiment ID: 20001554 Result: Up-regulated in Transcription
  misc_feature: MA Experiment 20001554 PARAMETER Experiment Name: At_Drought_Soil_Dry_P Parameter: Age (day) Value: 21
  misc_feature: MA Experiment 20001554 PARAMETER Experiment Name: At_Drought_Soil_Dry_P Parameter: Organism Value: A. thaliana
  misc_feature: MA Experiment 20001554 PARAMETER Experiment Name: At_Drought_Soil_Dry_P Parameter: Plant Line Value: WS
  misc_feature: MA Experiment 20001554 PARAMETER Experiment Name: At_Drought_Soil_Dry_P Parameter: Post Timepoint (hr) Value: None
  misc_feature: MA Experiment 20001554 PARAMETER Experiment Name: At_Drought_Soil_Dry_P Parameter: Post-Treatment Value: None
  misc_feature: MA Experiment 20001554 PARAMETER Experiment Name: At_Drought_Soil_Dry_P Parameter: Timepoint (day) Value: 7
  misc_feature: MA Experiment 20001554 PARAMETER Experiment Name: At_Drought_Soil_Dry_P Parameter: Treatment Value: Drought vs. No Drought
  misc_feature: MA Experiment ID: 20001558 Result: Down-regulated in Transcription
  misc_feature: MA Experiment 20001558 PARAMETER Experiment Name: At_Drought_Soil_Dry_P Parameter: Age (day) Value: 27
  misc_feature: MA Experiment 20001558 PARAMETER Experiment Name: At_Drought_Soil_Dry_P Parameter: Organism Value: A. thaliana
  misc_feature: MA Experiment 20001558 PARAMETER Experiment Name: At_Drought_Soil_Dry_P Parameter: Plant Line Value: WS
  misc_feature: MA Experiment 20001558 PARAMETER Experiment Name: At_Drought_Soil_Dry_P Parameter: Post Timepoint (hr) Value: 6
  misc_feature: MA Experiment 20001558 PARAMETER Experiment Name: At_Drought_Soil_Dry_P Parameter: Post-Treatment Value: Re-Water vs. No Drought
  misc_feature: MA Experiment 20001558 PARAMETER Experiment Name: At_Drought_Soil_Dry_P Parameter: Timepoint (day) Value: 13
  misc_feature: MA Experiment 20001558 PARAMETER Experiment Name: At_Drought_Soil_Dry_P Parameter: Treatment Value: Drought vs. No Drought
atggtgctccaacaacaaacgcattttctcacaaagaagatagatcaagaagacgaagaagaagaaccttctcatgatttcattttccgatctaagcttcctgatatcttcatccctaaccacctccctctcaccgattacgtcttccaaaggttctccggcgatggcgacggagattcctcaacaacctgtatcatcgacggtgccactggccgtattttgacctacgccgatgtacaaaccaacatgcggaggatagctgccggaatccaccggctcgggatccgccacggagacgtcgtaatgcttctcctcccgaactcgccggagtttgctctgtcttttcttgccgttgcttaccttggagccgtttccactaccgcgaatccgttctacactcagccggagatcgctaaacaggctaaagcctccgccgcgaagatgatcatcacgaagaaatgtttagtcgataaactaacaaacctcaaaaacgacggcgttttgatcgtttgcctagacgatgacggtgacaacggcgttgtttcgtcgagtgatgatggttgcgtgagtttcacggaactgactcaagcggacgaaacagaacttctaaaacctaaaatatcgccggaagacacggtggcgatgccgtactcttccggaacaacgggacttccaaagggagtgatgattactcacaagggtttagttacaagcatcgctcagaaagtcgacggagaaaaccctaaccttaacttcacggccaatgacgtcatcctctgttttctcccaatgtttcacatttacgctctcgacgcgttgatgctttcggcgatgagaaccggtgcagcgttactgatcgtgccgaggttcgagttgaatctggtgatggagctgattcaaaggtacaaagtcacggttgtgccggtggctcctccggtggttttagcattcattaaatcccctgagacggagagatacgacttgagctcggtgagaattatgctatcaggtgcagctacactaaagaaggagcttgaagacgccgtgcgactcaagtttcctaatgccatttttggtcagggttatggaatgaccgagtccggaacggtagctaagtcattagcgtttgcaaagaacccatttaaaaccaagtccggtgcatgtgggactgtgatcagaaacgccgagatgaaagtggtcgataccgaaaccggaatctccttgccgcgcaacaaatctggcgagatctgcgtccgaggtcatcagctcatgaaaggttatttgaatgatccggaagctactgcacgaaccatagacaaagacgggtggttacatacaggagatattgggtttgtggatgatgatgatgagatcttcattgttgatcggttgaaggaactgatcaaattcaaaggctaccaagtggctccagctgagcttgaagcattgcttatttctcatccttctatcgatgatgccgcagttgttgcaatgaaggatgaagtagctgatgaggttccagtagcatttgtagcaagatctcaagggtctcagttaactgaagatgatgtcaagagttacgtaaacaaacaggtggttcactacaagcggattaagatggtgtttttcatagaagttataccaaaagcagtttcgggcaagattctgaggaaggatctgcgagctaaattggaaaccatgtgctctaaatagacacaagagagtttcaaatgtatgtgtaaattcgaacattatagtctctaagaagtaaggagtaagaagcaagtatttggtatttgatttggttttcacgagatcaatcatgtaaagtcaacaaatctaggaaacctaaagctaagctaccctcagaaacataaattcatttcctataatcatc

SEQ ID NO: 101416 - protein, 570 aa, Arabidopsis thaliana
  peptide (1)..(570): Ceres Seq. ID no. 13607814
  misc_feature (75)..(495): Pfam Name: AMP-binding enzyme Pfam Description: AMP-binding enzyme
  misc_feature (1)..(570): Homolog of NCBI NO: 9280225 NR Description: 4-coumarate:CoA ligase [Arabidopsis thaliana]
  misc_feature (1)..(570): Homolog of NCBI NO: 29888158 NR Description: 4-coumarate-CoA ligase-like protein [Arabidopsis
  misc_feature (83)..(570): Homolog of NCBI NO: 22331239 NR Description: 4-coumarate:CoA ligase (4-coumaroyl-CoA synthase) putative [Arabidopsis thaliana] >gi|20465258|gb|AAM19949.1| [Arabidopsis thaliana] >gi|23308423|gb|AAN18181.1|
  misc_feature (14)..(564): Homolog of NCBI NO: 15232507 NR Description: 4-coumarate:CoA ligase 2 (4-coumaroyl-CoA
  misc_feature (14)..(564): Homolog of NCBI NO: 12229665 NR Description: 4-coumarate--CoA ligase 2 (4CL 2)
  misc_feature (17)..(564): Homolog of NCBI NO: 15218002 NR Description: 4-coumarate:CoA ligase 1 (4-coumaroyl-CoA
  misc_feature (19)..(564): Homolog of NCBI NO: 12229632 NR Description: 4-coumarate--CoA ligase 2 (4CL 2)
  misc_feature (18)..(564): Homolog of NCBI NO: 9651915 NR Description: 4-coumarate:coA ligase 2 [Rubus idaeus]
  misc_feature (20)..(564): Homolog of NCBI NO: 7428495 NR Description: 4-coumarate-CoA ligase (EC 6.2.1.12) - common
  misc_feature (20)..(564): Homolog of NCBI NO: 12229631 NR Description: 4-coumarate--CoA ligase 1 (4CL 1)
MVLQQQTHFLTKKIDQEDEEEEPSHDFIFRSKLPDIFIPNHLPLTDYVFQRFSGDGDGDSSTTCIIDGATGRILTYADVQTNMRRIAAGIHRLGIRHGDVVMLLLPNSPEFALSFLAVAYLGAVSTTANPFYTQPEIAKQAKASAAKMIITKKCLVDKLTNLKNDGVLIVCLDDDGDNGVVSSSDDGCVSFTELTQADETELLKPKISPEDTVAMPYSSGTTGLPKGVMITHKGLVTSIAQKVDGENPNLNFTANDVILCFLPMFHIYALDALMLSAMRTGAALLIVPRFELNLVMELIQRYKVTVVPVAPPVVLAFIKSPETERYDLSSVRIMLSGAATLKKELEDAVRLKFPNAIFGQGYGMTESGTVAKSLAFAKNPFKTKSGACGTVIRNAEMKVVDTETGISLPRNKSGEICVRGHQLMKGYLNDPEATARTIDKDGWLHTGDIGFVDDDDEIFIVDRLKELIKFKGYQVAPAELEALLISHPSIDDAAVVAMKDEVADEVPVAFVARSQGSQLTEDDVKSYVNKQVVHYKRIKMVFFIEVIPKAVSGKILRKDLRAKLETMCSK

SEQ ID NO: 101417 - protein, 488 aa, Arabidopsis thaliana; identical to SEQ ID NO: 91877
  peptide (1)..(488): Ceres Seq. ID no. 13607815
  misc_feature (1)..(413): Pfam Name: AMP-binding enzyme Pfam Description: AMP-binding enzyme
  misc_feature (1)..(488): Homolog of NCBI NO: 9280225 NR Description: 4-coumarate:CoA ligase [Arabidopsis thaliana]
  misc_feature (1)..(488): Homolog of NCBI NO: 29888158 NR Description: 4-coumarate-CoA ligase-like protein [Arabidopsis
  misc_feature (1)..(488): Homolog of NCBI NO: 22331239 NR Description: 4-coumarate:CoA ligase (4-coumaroyl-CoA synthase) putative [Arabidopsis thaliana] >gi|20465258|gb|AAM19949.1| [Arabidopsis thaliana] >gi|23308423|gb|AAN18181.1|
  misc_feature (1)..(482): Homolog of NCBI NO: 15232507 NR Description: 4-coumarate:CoA ligase 2 (4-coumaroyl-CoA
  misc_feature (1)..(482): Homolog of NCBI NO: 12229665 NR Description: 4-coumarate--CoA ligase 2 (4CL 2)
  misc_feature (1)..(482): Homolog of NCBI NO: 15218002 NR Description: 4-coumarate:CoA ligase 1 (4-coumaroyl-CoA
  misc_feature (1)..(482): Homolog of NCBI NO: 12229632 NR Description: 4-coumarate--CoA ligase 2 (4CL 2)
  misc_feature (1)..(482): Homolog of NCBI NO: 9651915 NR Description: 4-coumarate:coA ligase 2 [Rubus idaeus]
  misc_feature (1)..(482): Homolog of NCBI NO: 7428495 NR Description: 4-coumarate-CoA ligase (EC 6.2.1.12) - common
  misc_feature (1)..(482): Homolog of NCBI NO: 12229631 NR Description: 4-coumarate--CoA ligase 1 (4CL 1)

SEQ ID NO: 101418 - protein, 469 aa, Arabidopsis thaliana; identical to SEQ ID NO: 91878
  peptide (1)..(469): Ceres Seq. ID no. 13607816
  misc_feature (1)..(394): Pfam Name: AMP-binding enzyme Pfam Description: AMP-binding enzyme
  misc_feature (1)..(469): Homolog of NCBI NO: 9280225 NR Description: 4-coumarate:CoA ligase [Arabidopsis thaliana]
  misc_feature (1)..(469): Homolog of NCBI NO: 29888158 NR Description: 4-coumarate-CoA ligase-like protein [Arabidopsis
  misc_feature (1)..(469): Homolog of NCBI NO: 22331239 NR Description: 4-coumarate:CoA ligase (4-coumaroyl-CoA synthase) putative [Arabidopsis thaliana] >gi|20465258|gb|AAM19949.1| [Arabidopsis thaliana] >gi|23308423|gb|AAN18181.1|
  misc_feature (1)..(463): Homolog of NCBI NO: 15232507 NR Description: 4-coumarate:CoA ligase 2 (4-coumaroyl-CoA
  misc_feature (1)..(463): Homolog of NCBI NO: 12229665 NR Description: 4-coumarate--CoA ligase 2 (4CL 2)
  misc_feature (1)..(463): Homolog of NCBI NO: 15218002 NR Description: 4-coumarate:CoA ligase 1 (4-coumaroyl-CoA
  misc_feature (1)..(463): Homolog of NCBI NO: 12229632 NR Description: 4-coumarate--CoA ligase 2 (4CL 2)
  misc_feature (1)..(463): Homolog of NCBI NO: 9651915 NR Description: 4-coumarate:coA ligase 2 [Rubus idaeus]
  misc_feature (1)..(463): Homolog of NCBI NO: 7428495 NR Description: 4-coumarate-CoA ligase (EC 6.2.1.12) - common
  misc_feature (1)..(463): Homolog of NCBI NO: 12229631 NR Description: 4-coumarate--CoA ligase 1 (4CL 1)

SEQ ID NO: 101419 - DNA, 636 bp, Arabidopsis thaliana
  misc_feature (1)..(636): Ceres Seq. ID no. 13607830
  misc_feature: MA Experiment ID: 108462 Result: Down-regulated in Transcription
  misc_feature: MA Experiment 108462 PARAMETER Experiment Name: At_Germinating_Seeds_cDNA_P Parameter: Age (day) Value: 2 vs. 0
  misc_feature: MA Experiment 108462 PARAMETER Experiment Name: At_Germinating_Seeds_cDNA_P Parameter: Tissue Value: Germinating Seeds
  misc_feature: MA Experiment ID: 108463 Result: Down-regulated in Transcription
  misc_feature: MA Experiment 108463 PARAMETER Experiment Name: At_Germinating_Seeds_cDNA_P Parameter: Age (day) Value: 3 vs. 0
  misc_feature: MA Experiment 108463 PARAMETER Experiment Name: At_Germinating_Seeds_cDNA_P Parameter: Tissue Value: Germinating Seeds
  misc_feature: MA Experiment ID: 20000111 Result: Up-regulated in Transcription
  misc_feature: MA Experiment 20000111 PARAMETER Experiment Name: At_42deg_Heat_cDNA_P Parameter: Temperature (deg C) Value: 42 vs. 22
  misc_feature: MA Experiment 20000111 PARAMETER Experiment Name: At_42deg_Heat_cDNA_P Parameter: Timepoint (hr) Value: 6
  misc_feature: MA Experiment 20000111 PARAMETER Experiment Name: At_42deg_Heat_cDNA_P Parameter: Tissue Value: Aerial
  misc_feature: MA Experiment ID: 20000113 Result: Up-regulated in Transcription
  misc_feature: MA Experiment 20000113 PARAMETER Experiment Name: At_42deg_Heat_cDNA_P Parameter: Temperature (deg C) Value: 42 vs. 22
  misc_feature: MA Experiment 20000113 PARAMETER Experiment Name: At_42deg_Heat_cDNA_P Parameter: Timepoint (hr) Value: 8
  misc_feature: MA Experiment 20000113 PARAMETER Experiment Name: At_42deg_Heat_cDNA_P Parameter: Tissue Value: Aerial
  misc_feature: MA Experiment ID: 20000173 Result: Up-regulated in Transcription
  misc_feature: MA Experiment 20000173 PARAMETER Experiment Name: At_42deg_Heat_P Parameter: Age (day) Value: 14
  misc_feature: MA Experiment 20000173 PARAMETER Experiment Name: At_42deg_Heat_P Parameter: Organism Value: A. thaliana
  misc_feature: MA Experiment 20000173 PARAMETER Experiment Name: At_42deg_Heat_P Parameter: Plant Line Value: WS
  misc_feature: MA Experiment 20000173 PARAMETER Experiment Name: At_42deg_Heat_P Parameter: Temperature (deg C) Value: 42 vs. 22
  misc_feature: MA Experiment 20000173 PARAMETER Experiment Name: At_42deg_Heat_P Parameter: Timepoint (hr) Value: 6
  misc_feature: MA Experiment 20000173 PARAMETER Experiment Name: At_42deg_Heat_P Parameter: Tissue Value: Aerial
  misc_feature: MA Experiment ID: 20000794 Result: Up-regulated in Transcription
  misc_feature: MA Experiment 20000794 PARAMETER Experiment Name: At_Petals_P Parameter: Age (day) Value: 23-25 days
  misc_feature: MA Experiment 20000794 PARAMETER Experiment Name: At_Petals_P Parameter: Plant Line Value: WS
  misc_feature: MA Experiment 20000794 PARAMETER Experiment Name: At_Petals_P Parameter: Tissue Value: Petals vs. Whole plant
gtctacgaatttagggtttaatttgtgttaatgagccaccgtgtttcgattctatcatctcatttctcacctgcctccgccgtcatggcttccgagaaagaagctgctctcgccgccactccttccgattctcccaccatatttgacaagatcatcagcaaagagattccatccaccgtggtttttgaggatgacaaggtcttagcttttagggacataacgccccagggtcctgttcacatcctccttattccaaaagtgagggatggcctaactggcctctctaaggctgaggaaaggcacatcgacatcttgggccgccttctctacactgccaagcttgtagcaaaacaagaaggcctagcagagggtttcagaattgttatcaatgatggtcctcaaggctgtcaatcggtgtatcacattcatgttcatctcattggaggacgccaaatgaactggcctcctggttaaagatcatcttgaagtggattgttgtcctgatgataagagggacgcttagagtttgctctcgtctactaatgtctctataaataaaaaaacgtgggacatgacttttatgattgttatgcaaaaccttattttatgttatgaaaaggatatttcactgttttc

SEQ ID NO: 101420 - protein, 147 aa, Arabidopsis thaliana; identical to SEQ ID NO: 21147
  peptide (1)..(147): Ceres Seq. ID no. 13607831
  misc_feature (1)..(147): Homolog of NCBI NO: 18410510 NR Description: protein kinase C inhibitor-related protein thaliana] >gi|26983874|gb|AAN86189.1| putative protein kinase C
  misc_feature (19)..(147): Homolog of NCBI NO: 11260559 NR Description: protein kinase C inhibitor-like protein -
  misc_feature (19)..(147): Homolog of NCBI NO: 629858 NR Description: protein kinase C inhibitor - maize
  misc_feature (36)..(147): Homolog of NCBI NO: 1177046 NR Description: 14 KD ZINC-BINDING PROTEIN (PROTEIN KINASE C (PKCI) >gi|493053|gb|AAA18397.1| putative protein kinase C
  misc_feature (19)..(147): Homolog of NCBI NO: 1177047 NR Description: 14 KD ZINC-BINDING PROTEIN (PROTEIN KINASE C (PKCI) >gi|473187|emb|CAA82751.1| protein kinase C inhibitor [Zea
  misc_feature (24)..(147): Homolog of NCBI NO: 15221629 NR Description: protein kinase C inhibitor (Zinc-binding protein) [Arabidopsis thaliana] >gi|26450224|dbj|BAC42230.1| putative kinase C inhibitor [Arabidopsis thaliana]
  misc_feature (24)..(136): Homolog of NCBI NO: 25518144 NR Description: F28K20.9 protein - Arabidopsis thaliana Similar to gb|Z29643 protein kinase C inhibitor (PKCI) from Zea
  misc_feature (127)..(147): Homolog of NCBI NO: 25518144 NR Description: F28K20.9 protein - Arabidopsis thaliana Similar to gb|Z29643 protein kinase C inhibitor (PKCI) from Zea
  misc_feature (19)..(147): Homolog of NCBI NO: 23612841 NR Description: protein kinase c inhibitor-like protein, putative falciparum 3D7] >gi|11559498|gb|AAG37984.1|AF056206_1 putative kinase C interacting protein 1 [Plasmodium falciparum] protein,
  misc_feature (19)..(147): Homolog of NCBI NO: 31217157 NR Description: ENSANGP00000012999 [Anopheles gambiae]

SEQ ID NO: 101421 - protein, 129 aa, Arabidopsis thaliana; identical to SEQ ID NO: 21148
  peptide (1)..(129): Ceres Seq. ID no. 13607832
  misc_feature (1)..(129): Homolog of NCBI NO: 18410510 NR Description: protein kinase C inhibitor-related protein thaliana] >gi|26983874|gb|AAN86189.1| putative protein kinase C
  misc_feature (1)..(129): Homolog of NCBI NO: 11260559 NR Description: protein kinase C inhibitor-like protein -
  misc_feature (1)..(129): Homolog of NCBI NO: 629858 NR Description: protein kinase C inhibitor - maize
  misc_feature (18)..(129): Homolog of NCBI NO: 1177046 NR Description: 14 KD ZINC-BINDING PROTEIN (PROTEIN KINASE C (PKCI) >gi|493053|gb|AAA18397.1| putative protein kinase C
  misc_feature (1)..(129): Homolog of NCBI NO: 1177047 NR Description: 14 KD ZINC-BINDING PROTEIN (PROTEIN KINASE C (PKCI) >gi|473187|emb|CAA82751.1| protein kinase C inhibitor [Zea
  misc_feature (6)..(129): Homolog of NCBI NO: 15221629 NR Description: protein kinase C inhibitor (Zinc-binding protein) [Arabidopsis thaliana] >gi|26450224|dbj|BAC42230.1| putative kinase C inhibitor [Arabidopsis thaliana]
  misc_feature (6)..(118): Homolog of NCBI NO: 25518144 NR Description: F28K20.9 protein - Arabidopsis thaliana Similar to gb|Z29643 protein kinase C inhibitor (PKCI) from Zea
  misc_feature (109)..(129): Homolog of NCBI NO: 25518144 NR Description: F28K20.9 protein - Arabidopsis thaliana Similar to gb|Z29643 protein kinase C inhibitor (PKCI) from Zea
  misc_feature (1)..(129): Homolog of NCBI NO: 23612841 NR Description: protein kinase c inhibitor-like protein, putative falciparum 3D7] >gi|11559498|gb|AAG37984.1|AF056206_1 putative kinase C interacting protein 1 [Plasmodium falciparum] protein,
  misc_feature (1)..(129): Homolog of NCBI NO: 31217157 NR Description: ENSANGP00000012999 [Anopheles gambiae]

SEQ ID NO: 101422 - DNA, 1473 bp, Arabidopsis thaliana
  misc_feature (1)..(1473): Ceres Seq. ID no. 13607833
  misc_feature: MA Experiment ID: 20000227 Result: Up-regulated in Transcription
  misc_feature: MA Experiment 20000227 PARAMETER Experiment Name: At_Root-Tips-vs-Tops_P Parameter: Tissue Value: Root Tips vs. Root Tops
  misc_feature: MA Experiment ID: 20000437 Result: Down-regulated in Transcription
  misc_feature: MA Experiment 20000437 PARAMETER Experiment Name: At_Drought_P Parameter: Age (day) Value: 8
  misc_feature: MA Experiment 20000437 PARAMETER Experiment Name: At_Drought_P Parameter: Organism Value: A. thaliana
  misc_feature: MA Experiment 20000437 PARAMETER Experiment Name: At_Drought_P Parameter: Plant Line Value: WS
  misc_feature: MA Experiment 20000437 PARAMETER Experiment Name: At_Drought_P Parameter: Timepoint (hr) Value: 24
  misc_feature: MA Experiment 20000437 PARAMETER Experiment Name: At_Drought_P Parameter: Tissue Value: Whole Plant
  misc_feature: MA Experiment 20000437 PARAMETER Experiment Name: At_Drought_P Parameter: Treatment Value: Drought vs. No Drought
  misc_feature: MA Experiment ID: 20001248 Result: Down-regulated in Transcription
  misc_feature: MA Experiment 20001248 PARAMETER Experiment Name: At_Far-red-induction_P Parameter: Age (day) Value: 7
  misc_feature: MA Experiment 20001248 PARAMETER Experiment Name: At_Far-red-induction_P Parameter: Light Value: Far-red vs. White
  misc_feature: MA Experiment 20001248 PARAMETER Experiment Name: At_Far-red-induction_P Parameter: Organism Value: A. thaliana
  misc_feature: MA Experiment 20001248 PARAMETER Experiment Name: At_Far-red-induction_P Parameter: Plant Line Value: Columbia
  misc_feature: MA Experiment 20001248 PARAMETER Experiment Name: At_Far-red-induction_P Parameter: Timepoint (hr) Value: 4
  misc_feature: MA Experiment 20001248 PARAMETER Experiment Name: At_Far-red-induction_P Parameter: Tissue Value: Whole Plant
  misc_feature: MA Experiment ID: 20001911 Result: Down-regulated in Transcription
  misc_feature: MA Experiment 20001911 PARAMETER Experiment Name: At_Drought_Reproduction_P Parameter: Age (day) Value: 40
  misc_feature: MA Experiment 20001911 PARAMETER Experiment Name: At_Drought_Reproduction_P Parameter: Organism Value: A. thaliana
  misc_feature: MA Experiment 20001911 PARAMETER Experiment Name: At_Drought_Reproduction_P Parameter: Plant Line Value: WS
  misc_feature: MA Experiment 20001911 PARAMETER Experiment Name: At_Drought_Reproduction_P Parameter: Timepoint (day) Value: 10
  misc_feature: MA Experiment 20001911 PARAMETER Experiment Name: At_Drought_Reproduction_P Parameter: Tissue Value: Flowers
  misc_feature: MA Experiment 20001911 PARAMETER Experiment Name: At_Drought_Reproduction_P Parameter: Treatment Value: Drought vs. No Drought
atgggttcttctgcttcaaagaccgcttcttccgtttcttctgcttcttcctcatctgcgttttctccaccgccgaccaaattcagctccgattcatcttcaccggcggtgcagagagctttttcgtttccgacgccgttggttcaccatcctccggcgagaaaaggcgactctcatcaccttgtttcccttacatctacatcgtacggttctcttctcctccttgatctcgatggatccaaaaactcctcttccgaccaacaaacgctgcctcgtatctcaatctccgggaagaacacaccagatccggtctctcctgattcagtcataaacacttgggagcttatggatggcttggacgatgaattcgaattcgaaattcccaaaccgggtaagcgtctaaattcggatttttgctctaaacccgacccgaatcggaatgtgagtttaaatgggtcttcgttgaaattggatgaatcttacgagattgtgagaatcgaagaagacgatggagattgggttcctttgacttataaacctaagcaacctttgtggaagcatttgtctgaagaatcatttctctctgatttagatcccagcattgtctcatcctacaagaaagctttgtcttctaagctattaagcaatcatagtaatactagaaaccctcatagacccacaaagtctctctcttgtagcccatcatcaaatccatccatcttaataagcgaagaaccaaaatctgtatcctctagtcaattgatttcatcaccagccaaaccgagattaccaggaacagaagacaagattgtactctacttcacaaccctcagaggaattcgaaagacatacgaggattgttgttgcgttagagcgatattgagaggagttcaagtgtccgtagacgaacgtgacatctctatggattccaaatacaggaaagagcttcaaagcgtgcttggcgccgcagagaaaccggtttgtttgcctcaggtgtttatcagaggaactcacattggtggcgtggaggagattatgcagctaaatgatggtggtgaattagcagagatgttgaaagatttccctgcttgtgaacgcttggggacatgccggagctgtggtgatgcaaggtttgtgccttgtactaactgtgatggtagcaccaaagtgtttgaagaacaagatgaacggtttaagcggtgtcctaaatgcaatgagaatggattggtgcgttgtcgtgtgtgttgtctctaagtgatcagtttgatcaaaagatgtgtgtgagaaaggggatatagattgattgactaaacatggtatttggttagtaatgtatattcaaataagtaagttggctcaagccttttattatttactcttatgagttgtgttcttttgttccatttacgctcttgaccttttgaactaaatgattcttactatatgaagtacatcaaatggtagatgatgatt

SEQ ID NO: 101423 - protein, 417 aa, Arabidopsis thaliana
  peptide (1)..(417): Ceres Seq. ID no. 13607834
  misc_feature (269)..(358): Pfam Name: Glutaredoxin Pfam Description: Glutaredoxin
  misc_feature (1)..(417): Homolog of NCBI NO: 30694571 NR Description: expressed protein [Arabidopsis thaliana]
  misc_feature (116)..(417): Homolog of NCBI NO: 15451042 NR Description: putative protein [Arabidopsis thaliana]
  misc_feature (1)..(417): Homolog of NCBI NO: 15227326 NR Description: expressed protein [Arabidopsis thaliana]
  misc_feature (202)..(415): Homolog of NCBI NO: 15240723 NR Description: expressed protein [Arabidopsis thaliana] contains similarity to unknown [Arabidopsis thaliana] >gi|14532460|gb|AAK63958.1|
  misc_feature (255)..(416): Homolog of NCBI NO: 22327469 NR Description: expressed protein [Arabidopsis thaliana] gb|AAC78540.1~gene_id:MYH19.5~similar to unknown protein thaliana] >gi|19347749|gb|AAL86299.1| unknown protein
  misc_feature (34)..(76): Homolog of NCBI NO: 22327469 NR Description: expressed protein [Arabidopsis thaliana] gb|AAC78540.1~gene_id:MYH19.5~similar to unknown protein thaliana] >gi|19347749|gb|AAL86299.1| unknown protein
  misc_feature (262)..(416): Homolog of NCBI NO: 32490043 NR Description: OSJNBa0063C18.3 [Oryza sativa (japonica
  misc_feature (253)..(416): Homolog of NCBI NO: 34899098 NR Description: hypothetical protein~similar to Arabidopsis
  misc_feature (262)..(414): Homolog of NCBI NO: 10241626 NR Description: Contains similarity to F1N 19.7 [Oryza sativa
  misc_feature (200)..(415): Homolog of NCBI NO: 34907946 NR Description: B1088C09.21 [Oryza sativa (japonica
MGSSASKTASSVSSASSSSAFSPPPTKFSSDSSSPAVQRAFSFPTPLVHHPPARKGDSHHLVSLTSTSYGSLLLLDLDGSKNSSSDQQTLPRISISGKNTPDPVSPDSVINTWELMDGLDDEFEFEIPKPGKRLNSDFCSKPDPNRNVSLNGSSLKLDESYEIVRIEEDDGDWVPLTYKPKQPLWKHLSEESFLSDLDPSIVSSYKKALSSKLLSNHSNTRNPHRPTKSLSCSPSSNPSILISEEPKSVSSSQLISSPAKPRLPGTEDKIVLYFTTLRGIRKTYEDCCCVRAILRGVQVSVDERDISMDSKYRKELQSVLGAAEKPVCLPQVFIRGTHIGGVEEIMQLNDGGELAEMLKDFPACERLGTCRSCGDARFVPCTNCDGSTKVFEEQDERFKRCPKCNENGLVRCRVCCL

SEQ ID NO: 101424 - protein, 302 aa, Arabidopsis thaliana
  peptide (1)..(302): Ceres Seq. ID no. 13607835
  misc_feature (154)..(243): Pfam Name: Glutaredoxin Pfam Description: Glutaredoxin
  misc_feature (1)..(302): Homolog of NCBI NO: 30694571 NR Description: expressed protein [Arabidopsis thaliana]
  misc_feature (1)..(302): Homolog of NCBI NO: 15451042 NR Description: putative protein [Arabidopsis thaliana]
  misc_feature (1)..(302): Homolog of NCBI NO: 15227326 NR Description: expressed protein [Arabidopsis thaliana]
  misc_feature (87)..(300): Homolog of NCBI NO: 15240723 NR Description: expressed protein [Arabidopsis thaliana] contains similarity to unknown [Arabidopsis thaliana] >gi|14532460|gb|AAK63958.1|
  misc_feature (140)..(301): Homolog of NCBI NO: 22327469 NR Description: expressed protein [Arabidopsis thaliana] gb|AAC78540.1~gene_id:MYH19.5~similar to unknown protein thaliana] >gi|19347749|gb|AAL86299.1| unknown protein
  misc_feature (147)..(301): Homolog of NCBI NO: 32490043 NR Description: OSJNBa0063C18.3 [Oryza sativa (japonica
  misc_feature (138)..(301): Homolog of NCBI NO: 34899098 NR Description: hypothetical protein~similar to Arabidopsis
  misc_feature (147)..(299): Homolog of NCBI NO: 10241626 NR Description: Contains similarity to F1N 19.7 [Oryza sativa
  misc_feature (85)..(300): Homolog of NCBI NO: 34907946 NR Description: B1088C09.21 [Oryza sativa (japonica
  misc_feature (124)..(300): Homolog of NCBI NO: 15237554 NR Description: expressed protein [Arabidopsis thaliana]
MDGLDDEFEFEIPKPGKRLNSDFCSKPDPNRNVSLNGSSLKLDESYEIVRIEEDDGDWVPLTYKPKQPLWKHLSEESFLSDLDPSIVSSYKKALSSKLLSNHSNTRNPHRPTKSLSCSPSSNPSILISEEPKSVSSSQLISSPAKPRLPGTEDKIVLYFTTLRGIRKTYEDCCCVRAILRGVQVSVDERDISMDSKYRKELQSVLGAAEKPVCLPQVFIRGTHIGGVEEIMQLNDGGELAEMLKDFPACERLGTCRSCGDARFVPCTNCDGSTKVFEEQDERFKRCPKCNENGLVRCRVCCL

SEQ ID NO: 101425 - DNA, 984 bp, Arabidopsis thaliana
  misc_feature (1)..(984): Ceres Seq. ID no. 13607840
  misc_feature: MA Experiment ID: 20000171 Result: Down-regulated in Transcription
  misc_feature: MA Experiment 20000171 PARAMETER Experiment Name: At_42deg_Heat_P Parameter: Age (day) Value: 14
  misc_feature: MA Experiment 20000171 PARAMETER Experiment Name: At_42deg_Heat_P Parameter: Organism Value: A. thaliana
  misc_feature: MA Experiment 20000171 PARAMETER Experiment Name: At_42deg_Heat_P Parameter: Plant Line Value: WS
  misc_feature: MA Experiment 20000171 PARAMETER Experiment Name: At_42deg_Heat_P Parameter: Temperature (deg C) Value: 42 vs. 22
  misc_feature: MA Experiment 20000171 PARAMETER Experiment Name: At_42deg_Heat_P Parameter: Timepoint (hr) Value: 1
  misc_feature: MA Experiment 20000171 PARAMETER Experiment Name: At_42deg_Heat_P Parameter: Tissue Value: Aerial
  misc_feature: MA Experiment ID: 20000173 Result: Down-regulated in Transcription
  misc_feature: MA Experiment 20000173 PARAMETER Experiment Name: At_42deg_Heat_P Parameter: Age (day) Value: 14
  misc_feature: MA Experiment 20000173 PARAMETER Experiment Name: At_42deg_Heat_P Parameter: Organism Value: A. thaliana
  misc_feature: MA Experiment 20000173 PARAMETER Experiment Name: At_42deg_Heat_P Parameter: Plant Line Value: WS
  misc_feature: MA Experiment 20000173 PARAMETER Experiment Name: At_42deg_Heat_P Parameter: Temperature (deg C) Value: 42 vs. 22
  misc_feature: MA Experiment 20000173 PARAMETER Experiment Name: At_42deg_Heat_P Parameter: Timepoint (hr) Value: 6
  misc_feature: MA Experiment 20000173 PARAMETER Experiment Name: At_42deg_Heat_P Parameter: Tissue Value: Aerial
  misc_feature: MA Experiment ID: 20000182 Result: Up-regulated in Transcription
  misc_feature: MA Experiment 20000182 PARAMETER Experiment Name: At_2mM_SA_P Parameter: Age (day) Value: 14
  misc_feature: MA Experiment 20000182 PARAMETER Experiment Name: At_2mM_SA_P Parameter: Organism Value: A. thaliana
  misc_feature: MA Experiment 20000182 PARAMETER Experiment Name: At_2mM_SA_P Parameter: Plant Line Value: WS
  misc_feature: MA Experiment 20000182 PARAMETER Experiment Name: At_2mM_SA_P Parameter: Timepoint (hr) Value: 6
  misc_feature: MA Experiment 20000182 PARAMETER Experiment Name: At_2mM_SA_P Parameter: Tissue Value: Aerial
  misc_feature: MA Experiment 20000182 PARAMETER Experiment Name: At_2mM_SA_P Parameter: Treatment Value: 2mM SA vs. No Treatment
  misc_feature: MA Experiment ID: 20000184 Result: Down-regulated in Transcription
  misc_feature: MA Experiment 20000184 PARAMETER Experiment Name: At_Shoots__P Parameter: Age (day) Value: 7
  misc_feature: MA Experiment 20000184 PARAMETER Experiment Name: At_Shoots__P Parameter: Tissue Value: Shoots vs. Whole Plant
  misc_feature: MA Experiment ID: 20001560 Result: Down-regulated in Transcription
  misc_feature: MA Experiment 20001560 PARAMETER Experiment Name: At_Drought_Soil_Dry_P Parameter: Age (day) Value: 28
  misc_feature: MA Experiment 20001560 PARAMETER Experiment Name: At_Drought_Soil_Dry_P Parameter: Organism Value: A. thaliana
  misc_feature: MA Experiment 20001560 PARAMETER Experiment Name: At_Drought_Soil_Dry_P Parameter: Plant Line Value: WS
  misc_feature: MA Experiment 20001560 PARAMETER Experiment Name: At_Drought_Soil_Dry_P Parameter: Post Timepoint (hr) Value: None
  misc_feature: MA Experiment 20001560 PARAMETER Experiment Name: At_Drought_Soil_Dry_P Parameter: Post-Treatment Value: None
  misc_feature: MA Experiment 20001560 PARAMETER Experiment Name: At_Drought_Soil_Dry_P Parameter: Timepoint (day) Value: 14
  misc_feature: MA Experiment 20001560 PARAMETER Experiment Name: At_Drought_Soil_Dry_P Parameter: Treatment Value: Drought vs. No Drought
atgggaaggggcaagatcgcgattaagaggatcaataactctacgagccgtcaggttacgttctcgaagcgaaggaatggattgttgaagaaagctaaggagcttgcgattctctgcgatgctgaggttggtgtcatcatcttctccagcaccggtaggctctacgatttctccagctccagcatgaaatcggtcatagagagatacagcgatgccaaaggagaaaccagttcagaaaatgatcccgcttcagaaattcagttctggcaaaaggaggctgcgattctaaagcgtcagctacataacttgcaagaaaaccaccggcaaatgatgggggaggagctctctggactaagtgtagaagctttacagaatttggaaaatcagcttgaattgagccttcgtggcgttcgaatgaaaaaggatcaaatgttaatcgaagaaatacaagtacttaaccgagaggggaatctcgttcaccaagagaatttagacctccacaagaaagtaaacctaatgcaccaacagaacatggaactacatgaaaaggtttcagaggtcgagggtgtgaaaatcgcaaacaagaattctcttctcacaaatggtctagacatgagagatacctcgaacgaacatgtccatcttcagctcagccaaccgcagcatgatcatgagacgcattcaaaagctatccaactcaactatttttccttcattgcataatataattcggtgtgccaacacacttatgttgacctcgtcggaatcatatcacaattcactgtgtcagcttgcctctgcataagcgaaaataaaaacataaacatgatcagtttgcattccatatctatcaaacaccagctttgtaacttttaaaactttttctccgtgcaaagacctttggtttggcgcttaagcatgtagtttgatgatcaaaggaaatgggtgttttagcataaagttgtcacccttccgttgcatttt

SEQ ID NO: 101426 - protein, 240 aa, Arabidopsis thaliana
  peptide (1)..(240): Ceres Seq. ID no. 13607841
  misc_feature (73)..(172): Pfam Name: K-box region Pfam Description: K-box region
  misc_feature (1)..(240): Homolog of NCBI NO: 30694601 NR Description: MADS-box protein [Arabidopsis thaliana]
  misc_feature (24)..(240): Homolog of NCBI NO: 11545539 NR Description: MADS-box protein AGL16 [Arabidopsis thaliana]
  misc_feature (1)..(240): Homolog of NCBI NO: 11278951 NR Description: MADS-box transcription factor-like protein -
  misc_feature (1)..(233): Homolog of NCBI NO: 30313677 NR Description: transcription factor MADS27 [Oryza sativa
  misc_feature (1)..(230): Homolog of NCBI NO: 15235748 NR Description: MADS-box protein [Arabidopsis thaliana]
  misc_feature (1)..(233): Homolog of NCBI NO: 29611976 NR Description: MADS-box transcription factor MADS2 [Zea mays]
  misc_feature (1)..(145): Homolog of NCBI NO: 32402382 NR Description: MADS-box protein AGL16-II [Arabidopsis thaliana]
  misc_feature (1)..(233): Homolog of NCBI NO: 9964296 NR Description: MADS box protein 2 [Zea mays]
  misc_feature (1)..(225): Homolog of NCBI NO: 38344968 NR Description: OSJNBa0072F16.13 [Oryza sativa (japonica
  misc_feature (1)..(230): Homolog of NCBI NO: 7489303 NR Description: MADS-box transcription factor DEFH125 - garden
MGRGKIAIKRINNSTSRQVTFSKRRNGLLKKAKELAILCDAEVGVIIFSSTGRLYDFSSSSMKSVIERYSDAKGETSSENDPASEIQFWQKEAAILKRQLHNLQENHRQMMGEELSGLSVEALQNLENQLELSLRGVRMKKDQMLIEEIQVLNREGNLVHQENLDLHKKVNLMHQQNMELHEKVSEVEGVKIANKNSLLTNGLDMRDTSNEHVHLQLSQPQHDHETHSKAIQLNYFSFIA

SEQ ID NO: 101427 - protein, 179 aa, Arabidopsis thaliana
  peptide (1)..(179): Ceres Seq. ID no. 13607842
  misc_feature (12)..(111): Pfam Name: K-box region Pfam Description: K-box region
  misc_feature (1)..(179): Homolog of NCBI NO: 30694601 NR Description: MADS-box protein [Arabidopsis thaliana]
  misc_feature (1)..(179): Homolog of NCBI NO: 11545539 NR Description: MADS-box protein AGL16 [Arabidopsis thaliana]
  misc_feature (1)..(179): Homolog of NCBI NO: 11278951 NR Description: MADS-box transcription factor-like protein -
  misc_feature (1)..(172): Homolog of NCBI NO: 30313677 NR Description: transcription factor MADS27 [Oryza sativa
  misc_feature (1)..(169): Homolog of NCBI NO: 15235748 NR Description: MADS-box protein [Arabidopsis thaliana]
  misc_feature (1)..(172): Homolog of NCBI NO: 29611976 NR Description: MADS-box transcription factor MADS2 [Zea mays]
  misc_feature (1)..(84): Homolog of NCBI NO: 32402382 NR Description: MADS-box protein AGL16-II [Arabidopsis thaliana]
  misc_feature (1)..(172): Homolog of NCBI NO: 9964296 NR Description: MADS box protein 2 [Zea mays]
  misc_feature (1)..(164): Homolog of NCBI NO: 38344968 NR Description: OSJNBa0072F16.13 [Oryza sativa (japonica
  misc_feature (1)..(169): Homolog of NCBI NO: 7489303 NR Description: MADS-box transcription factor DEFH125 - garden
MKSVIERYSDAKGETSSENDPASEIQFWQKEAAILKRQLHNLQENHRQMMGEELSGLSVEALQNLENQLELSLRGVRMKKDQMLIEEIQVLNREGNLVHQENLDLHKKVNLMHQQNMELHEKVSEVEGVKIANKNSLLTNGLDMRDTSNEHVHLQLSQPQHDHETHSKAIQLNYFSFIA

SEQ ID NO: 101428 - protein, 131 aa, Arabidopsis thaliana
  peptide (1)..(131): Ceres Seq. ID no. 13607843
  misc_feature (1)..(63): Pfam Name: K-box region Pfam Description: K-box region
  misc_feature (1)..(131): Homolog of NCBI NO: 30694601 NR Description: MADS-box protein [Arabidopsis thaliana]
  misc_feature (1)..(131): Homolog of NCBI NO: 11545539 NR Description: MADS-box protein AGL16 [Arabidopsis thaliana]
  misc_feature (1)..(131): Homolog of NCBI NO: 11278951 NR Description: MADS-box transcription factor-like protein -
  misc_feature (1)..(124): Homolog of NCBI NO: 30313677 NR Description: transcription factor MADS27 [Oryza sativa
  misc_feature (1)..(121): Homolog of NCBI NO: 15235748 NR Description: MADS-box protein [Arabidopsis thaliana]
  misc_feature (1)..(124): Homolog of NCBI NO: 29611976 NR Description: MADS-box transcription factor MADS2 [Zea mays]
  misc_feature (1)..(36): Homolog of NCBI NO: 32402382 NR Description: MADS-box protein AGL16-II [Arabidopsis thaliana]
  misc_feature (1)..(124): Homolog of NCBI NO: 9964296 NR Description: MADS box protein 2 [Zea mays]
  misc_feature (1)..(116): Homolog of NCBI NO: 38344968 NR Description: OSJNBa0072F16.13 [Oryza sativa (japonica
  misc_feature (1)..(121): Homolog of NCBI NO: 7489303 NR Description: MADS-box transcription factor DEFH125 - garden
MMGEELSGLSVEALQNLENQLELSLRGVRMKKDQMLIEEIQVLNREGNLVHQENLDLHKKVNLMHQQNMELHEKVSEVEGVKIANKNSLLTNGLDMRDTSNEHVHLQLSQPQHDHETHSKAIQLNYFSFIA

SEQ ID NO: 101429 - DNA, 1209 bp, Arabidopsis thaliana
  misc_feature (1)..(1209): Ceres Seq. ID no. 13607852
  misc_feature: MA Experiment ID: 108501 Result: Up-regulated in Transcription
  misc_feature: MA Experiment 108501 PARAMETER Experiment Name: At_ap2_floral_buds_cDNA_P Parameter: Plant Line Value: ap2 (Ler.)
  misc_feature: MA Experiment 108501 PARAMETER Experiment Name: At_ap2_floral_buds_cDNA_P Parameter: Tissue Value: Closed Flower
  misc_feature: MA Experiment ID: 20000184 Result: Down-regulated in Transcription
  misc_feature: MA Experiment 20000184 PARAMETER Experiment Name: At_Shoots__P Parameter: Age (day) Value: 7
  misc_feature: MA Experiment 20000184 PARAMETER Experiment Name: At_Shoots__P Parameter: Tissue Value: Shoots vs. Whole Plant
  misc_feature: MA Experiment ID: 20000234 Result: Up-regulated in Transcription
  misc_feature: MA Experiment 20000234 PARAMETER Experiment Name: At_Siliques_P Parameter: Age (day) Value: 21
  misc_feature: MA Experiment 20000234 PARAMETER Experiment Name: At_Siliques_P Parameter: Organism Value: A. thaliana
  misc_feature: MA Experiment 20000234 PARAMETER Experiment Name: At_Siliques_P Parameter: Plant Line Value: WS
  misc_feature: MA Experiment 20000234 PARAMETER Experiment Name: At_Siliques_P Parameter: Tissue Value: Less Than 5mm Siliques vs. Whole Plant
  misc_feature: MA Experiment ID: 20000235 Result: Up-regulated in Transcription
  misc_feature: MA Experiment 20000235 PARAMETER Experiment Name: At_Siliques_P Parameter: Age (day) Value: 21
  misc_feature: MA Experiment 20000235 PARAMETER Experiment Name: At_Siliques_P Parameter: Organism Value: A. thaliana
  misc_feature: MA Experiment 20000235 PARAMETER Experiment Name: At_Siliques_P Parameter: Plant Line Value: WS
  misc_feature: MA Experiment 20000235 PARAMETER Experiment Name: At_Siliques_P Parameter: Tissue Value: 5-10mm Siliques vs. Whole Plant
  misc_feature: MA Experiment ID: 20000264 Result: Up-regulated in Transcription
  misc_feature: MA Experiment 20000264 PARAMETER Experiment Name: At_Open_Flower_P Parameter: Age (day) Value: 21
  misc_feature: MA Experiment 20000264 PARAMETER Experiment Name: At_Open_Flower_P Parameter: Plant Line Value: WS
  misc_feature: MA Experiment 20000264 PARAMETER Experiment Name: At_Open_Flower_P Parameter: Tissue Value: Open Flower vs. Whole Plant
  misc_feature: MA Experiment ID: 20000265 Result: Up-regulated in Transcription
  misc_feature: MA Experiment 20000265 PARAMETER Experiment Name: At_Open_Flower_P Parameter: Age (day) Value: 21
  misc_feature: MA Experiment 20000265 PARAMETER Experiment Name: At_Open_Flower_P Parameter: Plant Line Value: WS
  misc_feature: MA Experiment 20000265 PARAMETER Experiment Name: At_Open_Flower_P Parameter: Tissue Value: Closed Flower vs. Whole Plant
  misc_feature: MA Experiment ID: 20000286 Result: Up-regulated in Transcription
  misc_feature: MA Experiment 20000286 PARAMETER Experiment Name: At_Open_Flower_P Parameter: Age (day) Value: 21
  misc_feature: MA Experiment 20000286 PARAMETER Experiment Name: At_Open_Flower_P Parameter: Plant Line Value: WS
  misc_feature: MA Experiment 20000286 PARAMETER Experiment Name: At_Open_Flower_P Parameter: Tissue Value: Half Open vs. Whole Plant
  misc_feature: MA Experiment ID: 20000437 Result: Up-regulated in Transcription
  misc_feature: MA Experiment 20000437 PARAMETER Experiment Name: At_Drought_P Parameter: Age (day) Value: 8
  misc_feature: MA Experiment 20000437 PARAMETER Experiment Name: At_Drought_P Parameter: Organism Value: A. thaliana
  misc_feature: MA Experiment 20000437 PARAMETER Experiment Name: At_Drought_P Parameter: Plant Line Value: WS
  misc_feature: MA Experiment 20000437 PARAMETER Experiment Name: At_Drought_P Parameter: Timepoint (hr) Value: 24
  misc_feature: MA Experiment 20000437 PARAMETER Experiment Name: At_Drought_P Parameter: Tissue Value: Whole Plant
  misc_feature: MA Experiment 20000437 PARAMETER Experiment Name: At_Drought_P Parameter: Treatment Value: Drought vs. No Drought
  misc_feature: MA Experiment ID: 20001451 Result: Up-regulated in Transcription
  misc_feature: MA Experiment 20001451 PARAMETER Experiment Name: At_Far-red-induction_P Parameter: Age (day) Value: 7
  misc_feature: MA Experiment 20001451 PARAMETER Experiment Name: At_Far-red-induction_P Parameter: Light Value: Far-red vs. White
  misc_feature: MA Experiment 20001451 PARAMETER Experiment Name: At_Far-red-induction_P Parameter: Organism Value: A. thaliana
  misc_feature: MA Experiment 20001451 PARAMETER Experiment Name: At_Far-red-induction_P Parameter: Plant Line Value: Columbia
  misc_feature: MA Experiment 20001451 PARAMETER Experiment Name: At_Far-red-induction_P Parameter: Timepoint (hr) Value: 24
  misc_feature: MA Experiment 20001451 PARAMETER Experiment Name: At_Far-red-induction_P Parameter: Tissue Value: Whole Plant
  misc_feature: MA Experiment ID: 20001757 Result: Down-regulated in Transcription
  misc_feature: MA Experiment 20001757 PARAMETER Experiment Name: At_50mM_NH4NO3_L-to-H_P Parameter: Timepoint (hr) Value: 6
  misc_feature: MA Experiment 20001757 PARAMETER Experiment Name: At_50mM_NH4NO3_L-to-H_P Parameter: Tissue Value: Leaf
  misc_feature: MA Experiment 20001757 PARAMETER Experiment Name: At_50mM_NH4NO3_L-to-H_P Parameter: Treatment Value: 50mM NH4NO3 vs 100mM Mannitol
gttagatgatctgtccatttttttcttttttcttctgtgtataaatatatttgagcacaaagaaaaactaataaccttctgttttcagcaagtagggtcttataaccttcaaagaaatattccttcaattgaaaacccataaaccaaaatagatattacaaaaggaaagagagatattttcaagaacaacataattagaaaagcagaagcagcagttaagtggtactgagataaatgatatagtttctcttcaagaacagtttctcattacccaccttctcctttttgctgatctatcgtaatcttgagaactcaggatcaatggaggaaggtgggagtagtcacgacgcagagagtagcaagaaactagggagagggaaaatagagataaagaggatagagaacacaacaaatcgtcaagttactttctgcaaacgacgcaatggtcttctcaagaaagcttatgaactctctgtcttgtgtgatgccgaagttgccctcgtcatcttctccactcgtggccgtctctatgagtacgccaacaacagtgtgaggggtacaattgaaaggtacaagaaagcttgttccgatgccgtcaaccctccttccgtcaccgaagctaatactcagtactatcagcaagaagcctctaagcttcggaggcagattcgagatattcagaattcaaataggcatattgttggggaatcacttggttccttgaacttcaaggaactcaaaaacctagaaggacgtcttgaaaaaggaatcagccgtgtccgctccaaaaagaatgagctgttagtggcagagatagagtatatgcagaagagggaaatggagttgcaacacaataacatgtacctgcgagcaaagatagccgaaggcgccagattgaatccggaccagcaggaatcgagtgtgatacaagggacgacagtttacgaatccggtgtatcttctcatgaccagtcgcagcattataatcggaactatattccggtgaaccttcttgaaccgaatcagcaattctccggccaagaccaacctcctcttcaacttgtgtaactcaaaacatgataacttgtttcttctcctcataacgattaagagagagacgagagagttcattttatatttataacgcgactgtgtattcatagtttaggttctaataatgataataacaaaactgttgtttctttgctt

SEQ ID NO: 101430 - protein, 248 aa, Arabidopsis thaliana; identical to SEQ ID NO: 35284
  peptide (1)..(248): Ceres Seq. ID no. 13607853
  misc_feature (89)..(188): Pfam Name: K-box region Pfam Description: K-box region
  misc_feature (1)..(248): Homolog of NCBI NO: 15231135 NR Description: MADS-box protein [Arabidopsis thaliana]
  misc_feature (1)..(248): Homolog of NCBI NO: 12655901 NR Description: SHATTERPROOF1 [Brassica napus]
  misc_feature (3)..(248): Homolog of NCBI NO: 18406070 NR Description: floral homeodomain transcription factor (AGL5)
  misc_feature (3)..(247): Homolog of NCBI NO: 25307910 NR Description: floral homeodomain transcription factor (AGL5)
  misc_feature (3)..(248): Homolog of NCBI NO: 30689162 NR Description: floral homeodomain transcription factor (AGL5)
  misc_feature (6)..(248): Homolog of NCBI NO: 5031217 NR Description: AGAMOUS homolog [Liquidambar styraciflua]
  misc_feature (9)..(248): Homolog of NCBI NO: 6970411 NR Description: MADS-box protein [Rosa rugosa]
  misc_feature (1)..(248): Homolog of NCBI NO: 16973296 NR Description: C-type MADS box protein [Malus x domestica]
  misc_feature (1)..(248): Homolog of NCBI NO: 33308109 NR Description: AGAMOUS-like protein [Malus x domestica]
  misc_feature (16)..(248): Homolog of NCBI NO: 14279306 NR Description: MAD-box transcripion factor [Vitis vinifera]

SEQ ID NO: 101431 - DNA, 1252 bp, Arabidopsis thaliana
  misc_feature (1)..(1252): Ceres Seq. ID no. 13607854
  misc_feature: MA Experiment ID: 108434 Result: Up-regulated in Transcription
  misc_feature: MA Experiment 108434 PARAMETER Experiment Name: At_Root_Tips_cDNA_P Parameter: Tissue Value: Root Tips
  misc_feature: MA Experiment ID: 108462 Result: Down-regulated in Transcription
  misc_feature: MA Experiment 108462 PARAMETER Experiment Name: At_Germinating_Seeds_cDNA_P Parameter: Age (day) Value: 2 vs. 0
  misc_feature: MA Experiment 108462 PARAMETER Experiment Name: At_Germinating_Seeds_cDNA_P Parameter: Tissue Value: Germinating Seeds
  misc_feature: MA Experiment ID: 108463 Result: Down-regulated in Transcription
  misc_feature: MA Experiment 108463 PARAMETER Experiment Name: At_Germinating_Seeds_cDNA_P Parameter: Age (day) Value: 3 vs. 0
  misc_feature: MA Experiment 108463 PARAMETER Experiment Name: At_Germinating_Seeds_cDNA_P Parameter: Tissue Value: Germinating Seeds
  misc_feature: MA Experiment ID: 108464 Result: Down-regulated in Transcription
  misc_feature: MA Experiment 108464 PARAMETER Experiment Name: At_Germinating_Seeds_cDNA_P Parameter: Age (day) Value: 4 vs. 0
  misc_feature: MA Experiment 108464 PARAMETER Experiment Name: At_Germinating_Seeds_cDNA_P Parameter: Tissue Value: Germinating Seeds
  misc_feature: MA Experiment ID: 108474 Result: Down-regulated in Transcription
  misc_feature: MA Experiment 108474 PARAMETER Experiment Name: At_Drought_Flowers_cDNA_P Parameter: Timepoint (hr) Value: null
  misc_feature: MA Experiment 108474 PARAMETER Experiment Name: At_Drought_Flowers_cDNA_P Parameter: Treatment Value: Drought vs. No Drought
  misc_feature: MA Experiment ID: 108561 Result: Up-regulated in Transcription
  misc_feature: MA Experiment 108561 PARAMETER Experiment Name: At_100uM_ABA_cDNA_P Parameter: Timepoint (hr) Value: 6
  misc_feature: MA Experiment 108561 PARAMETER Experiment Name: At_100uM_ABA_cDNA_P Parameter: Tissue Value: Aerial
  misc_feature: MA Experiment 108561 PARAMETER Experiment Name: At_100uM_ABA_cDNA_P Parameter: Treatment Value: 100uM ABA vs. No Treatment
  misc_feature: MA Experiment ID: 108595 Result: Up-regulated in Transcription
  misc_feature: MA Experiment 108595 PARAMETER Experiment Name: At_Ler-pi_Ovule_cDNA_P Parameter: Plant Line Value: null
  misc_feature: MA Experiment ID: 20000068 Result: Up-regulated in Transcription
  misc_feature: MA Experiment ID: 20000069 Result: Up-regulated in Transcription
  misc_feature: MA Experiment 20000069 PARAMETER Experiment Name: At_100uM_ABA_Mutants_cDNA_P Parameter: Plant Line Value: CS23
  misc_feature: MA Experiment 20000069 PARAMETER Experiment Name: At_100uM_ABA_Mutants_cDNA_P Parameter: Timepoint (hr) Value: 6
  misc_feature: MA Experiment 20000069 PARAMETER Experiment Name: At_100uM_ABA_Mutants_cDNA_P Parameter: Tissue Value: Aerial
  misc_feature: MA Experiment 20000069 PARAMETER Experiment Name: At_100uM_ABA_Mutants_cDNA_P Parameter: Treatment Value: 100uM ABA vs. No Treatment
  misc_feature: MA Experiment ID: 20000071 Result: Up-regulated in Transcription
  misc_feature: MA Experiment 20000071 PARAMETER Experiment Name: At_100uM_ABA_Mutants_cDNA_P Parameter: Plant Line Value: CS8104
  misc_feature: MA Experiment 20000071 PARAMETER Experiment Name: At_100uM_ABA_Mutants_cDNA_P Parameter: Timepoint (hr) Value: 6
  misc_feature: MA Experiment 20000071 PARAMETER Experiment Name: At_100uM_ABA_Mutants_cDNA_P Parameter: Tissue Value: Aerial
  misc_feature: MA Experiment 20000071 PARAMETER Experiment Name: At_100uM_ABA_Mutants_cDNA_P Parameter: Treatment Value: 100uM ABA vs. No Treatment
  misc_feature: MA Experiment ID: 20000088 Result: Up-regulated in Transcription
  misc_feature: MA Experiment 20000088 PARAMETER Experiment Name: At_100uM_ABA_Mutants_cDNA_P Parameter: Plant Line Value: Landsberg
  misc_feature: MA Experiment 20000088 PARAMETER Experiment Name: At_100uM_ABA_Mutants_cDNA_P Parameter: Timepoint (hr) Value: 6
  misc_feature: MA Experiment 20000088 PARAMETER Experiment Name: At_100uM_ABA_Mutants_cDNA_P Parameter: Tissue Value: Aerial
  misc_feature: MA Experiment 20000088 PARAMETER Experiment Name: At_100uM_ABA_Mutants_cDNA_P Parameter: Treatment Value: 100uM ABA vs. No Treatment
  misc_feature: MA Experiment ID: 20000117 Result: Up-regulated in Transcription
  misc_feature: MA Experiment 20000117 PARAMETER Experiment Name: At_100uM_ABA_Mutants_cDNA_P Parameter: Plant Line Value: Columbia
  misc_feature: MA Experiment 20000117 PARAMETER Experiment Name: At_100uM_ABA_Mutants_cDNA_P Parameter: Timepoint (hr) Value: 6
  misc_feature: MA Experiment 20000117 PARAMETER Experiment Name: At_100uM_ABA_Mutants_cDNA_P Parameter: Tissue Value: Aerial
  misc_feature: MA Experiment 20000117 PARAMETER Experiment Name: At_100uM_ABA_Mutants_cDNA_P Parameter: Treatment Value: 100uM ABA vs. No Treatment
  misc_feature: MA Experiment ID: 20000185 Result: Down-regulated in Transcription
  misc_feature: MA Experiment 20000185 PARAMETER Experiment Name: At_Roots__P Parameter: Age (day) Value: 7 vs. 21
  misc_feature: MA Experiment 20000185 PARAMETER Experiment Name: At_Roots__P Parameter: Organism Value: A. thaliana
  misc_feature: MA Experiment 20000185 PARAMETER Experiment Name: At_Roots__P Parameter: Tissue Value: Roots vs. Whole Plant
  misc_feature: MA Experiment ID: 20000227 Result: Up-regulated in Transcription
  misc_feature: MA Experiment 20000227 PARAMETER Experiment Name: At_Root-Tips-vs-Tops_P Parameter: Tissue Value: Root Tips vs. Root Tops
  misc_feature: MA Experiment ID: 20000264 Result: Up-regulated in Transcription
  misc_feature: MA Experiment 20000264 PARAMETER Experiment Name: At_Open_Flower_P Parameter: Age (day) Value: 21
  misc_feature: MA Experiment 20000264 PARAMETER Experiment Name: At_Open_Flower_P Parameter: Plant Line Value: WS
  misc_feature: MA Experiment 20000264 PARAMETER Experiment Name: At_Open_Flower_P Parameter: Tissue Value: Open Flower vs. Whole Plant
  misc_feature: MA Experiment ID: 20000286 Result: Up-regulated in Transcription
  misc_feature: MA Experiment 20000286 PARAMETER Experiment Name: At_Open_Flower_P Parameter: Age (day) Value: 21
  misc_feature: MA Experiment 20000286 PARAMETER Experiment Name: At_Open_Flower_P Parameter: Plant Line Value: WS
  misc_feature: MA Experiment 20000286 PARAMETER Experiment Name: At_Open_Flower_P Parameter: Tissue Value: Half Open vs. Whole Plant
  misc_feature: MA Experiment ID: 20000438 Result: Down-regulated in Transcription
  misc_feature: MA Experiment 20000438 PARAMETER Experiment Name: At_Shoots__P Parameter: Age (day) Value: 14
  misc_feature: MA Experiment 20000438 PARAMETER Experiment Name: At_Shoots__P Parameter: Tissue Value: Shoots vs. Whole Plant
  misc_feature: MA Experiment ID: 20000439 Result: Down-regulated in Transcription
  misc_feature: MA Experiment 20000439 PARAMETER Experiment Name: At_Roots__P Parameter: Age (day) Value: 14 vs. 21
  misc_feature: MA Experiment 20000439 PARAMETER Experiment Name: At_Roots__P Parameter: Organism Value: A. thaliana
  misc_feature: MA Experiment 20000439 PARAMETER Experiment Name: At_Roots__P Parameter: Tissue Value: Roots vs. Whole Plant
  misc_feature: MA Experiment ID: 20000794 Result: Up-regulated in Transcription
  misc_feature: MA Experiment 20000794 PARAMETER Experiment Name: At_Petals_P Parameter: Age (day) Value: 23-25 days
  misc_feature: MA Experiment 20000794 PARAMETER Experiment Name: At_Petals_P Parameter: Plant Line Value: WS
  misc_feature: MA Experiment 20000794 PARAMETER Experiment Name: At_Petals_P Parameter: Tissue Value: Petals vs. Whole plant
  misc_feature: MA Experiment ID: 20001554 Result: Up-regulated in Transcription
  misc_feature: MA Experiment 20001554 PARAMETER Experiment Name: At_Drought_Soil_Dry_P Parameter: Age (day) Value: 21
  misc_feature: MA Experiment 20001554 PARAMETER Experiment Name: At_Drought_Soil_Dry_P Parameter: Organism Value: A. thaliana
  misc_feature: MA Experiment 20001554 PARAMETER Experiment Name: At_Drought_Soil_Dry_P Parameter: Plant Line Value: WS
  misc_feature: MA Experiment 20001554 PARAMETER Experiment Name: At_Drought_Soil_Dry_P Parameter: Post Timepoint (hr) Value: None
  misc_feature: MA Experiment 20001554 PARAMETER Experiment Name: At_Drought_Soil_Dry_P Parameter: Post-Treatment Value: None
  misc_feature: MA Experiment 20001554 PARAMETER Experiment Name: At_Drought_Soil_Dry_P Parameter: Timepoint (day) Value: 7
  misc_feature: MA Experiment 20001554 PARAMETER Experiment Name: At_Drought_Soil_Dry_P Parameter: Treatment Value: Drought vs. No Drought
  misc_feature: MA Experiment ID: 20001757 Result: Down-regulated in Transcription
  misc_feature: MA Experiment 20001757 PARAMETER Experiment Name: At_50mM_NH4NO3_L-to-H_P Parameter: Timepoint (hr) Value: 6
  misc_feature: MA Experiment 20001757 PARAMETER Experiment Name: At_50mM_NH4NO3_L-to-H_P Parameter: Tissue Value: Leaf
  misc_feature: MA Experiment 20001757 PARAMETER Experiment Name: At_50mM_NH4NO3_L-to-H_P Parameter: Treatment Value: 50mM NH4NO3 vs 100mM Mannitol
aacaagaacacagtaacgcaatcacagactccacagtccaaggagttttgcatactcaccaagccacaatcatttctctcttctctatctctctggttttgaatcggcgacgactgagtcaactcggtgttgttactggtttcgtcgtatgtgttgtaactgattaagttgatggatccgagtgggatgatgaacgaaggaggaccgtttaatctagcggagatctggcagtttccgttgaacggagtttcaaccgccggagattcttctagaagaagcttcgttggaccgaatcagttcggtgatgctgatctaaccacagctgctaacggtgatccagcgcgtatgagtcacgcgttgtctcaggcggttattgaaggtatctccggcgcttggaaacggagggaagatgagtctaagtcggcgaagatcgtctccaccattggcgctagtgaaggtgagaacaaaagacagaagatagatgaagtgtgtgatgggaaagcagaagcagaatcgctaggaacagagacggaacaaaagaagcaacagatggaaccaacgaaagattatattcatgttcgagctagaagaggtcaagctactgatagtcacagtttagctgaaagagcgagaagagagaaaataagtgagcggatgaaaatcttgcaagatcttgttccgggatgtaacaaggttattggaaaagcacttgttctagatgagataattaactatatacaatcattgcaacgtcaagttgagttcttatcgatgaagcttgaagcagtcaactcaagaatgaaccctggtatcgaggtttttccacccaaagagtttggtcagcaagcgtttgagaatccggagatacagttcgggtcgcagtctacgagggaatacagtagaggagcatcaccagagtggttgcacatgcagataggatcaggtggtttcgaaagaacgtcttgataaagaaacaacacttggtcatcatcttactacaaataagatctaaaagctctaatatcccgagaagaaaaagcatacatacatataaatctcattctcattataggtttaaatatatggatgtgaatatacacatcatattgttgttctgaagaaagcaaaatagaaaagaagatatagttagtttcgacatcaagaaaaaacaagctgggaagggtttaaagtagaagaaacctcttgtaaaagaaaaaacgtttgttgttataaaattgtatctcattcttac

SEQ ID NO: 101432 - protein, 264 aa, Arabidopsis thaliana; identical to SEQ ID NO: 35683
  peptide (1)..(264): Ceres Seq. ID no. 13607855
  misc_feature (143)..(193): Pfam Name: Helix-loop-helix DNA-binding domain Pfam Description: Helix-loop-helix DNA-binding domain
  misc_feature (1)..(264): Homolog of NCBI NO: 18406408 NR Description: bHLH protein [Arabidopsis thaliana] putative bHLH protein [Arabidopsis thaliana]
  misc_feature (1)..(264): Homolog of NCBI NO: 21592490 NR Description: unknown [Arabidopsis thaliana]
  misc_feature (7)..(247): Homolog of NCBI NO: 25404871 NR Description: protein T30E16.21 [imported] - Arabidopsis >gi|8778763|gb|AAF79771.1|AC009317_30 T30E16.21 [Arabidopsis
  misc_feature (222)..(264): Homolog of NCBI NO: 25404871 NR Description: protein T30E16.21 [imported] - Arabidopsis >gi|8778763|gb|AAF79771.1|AC009317_30 T30E16.21 [Arabidopsis
  misc_feature (1)..(247): Homolog of NCBI NO: 25453562 NR Description: helix-loop-helix protein homolog [imported] -
  misc_feature (1)..(247): Homolog of NCBI NO: 30696324 NR Description: bHLH protein [Arabidopsis thaliana]
  misc_feature (1)..(264): Homolog of NCBI NO: 33339703 NR Description: MYC1 [Catharanthus roseus]
  misc_feature (12)..(264): Homolog of NCBI NO: 29150361 NR Description: hypothetical protein [Oryza sativa (japonica
  misc_feature (13)..(264): Homolog of NCBI NO: 15241896 NR Description: bHLH protein family [Arabidopsis thaliana]
  misc_feature (93)..(238): Homolog of NCBI NO: 15239013 NR Description: bHLH protein family [Arabidopsis thaliana] contains similarity to unknown [Arabidopsis thaliana] >gi|27754625|gb|AAO22758.1| unknown

SEQ ID NO: 101433 - protein, 259 aa, Arabidopsis thaliana; identical to SEQ ID NO: 35684
  peptide (1)..(259): Ceres Seq. ID no. 13607856
  misc_feature (138)..(188): Pfam Name: Helix-loop-helix DNA-binding domain Pfam Description: Helix-loop-helix DNA-binding domain
  misc_feature (1)..(259): Homolog of NCBI NO: 18406408 NR Description: bHLH protein [Arabidopsis thaliana] putative bHLH protein [Arabidopsis thaliana]
  misc_feature (1)..(259): Homolog of NCBI NO: 21592490 NR Description: unknown [Arabidopsis thaliana]
  misc_feature (2)..(242): Homolog of NCBI NO: 25404871 NR Description: protein T30E16.21 [imported] - Arabidopsis >gi|8778763|gb|AAF79771.1|AC009317_30 T30E16.21 [Arabidopsis
  misc_feature (217)..(259): Homolog of NCBI NO: 25404871 NR Description: protein T30E16.21 [imported] - Arabidopsis >gi|8778763|gb|AAF79771.1|AC009317_30 T30E16.21 [Arabidopsis
  misc_feature (1)..(242): Homolog of NCBI NO: 25453562 NR Description: helix-loop-helix protein homolog [imported] -
  misc_feature (1)..(242): Homolog of NCBI NO: 30696324 NR Description: bHLH protein [Arabidopsis thaliana]
  misc_feature (1)..(259): Homolog of NCBI NO: 33339703 NR Description: MYC1 [Catharanthus roseus]
  misc_feature (7)..(259): Homolog of NCBI NO: 29150361 NR Description: hypothetical protein [Oryza sativa (japonica
  misc_feature (8)..(259): Homolog of NCBI NO: 15241896 NR Description: bHLH protein family [Arabidopsis thaliana]
  misc_feature (88)..(233): Homolog of NCBI NO: 15239013 NR Description: bHLH protein family [Arabidopsis thaliana] contains similarity to unknown [Arabidopsis thaliana] >gi|27754625|gb|AAO22758.1| unknown

SEQ ID NO: 101434 - protein, 258 aa, Arabidopsis thaliana; identical to SEQ ID NO: 35685
  peptide (1)..(258): Ceres Seq. ID no. 13607857
  misc_feature (137)..(187): Pfam Name: Helix-loop-helix DNA-binding domain Pfam Description: Helix-loop-helix DNA-binding domain
  misc_feature (1)..(258): Homolog of NCBI NO: 18406408 NR Description: bHLH protein [Arabidopsis thaliana] putative bHLH protein [Arabidopsis thaliana]
  misc_feature (1)..(258): Homolog of NCBI NO: 21592490 NR Description: unknown [Arabidopsis thaliana]
  misc_feature (1)..(241): Homolog of NCBI NO: 25404871 NR Description: protein T30E16.21 [imported] - Arabidopsis >gi|8778763|gb|AAF79771.1|AC009317_30 T30E16.21 [Arabidopsis
  misc_feature (216)..(258): Homolog of NCBI NO: 25404871 NR Description: protein T30E16.21 [imported] - Arabidopsis >gi|8778763|gb|AAF79771.1|AC009317_30 T30E16.21 [Arabidopsis
  misc_feature (1)..(241): Homolog of NCBI NO: 25453562 NR Description: helix-loop-helix protein homolog [imported] -
  misc_feature (1)..(241): Homolog of NCBI NO: 30696324 NR Description: bHLH protein [Arabidopsis thaliana]
  misc_feature (1)..(258): Homolog of NCBI NO: 33339703 NR Description: MYC1 [Catharanthus roseus]
  misc_feature (6)..(258): Homolog of NCBI NO: 29150361 NR Description: hypothetical protein [Oryza sativa (japonica
  misc_feature (7)..(258): Homolog of NCBI NO: 15241896 NR Description: bHLH protein family [Arabidopsis thaliana]
  misc_feature (87)..(232): Homolog of NCBI NO: 15239013 NR Description: bHLH protein family [Arabidopsis thaliana] contains similarity to unknown [Arabidopsis thaliana] >gi|27754625|gb|AAO22758.1| unknown

SEQ ID NO: 101435 - DNA, 1998 bp, Arabidopsis thaliana
  misc_feature (1)..(1998): Ceres Seq. ID no. 13607858
  misc_feature: MA Experiment ID: 20000166 Result: Down-regulated in Transcription
  misc_feature: MA Experiment 20000166 PARAMETER Experiment Name: At_100uM_ABA_P Parameter: Age (day) Value: 14
  misc_feature: MA Experiment 20000166 PARAMETER Experiment Name: At_100uM_ABA_P Parameter: Organism Value: A. thaliana
  misc_feature: MA Experiment 20000166 PARAMETER Experiment Name: At_100uM_ABA_P Parameter: Plant Line Value: WS
  misc_feature: MA Experiment 20000166 PARAMETER Experiment Name: At_100uM_ABA_P Parameter: Timepoint (hr) Value: 1
  misc_feature: MA Experiment 20000166 PARAMETER Experiment Name: At_100uM_ABA_P Parameter: Tissue Value: Aerial
  misc_feature: MA Experiment 20000166 PARAMETER Experiment Name: At_100uM_ABA_P Parameter: Treatment Value: 100uM ABA vs. No Treatment
  misc_feature: MA Experiment ID: 20000171 Result: Down-regulated in Transcription
  misc_feature: MA Experiment 20000171 PARAMETER Experiment Name: At_42deg_Heat_P Parameter: Age (day) Value: 14
  misc_feature: MA Experiment 20000171 PARAMETER Experiment Name: At_42deg_Heat_P Parameter: Organism Value: A. thaliana
  misc_feature: MA Experiment 20000171 PARAMETER Experiment Name: At_42deg_Heat_P Parameter: Plant Line Value: WS
  misc_feature: MA Experiment 20000171 PARAMETER Experiment Name: At_42deg_Heat_P Parameter: Temperature (deg C) Value: 42 vs. 22
  misc_feature: MA Experiment 20000171 PARAMETER Experiment Name: At_42deg_Heat_P Parameter: Timepoint (hr) Value: 1
  misc_feature: MA Experiment 20000171 PARAMETER Experiment Name: At_42deg_Heat_P Parameter: Tissue Value: Aerial
  misc_feature: MA Experiment ID: 20000173 Result: Down-regulated in Transcription
  misc_feature: MA Experiment 20000173 PARAMETER Experiment Name: At_42deg_Heat_P Parameter: Age (day) Value: 14
  misc_feature: MA Experiment 20000173 PARAMETER Experiment Name: At_42deg_Heat_P Parameter: Organism Value: A. thaliana
  misc_feature: MA Experiment 20000173 PARAMETER Experiment Name: At_42deg_Heat_P Parameter: Plant Line Value: WS
  misc_feature: MA Experiment 20000173 PARAMETER Experiment Name: At_42deg_Heat_P Parameter: Temperature (deg C) Value: 42 vs. 22
  misc_feature: MA Experiment 20000173 PARAMETER Experiment Name: At_42deg_Heat_P Parameter: Timepoint (hr) Value: 6
  misc_feature: MA Experiment 20000173 PARAMETER Experiment Name: At_42deg_Heat_P Parameter: Tissue Value: Aerial
  misc_feature: MA Experiment ID: 20000213 Result: Up-regulated in Transcription
  misc_feature: MA Experiment 20000213 PARAMETER Experiment Name: At_4deg_Cold_P Parameter: Timepoint (hr) Value: 2
  misc_feature: MA Experiment ID: 20000264 Result: Up-regulated in Transcription
  misc_feature: MA Experiment 20000264 PARAMETER Experiment Name: At_Open_Flower_P Parameter: Age (day) Value: 21
  misc_feature: MA Experiment 20000264 PARAMETER Experiment Name: At_Open_Flower_P Parameter: Plant Line Value: WS
  misc_feature: MA Experiment 20000264 PARAMETER Experiment Name: At_Open_Flower_P Parameter: Tissue Value: Open Flower vs. Whole Plant
  misc_feature: MA Experiment ID: 20000286 Result: Up-regulated in Transcription
  misc_feature: MA Experiment 20000286 PARAMETER Experiment Name: At_Open_Flower_P Parameter: Age (day) Value: 21
  misc_feature: MA Experiment 20000286 PARAMETER Experiment Name: At_Open_Flower_P Parameter: Plant Line Value: WS
  misc_feature: MA Experiment 20000286 PARAMETER Experiment Name: At_Open_Flower_P Parameter: Tissue Value: Half Open vs. Whole Plant
  misc_feature: MA Experiment ID: 20000794 Result: Up-regulated in Transcription
  misc_feature: MA Experiment 20000794 PARAMETER Experiment Name: At_Petals_P Parameter: Age (day) Value: 23-25 days
  misc_feature: MA Experiment 20000794 PARAMETER Experiment Name: At_Petals_P Parameter: Plant Line Value: WS
  misc_feature: MA Experiment 20000794 PARAMETER Experiment Name: At_Petals_P Parameter: Tissue Value: Petals vs. Whole plant
  misc_feature: MA Experiment ID: 20001557 Result: Up-regulated in Transcription
  misc_feature: MA Experiment 20001557 PARAMETER Experiment Name: At_Drought_Soil_Dry_P Parameter: Age (day) Value: 27
  misc_feature: MA Experiment 20001557 PARAMETER Experiment Name: At_Drought_Soil_Dry_P Parameter: Organism Value: A. thaliana
  misc_feature: MA Experiment 20001557 PARAMETER Experiment Name: At_Drought_Soil_Dry_P Parameter: Plant Line Value: WS
  misc_feature: MA Experiment 20001557 PARAMETER Experiment Name: At_Drought_Soil_Dry_P Parameter: Post Timepoint (hr) Value: 3
  misc_feature: MA Experiment 20001557 PARAMETER Experiment Name: At_Drought_Soil_Dry_P Parameter: Post-Treatment Value: Re-Water vs. No Drought
  misc_feature: MA Experiment 20001557 PARAMETER Experiment Name: At_Drought_Soil_Dry_P Parameter: Timepoint (day) Value: 13
  misc_feature: MA Experiment 20001557 PARAMETER Experiment Name: At_Drought_Soil_Dry_P Parameter: Treatment Value: Drought vs. No Drought
agtatttatattatcatgcatttctaatctctactttgtcaattcctatactttcactctcttccaattatataatctctggtccatagaaaacatcggtctcttgtcaccgttgattttatttggtcaaaatcattcttcttctcgctgaataatcgttgatttcacttcttcttctggtcttaaaaaaattcaagatctatacgagaaaacacaaaacaagtaaaactttttcaaccgtttttcctgtcggtaaagtttggattcttcttagtaaattttggtcttattgtcgaccaaaagaagaagatggtcgttcagaatgttcaagatttggatgttcttccgaaacatagctcggattcattcgatgatgatggtcgtcccaagcgaaccgggacggtgtggacagcaagtgcacacataataacagcagtaattgggtcaggagtgttgtcattggcatgggccgttgctcagattggttggattggtggtccagtggctatgttactcttttctttcgttactttttacacatctacccttctctgttcttgttaccgatctggtgactctgttaccggcaaaagaaactacacttacatggacgctattcactccaacctcggtgggattaaggtgaaagtatgtggagttgtgcaatatgttaatctatttggtacagcaattggatatacaattgcatcagctataagtttggtagcaatccaaaggacaagttgccaacagatgaatggaccaaatgatccttgtcatgttaatggaaatgtttacatgattgcgtttggtattgtacaaatcatattctctcagattcctgattttgatcagttatggtggctttccattgtcgctgcggtcatgtcttttgcttattctgccattggacttggccttggtgtctctaaagtggtagagaacaaagaaattaaaggtagtctcactggagtcactgttgggacagtgacactgagtgggacagtgacatcgtcgcagaaaatatggagaacatttcagtctcttggcaacattgcgtttgcgtactcttactcgatgattctcatcgaaattcaggacacggtgaaatcaccgcctgccgaagtaaacacgatgagaaaagcgacttttgtaagtgtggcagtgactacagtcttctacatgctatgtggctgtgtagggtatgcagcatttggggataacgcacccggaaatctcctcgctcatggagggtttagaaacccatattggttgcttgacattgctaatctcgctatagtgatccatctagtcggtgcttaccaagtctattgccaacccctctttgccttcgtcgagaaggaagcctctaggaggtttccagagagcgaattcgtcacaaaagagatcaagatccaactcttcccggggaagccctttaacttgaatctcttcaggctcgtatggaggacgttcttcgtgatgacaacaacgttgatctcaatgttaatgcctttctttaacgatgtagtcggtctcttgggggccattggtttttggcctttaacggtttatttcccagtggaaatgtacattgcacagaagaatgttccgagatggggcacaaagtgggtttgtctacaagtcttgagtgtgacatgtctttttgtgtccgtagccgcggccgcgggatctgttattggcattgttagtgatctcaaggtctacaaacctttccagtctgaattctgagatcatacgggaaaaataaactcctgctaaaagggttaagattagaattgaatgttttaatgtcatatttgtattagttaactttgtgtaagtgttcaattataaatcatgtttctaccgagaattcttacaacattgaactatcaatgattaaaagtagtcatgtataaggatagctttttcgacacttgaggtagtagagatgtattaaacatttaatacttataattaattttagaagtctat

SEQ ID NO: 101436 - protein, 480 aa, Arabidopsis thaliana
  peptide (1)..(480): Ceres Seq. ID no. 13607859
  misc_feature (1)..(480): Homolog of NCBI NO: 30693784 NR Description: amino acid permease 5 (AAP5) [Arabidopsis >gi|27311567|gb|AAO00749.1| amino acid permease, putative
  misc_feature (1)..(480): Homolog of NCBI NO: 608673 NR Description: amino acid permease [Arabidopsis thaliana]
  misc_feature (1)..(480): Homolog of NCBI NO: 25297689 NR Description: probable amino acid permease [imported] - thaliana >gi|12320827|gb|AAG50558.1|AC074228_13 amino acid
  misc_feature (4)..(480): Homolog of NCBI NO: 21553710 NR Description: amino acid carrier, putative [Arabidopsis
  misc_feature (4)..(480): Homolog of NCBI NO: 15223930 NR Description: amino acid carrier, putative [Arabidopsis
  misc_feature (21)..(480): Homolog of NCBI NO: 7442735 NR Description: amino acid transport protein AAP1 - castor bean
  misc_feature (17)..(478): Homolog of NCBI NO: 27447657 NR Description: amino acid transporter [Lycopersicon esculentum]
  misc_feature (17)..(478): Homolog of NCBI NO: 15216030 NR Description: amino acid permease AAP4 [Vicia faba var. minor]
MVVQNVQDLDVLPKHSSDSFDDDGRPKRTGTVWTASAHIITAVIGSGVLSLAWAVAQIGWIGGPVAMLLFSFVTFYTSTLLCSCYRSGDSVTGKRNYTYMDAIHSNLGGIKVKVCGVVQYVNLFGTAIGYTIASAISLVAIQRTSCQQMNGPNDPCHVNGNVYMIAFGIVQIIFSQIPDFDQLWWLSIVAAVMSFAYSAIGLGLGVSKVVENKEIKGSLTGVTVGTVTLSGTVTSSQKIWRTFQSLGNIAFAYSYSMILIEIQDTVKSPPAEVNTMRKATFVSVAVTTVFYMLCGCVGYAAFGDNAPGNLLAHGGFRNPYWLLDIANLAIVIHLVGAYQVYCQPLFAFVEKEASRRFPESEFVTKEIKIQLFPGKPFNLNLFRLVWRTFFVMTTTLISMLMPFFNDVVGLLGAIGFWPLTVYFPVEMYIAQKNVPRWGTKWVCLQVLSVTCLFVSVAAAAGSVIGIVSDLKVYKPFQSEF

SEQ ID NO: 101437 - protein, 414 aa, Arabidopsis thaliana
  peptide (1)..(414): Ceres Seq. ID no. 13607860
  misc_feature (1)..(414): Homolog of NCBI NO: 30693784 NR Description: amino acid permease 5 (AAP5) [Arabidopsis >gi|27311567|gb|AAO00749.1| amino acid permease, putative
  misc_feature (1)..(414): Homolog of NCBI NO: 608673 NR Description: amino acid permease [Arabidopsis thaliana]
  misc_feature (1)..(414): Homolog of NCBI NO: 25297689 NR Description: probable amino acid permease [imported] - thaliana >gi|12320827|gb|AAG50558.1|AC074228_13 amino acid
  misc_feature (1)..(414): Homolog of NCBI NO: 21553710 NR Description: amino acid carrier, putative [Arabidopsis
  misc_feature (1)..(414): Homolog of NCBI NO: 15223930 NR Description: amino acid carrier, putative [Arabidopsis
  misc_feature (1)..(414): Homolog of NCBI NO: 7442735 NR Description: amino acid transport protein AAP1 - castor bean
  misc_feature (1)..(412): Homolog of NCBI NO: 27447657 NR Description: amino acid transporter [Lycopersicon esculentum]
  misc_feature (1)..(412): Homolog of NCBI NO: 15216030 NR Description: amino acid permease AAP4 [Vicia faba var. minor]
MLLFSFVTFYTSTLLCSCYRSGDSVTGKRNYTYMDAIHSNLGGIKVKVCGVVQYVNLFGTAIGYTIASAISLVAIQRTSCQQMNGPNDPCHVNGNVYMIAFGIVQIIFSQIPDFDQLWWLSIVAAVMSFAYSAIGLGLGVSKVVENKEIKGSLTGVTVGTVTLSGTVTSSQKIWRTFQSLGNIAFAYSYSMILIEIQDTVKSPPAEVNTMRKATFVSVAVTTVFYMLCGCVGYAAFGDNAPGNLLAHGGFRNPYWLLDIANLAIVIHLVGAYQVYCQPLFAFVEKEASRRFPESEFVTKEIKIQLFPGKPFNLNLFRLVWRTFFVMTTTLISMLMPFFNDVVGLLGAIGFWPLTVYFPVEMYIAQKNVPRWGTKWVCLQVLSVTCLFVSVAAAAGSVIGIVSDLKVYKPFQSEF

SEQ ID NO: 101438 - protein, 381 aa, Arabidopsis thaliana
  peptide (1)..(381): Ceres Seq. ID no. 13607861
  misc_feature (1)..(381): Homolog of NCBI NO: 30693784 NR Description: amino acid permease 5 (AAP5) [Arabidopsis >gi|27311567|gb|AAO00749.1| amino acid permease, putative
  misc_feature (1)..(381): Homolog of NCBI NO: 608673 NR Description: amino acid permease [Arabidopsis thaliana]
  misc_feature (1)..(381): Homolog of NCBI NO: 25297689 NR Description: probable amino acid permease [imported] - thaliana >gi|12320827|gb|AAG50558.1|AC074228_13 amino acid
  misc_feature (1)..(381): Homolog of NCBI NO: 21553710 NR Description: amino acid carrier, putative [Arabidopsis
  misc_feature (1)..(381): Homolog of NCBI NO: 15223930 NR Description: amino acid carrier, putative [Arabidopsis
  misc_feature (1)..(381): Homolog of NCBI NO: 7442735 NR Description: amino acid transport protein AAP1 - castor bean
  misc_feature (1)..(379): Homolog of NCBI NO: 27447657 NR Description: amino acid transporter [Lycopersicon esculentum]
  misc_feature (1)..(379): Homolog of NCBI NO: 15216030 NR Description: amino acid permease AAP4 [Vicia faba var. minor]
MDAIHSNLGGIKVKVCGVVQYVNLFGTAIGYTIASAISLVAIQRTSCQQMNGPNDPCHVNGNVYMIAFGIVQIIFSQIPDFDQLWWLSIVAAVMSFAYSAIGLGLGVSKVVENKEIKGSLTGVTVGTVTLSGTVTSSQKIWRTFQSLGNIAFAYSYSMILIEIQDTVKSPPAEVNTMRKATFVSVAVTTVFYMLCGCVGYAAFGDNAPGNLLAHGGFRNPYWLLDIANLAIVIHLVGAYQVYCQPLFAFVEKEASRRFPESEFVTKEIKIQLFPGKPFNLNLFRLVWRTFFVMTTTLISMLMPFFNDVVGLLGAIGFWPLTVYFPVEMYIAQKNVPRWGTKWVCLQVLSVTCLFVSVAAAAGSVIGIVSDLKVYKPFQSEF

SEQ ID NO: 101439 - DNA, 1682 bp, Arabidopsis thaliana
  misc_feature (1)..(1682): Ceres Seq. ID no. 13607862
  misc_feature: MA Experiment ID: 20000169 Result: Up-regulated in Transcription
  misc_feature: MA Experiment 20000169 PARAMETER Experiment Name: At_100uM_ABA_P Parameter: Age (day) Value: 14
  misc_feature: MA Experiment 20000169 PARAMETER Experiment Name: At_100uM_ABA_P Parameter: Organism Value: A. thaliana
  misc_feature: MA Experiment 20000169 PARAMETER Experiment Name: At_100uM_ABA_P Parameter: Plant Line Value: WS
  misc_feature: MA Experiment 20000169 PARAMETER Experiment Name: At_100uM_ABA_P Parameter: Timepoint (hr) Value: 6
  misc_feature: MA Experiment 20000169 PARAMETER Experiment Name: At_100uM_ABA_P Parameter: Tissue Value: Aerial
  misc_feature: MA Experiment 20000169 PARAMETER Experiment Name: At_100uM_ABA_P Parameter: Treatment Value: 100uM ABA vs. No Treatment
  misc_feature: MA Experiment ID: 20000173 Result: Down-regulated in Transcription
  misc_feature: MA Experiment 20000173 PARAMETER Experiment Name: At_42deg_Heat_P Parameter: Age (day) Value: 14
  misc_feature: MA Experiment 20000173 PARAMETER Experiment Name: At_42deg_Heat_P Parameter: Organism Value: A. thaliana
  misc_feature: MA Experiment 20000173 PARAMETER Experiment Name: At_42deg_Heat_P Parameter: Plant Line Value: WS
  misc_feature: MA Experiment 20000173 PARAMETER Experiment Name: At_42deg_Heat_P Parameter: Temperature (deg C) Value: 42 vs. 22
  misc_feature: MA Experiment 20000173 PARAMETER Experiment Name: At_42deg_Heat_P Parameter: Timepoint (hr) Value: 6
  misc_feature: MA Experiment 20000173 PARAMETER Experiment Name: At_42deg_Heat_P Parameter: Tissue Value: Aerial
  misc_feature: MA Experiment ID: 20000179 Result: Up-regulated in Transcription
  misc_feature: MA Experiment 20000179 PARAMETER Experiment Name: At_Germinating_Seeds_P Parameter: Age (hr) Value: 6 vs. 0
  misc_feature: MA Experiment 20000179 PARAMETER Experiment Name: At_Germinating_Seeds_P Parameter: Tissue Value: Germinating Seeds
  misc_feature: MA Experiment ID: 20000180 Result: Up-regulated in Transcription
  misc_feature: MA Experiment 20000180 PARAMETER Experiment Name: At_Germinating_Seeds_P Parameter: Age (hr) Value: 24 vs. 0
  misc_feature: MA Experiment 20000180 PARAMETER Experiment Name: At_Germinating_Seeds_P Parameter: Tissue Value: Germinating Seeds
  misc_feature: MA Experiment ID: 20000185 Result: Up-regulated in Transcription
  misc_feature: MA Experiment 20000185 PARAMETER Experiment Name: At_Roots__P Parameter: Age (day) Value: 7 vs. 21
  misc_feature: MA Experiment 20000185 PARAMETER Experiment Name: At_Roots__P Parameter: Organism Value: A. thaliana
  misc_feature: MA Experiment 20000185 PARAMETER Experiment Name: At_Roots__P Parameter: Tissue Value: Roots vs. Whole Plant
  misc_feature: MA Experiment ID: 20000264 Result: Up-regulated in Transcription
  misc_feature: MA Experiment 20000264 PARAMETER Experiment Name: At_Open_Flower_P Parameter: Age (day) Value: 21
  misc_feature: MA Experiment 20000264 PARAMETER Experiment Name: At_Open_Flower_P Parameter: Plant Line Value: WS
  misc_feature: MA Experiment 20000264 PARAMETER Experiment Name: At_Open_Flower_P Parameter: Tissue Value: Open Flower vs. Whole Plant
  misc_feature: MA Experiment ID: 20000265 Result: Up-regulated in Transcription
  misc_feature: MA Experiment 20000265 PARAMETER Experiment Name: At_Open_Flower_P Parameter: Age (day) Value: 21
  misc_feature: MA Experiment 20000265 PARAMETER Experiment Name: At_Open_Flower_P Parameter: Plant Line Value: WS
  misc_feature: MA Experiment 20000265 PARAMETER Experiment Name: At_Open_Flower_P Parameter: Tissue Value: Closed Flower vs. Whole Plant
  misc_feature: MA Experiment ID: 20000286 Result: Up-regulated in Transcription
  misc_feature: MA Experiment 20000286 PARAMETER Experiment Name: At_Open_Flower_P Parameter: Age (day) Value: 21
  misc_feature: MA Experiment 20000286 PARAMETER Experiment Name: At_Open_Flower_P Parameter: Plant Line Value: WS
  misc_feature: MA Experiment 20000286 PARAMETER Experiment Name: At_Open_Flower_P Parameter: Tissue Value: Half Open vs. Whole Plant
  misc_feature: MA Experiment ID: 20000439 Result: Up-regulated in Transcription
  misc_feature: MA Experiment 20000439 PARAMETER Experiment Name: At_Roots__P Parameter: Age (day) Value: 14 vs. 21
  misc_feature: MA Experiment 20000439 PARAMETER Experiment Name: At_Roots__P Parameter: Organism Value: A. thaliana
  misc_feature: MA Experiment 20000439 PARAMETER Experiment Name: At_Roots__P Parameter: Tissue Value: Roots vs. Whole Plant
  misc_feature: MA Experiment ID: 20000794 Result: Up-regulated in Transcription
  misc_feature: MA Experiment 20000794 PARAMETER Experiment Name: At_Petals_P Parameter: Age (day) Value: 23-25 days
  misc_feature: MA Experiment 20000794 PARAMETER Experiment Name: At_Petals_P Parameter: Plant Line Value: WS
  misc_feature: MA Experiment 20000794 PARAMETER Experiment Name: At_Petals_P Parameter: Tissue Value: Petals vs. Whole plant
  misc_feature: MA Experiment ID: 20001557 Result: Down-regulated in Transcription
  misc_feature: MA Experiment 20001557 PARAMETER Experiment Name: At_Drought_Soil_Dry_P Parameter: Age (day) Value: 27
  misc_feature: MA Experiment 20001557 PARAMETER Experiment Name: At_Drought_Soil_Dry_P Parameter: Organism Value: A. thaliana
  misc_feature: MA Experiment 20001557 PARAMETER Experiment Name: At_Drought_Soil_Dry_P Parameter: Plant Line Value: WS
  misc_feature: MA Experiment 20001557 PARAMETER Experiment Name: At_Drought_Soil_Dry_P Parameter: Post Timepoint (hr) Value: 3
  misc_feature: MA Experiment 20001557 PARAMETER Experiment Name: At_Drought_Soil_Dry_P Parameter: Post-Treatment Value: Re-Water vs. No Drought
  misc_feature: MA Experiment 20001557 PARAMETER Experiment Name: At_Drought_Soil_Dry_P Parameter: Timepoint (day) Value: 13
  misc_feature: MA Experiment 20001557 PARAMETER Experiment Name: At_Drought_Soil_Dry_P Parameter: Treatment Value: Drought vs. No Drought
  misc_feature: MA Experiment ID: 20001558 Result: Down-regulated in Transcription
  misc_feature: MA Experiment 20001558 PARAMETER Experiment Name: At_Drought_Soil_Dry_P Parameter: Age (day) Value: 27
  misc_feature: MA Experiment 20001558 PARAMETER Experiment Name: At_Drought_Soil_Dry_P Parameter: Organism Value: A. thaliana
  misc_feature: MA Experiment 20001558 PARAMETER Experiment Name: At_Drought_Soil_Dry_P Parameter: Plant Line Value: WS
  misc_feature: MA Experiment 20001558 PARAMETER Experiment Name: At_Drought_Soil_Dry_P Parameter: Post Timepoint (hr) Value: 6
  misc_feature: MA Experiment 20001558 PARAMETER Experiment Name: At_Drought_Soil_Dry_P Parameter: Post-Treatment Value: Re-Water vs. No Drought
  misc_feature: MA Experiment 20001558 PARAMETER Experiment Name: At_Drought_Soil_Dry_P Parameter: Timepoint (day) Value: 13
  misc_feature: MA Experiment 20001558 PARAMETER Experiment Name: At_Drought_Soil_Dry_P Parameter: Treatment Value: Drought vs. No Drought
  misc_feature: MA Experiment ID: 20001905 Result: Up-regulated in Transcription
  misc_feature: MA Experiment 20001905 PARAMETER Experiment Name: At_Drought_Reproduction_P Parameter: Age (day) Value: 40
  misc_feature: MA Experiment 20001905 PARAMETER Experiment Name: At_Drought_Reproduction_P Parameter: Organism Value: A. thaliana
  misc_feature: MA Experiment 20001905 PARAMETER Experiment Name: At_Drought_Reproduction_P Parameter: Plant Line Value: WS
  misc_feature: MA Experiment 20001905 PARAMETER Experiment Name: At_Drought_Reproduction_P Parameter: Timepoint (day) Value: 10
  misc_feature: MA Experiment 20001905 PARAMETER Experiment Name: At_Drought_Reproduction_P Parameter: Tissue Value: Rosettes
  misc_feature: MA Experiment 20001905 PARAMETER Experiment Name: At_Drought_Reproduction_P Parameter: Treatment Value: Drought vs. No Drought
  misc_feature: MA Experiment ID: 20001911 Result: Down-regulated in Transcription
  misc_feature: MA Experiment 20001911 PARAMETER Experiment Name: At_Drought_Reproduction_P Parameter: Age (day) Value: 40
  misc_feature: MA Experiment 20001911 PARAMETER Experiment Name: At_Drought_Reproduction_P Parameter: Organism Value: A. thaliana
  misc_feature: MA Experiment 20001911 PARAMETER Experiment Name: At_Drought_Reproduction_P Parameter: Plant Line Value: WS
  misc_feature: MA Experiment 20001911 PARAMETER Experiment Name: At_Drought_Reproduction_P Parameter: Timepoint (day) Value: 10
  misc_feature: MA Experiment 20001911 PARAMETER Experiment Name: At_Drought_Reproduction_P Parameter: Tissue Value: Flowers
  misc_feature: MA Experiment 20001911 PARAMETER Experiment Name: At_Drought_Reproduction_P Parameter: Treatment Value: Drought vs. No Drought
atcaatttcgaggaataaaagtaagaaacattgcgacaaaaaaaaaaaaaagagatattgaggaatggctgcgaagaaggtttttggatcggcggaagcgagtaatttggtgacggagcttcgtcggagttttgatgatggtgtgacacgtggttatgaatggagagtgactcagcttaagaaactgatgattatttgtgataatcatgagcctgagatcgtcgcggctcttcgcgatgatcttggtaagcctgagcttgaatcttctgtttatgaggtatctctactgagaaactctatcaagttggctcttaagcagctaaagaactggatggctccggagaaggcaaagacttctctaacaacgtttcctgcatccgcggagattgtgtctgagcctcttggtgttgtgctagtgatctcggcttggaactatccttttctgttgtctattgatcctgttattggtgcaatttctgctgggaatgctgttgttttaaagccatcagaattggctccagcttcgtcagctctgctcactaagttactggaacagtatcttgatccttctgcggtgcgagttgtcgaaggagctgttaccgaaacaagtgctctgctagagcagaagtgggacaagatattctacacaggtagttcaaaaatcggacgtgtcataatggcggcagctgcgaagcatctcacaccggttgttctagagcttggaggaaaatctcctgtcgttgtagactcggataccgatttgaaagttaccgtcaggcggataatcgtaggcaaatggggttgtaacaacggacaggcgtgcgtttcgccggactatatcttgacgacaaaagaatatgctcctaaattgattgatgccatgaagcttgaattggagaaattttatgggaagaaccctatagagtcgaaagatatgtcacgtatcgtaaactcgaatcactttgatcgcttgtctaagttgttagacgagaaggaagtttctgacaaaattgtctatggtggtgaaaaggacagagaaaacttgaaaattgctccgacaatcttgctcgatgtaccattagattctctgatcatgagtgaagaaatatttggccctctccttccaatcctcacgcttaacaacttggaagagagctttgacgtgattcgttctcgacctaagccacttgcggcatacttgtttacacataacaagaagttgaaagagagattcgcagcgacagtctccgctggaggcatagtagtcaatgacatagctgttcatcttgcacttcacacattgccattcggaggagttggtgaaagtggaatgggtgcttaccatggtaaattctcatttgatgcttttagtcacaagaaggcggttctctacagaagccttttcggtgattcagccgtcaggtatccgccatactcgagaggaaagcttagattgttaaaagcccttgtcgacagcaatatattcgatttattcaaagtccttctcggtttagcttaaacggtaaaaagaccgaggacacttccctttgtaccttatttacttgttttatttttcaaacatggacttagttggttgatatgttttggtttggtgttgattctatgaatattgaagttgataaataaaagattttcggttgattatggaaaccggtttcttc

SEQ ID NO: 101440 - protein, 484 aa, Arabidopsis thaliana; identical to SEQ ID NO: 77950
  peptide (1)..(484): Ceres Seq. ID no. 13607863
  misc_feature (1)..(445): Pfam Name: Aldehyde dehydrogenase family Pfam Description: Aldehyde dehydrogenase family
  misc_feature (1)..(484): Homolog of NCBI NO: 15219358 NR Description: aldehyde dehydrogenase, putative (ALDH) thaliana] >gi|30693800|ref|NP_849770.1| aldehyde dehydrogenase,
  misc_feature (1)..(484): Homolog of NCBI NO: 21536879 NR Description: aldehyde dehydrogenase, putative [Arabidopsis
  misc_feature (11)..(482): Homolog of NCBI NO: 17065918 NR Description: aldehyde dehydrogenase [Craterostigma
  misc_feature (7)..(484): Homolog of NCBI NO: 18418408 NR Description: aldehyde dehydrogenase, putative (ALDH) thaliana] >gi|15451106|gb|AAK96824.1| putative aldehyde [Arabidopsis thaliana] >gi|20148407|gb|AAM10094.1| putative
  misc_feature (7)..(484): Homolog of NCBI NO: 17065876 NR Description: aldehyde dehydrogenase [Arabidopsis thaliana]
  misc_feature (8)..(483): Homolog of NCBI NO: 33317836 NR Description: aldehyde dehydrogenase [Oryza sativa (indica group)] >gi|38344982|emb|CAE02788.2| OSJNBa0011L07.12 [Oryza
  misc_feature (10)..(469): Homolog of NCBI NO: 23126018 NR Description: hypothetical protein [Nostoc punctiforme]
  misc_feature (1)..(483): Homolog of NCBI NO: 4973431 NR Description: putative aldehyde dehydrogenase OS-ALDH [Oryza
  misc_feature (18)..(228): Homolog of NCBI NO: 15234364 NR Description: aldehyde dehydrogenase family protein
  misc_feature (331)..(483): Homolog of NCBI NO: 15234364 NR Description: aldehyde dehydrogenase family protein

SEQ ID NO: 101441 - protein, 443 aa, Arabidopsis thaliana; identical to SEQ ID NO: 77951
  peptide (1)..(443): Ceres Seq. ID no. 13607864
  misc_feature (1)..(404): Pfam Name: Aldehyde dehydrogenase family Pfam Description: Aldehyde dehydrogenase family
  misc_feature (1)..(443): Homolog of NCBI NO: 15219358 NR Description: aldehyde dehydrogenase, putative (ALDH) thaliana] >gi|30693800|ref|NP_849770.1| aldehyde dehydrogenase,
  misc_feature (1)..(443): Homolog of NCBI NO: 21536879 NR Description: aldehyde dehydrogenase, putative [Arabidopsis
  misc_feature (1)..(441): Homolog of NCBI NO: 17065918 NR Description: aldehyde dehydrogenase [Craterostigma
  misc_feature (1)..(443): Homolog of NCBI NO: 18418408 NR Description: aldehyde dehydrogenase, putative (ALDH) thaliana] >gi|15451106|gb|AAK96824.1| putative aldehyde [Arabidopsis thaliana] >gi|20148407|gb|AAM10094.1| putative
  misc_feature (1)..(443): Homolog of NCBI NO: 17065876 NR Description: aldehyde dehydrogenase [Arabidopsis thaliana]
  misc_feature (1)..(442): Homolog of NCBI NO: 33317836 NR Description: aldehyde dehydrogenase [Oryza sativa (indica group)] >gi|38344982|emb|CAE02788.2| OSJNBa0011L07.12 [Oryza
  misc_feature (1)..(428): Homolog of NCBI NO: 23126018 NR Description: hypothetical protein [Nostoc punctiforme]
  misc_feature (1)..(442): Homolog of NCBI NO: 4973431 NR Description: putative aldehyde dehydrogenase OS-ALDH [Oryza
  misc_feature (1)..(187): Homolog of NCBI NO: 15234364 NR Description: aldehyde dehydrogenase family protein
  misc_feature (290)..(442): Homolog of NCBI NO: 15234364 NR Description: aldehyde dehydrogenase family protein

SEQ ID NO: 101442 - protein, 395 aa, Arabidopsis thaliana; identical to SEQ ID NO: 74729
  peptide (1)..(395): Ceres Seq. ID no. 13607865
  misc_feature (1)..(356): Pfam Name: Aldehyde dehydrogenase family Pfam Description: Aldehyde dehydrogenase family
  misc_feature (1)..(395): Homolog of NCBI NO: 15219358 NR Description: aldehyde dehydrogenase, putative (ALDH) thaliana] >gi|30693800|ref|NP_849770.1| aldehyde dehydrogenase,
  misc_feature (1)..(395): Homolog of NCBI NO: 21536879 NR Description: aldehyde dehydrogenase, putative [Arabidopsis
  misc_feature (1)..(393): Homolog of NCBI NO: 17065918 NR Description: aldehyde dehydrogenase [Craterostigma
  misc_feature (1)..(395): Homolog of NCBI NO: 18418408 NR Description: aldehyde dehydrogenase, putative (ALDH) thaliana] >gi|15451106|gb|AAK96824.1| putative aldehyde [Arabidopsis thaliana] >gi|20148407|gb|AAM10094.1| putative
  misc_feature (1)..(395): Homolog of NCBI NO: 17065876 NR Description: aldehyde dehydrogenase [Arabidopsis thaliana]
  misc_feature (1)..(394): Homolog of NCBI NO: 33317836 NR Description: aldehyde dehydrogenase [Oryza sativa (indica group)] >gi|38344982|emb|CAE02788.2| OSJNBa0011L07.12 [Oryza
  misc_feature (1)..(380): Homolog of NCBI NO: 23126018 NR Description: hypothetical protein [Nostoc punctiforme]
  misc_feature (1)..(394): Homolog of NCBI NO: 4973431 NR Description: putative aldehyde dehydrogenase OS-ALDH [Oryza
  misc_feature (1)..(139): Homolog of NCBI NO: 15234364 NR Description: aldehyde dehydrogenase family protein
  misc_feature (242)..(394): Homolog of NCBI NO: 15234364 NR Description: aldehyde dehydrogenase family protein

SEQ ID NO: 101443 - DNA, 1131 bp, Arabidopsis thaliana
  misc_feature (1)..(1131): Ceres Seq. ID no. 13607866
  misc_feature: MA Experiment ID: 108462 Result: Up-regulated in Transcription
  misc_feature: MA Experiment 108462 PARAMETER Experiment Name: At_Germinating_Seeds_cDNA_P Parameter: Age (day) Value: 2 vs. 0
  misc_feature: MA Experiment 108462 PARAMETER Experiment Name: At_Germinating_Seeds_cDNA_P Parameter: Tissue Value: Germinating Seeds
  misc_feature: MA Experiment ID: 108464 Result: Up-regulated in Transcription
  misc_feature: MA Experiment 108464 PARAMETER Experiment Name: At_Germinating_Seeds_cDNA_P Parameter: Age (day) Value: 4 vs. 0
  misc_feature: MA Experiment 108464 PARAMETER Experiment Name: At_Germinating_Seeds_cDNA_P Parameter: Tissue Value: Germinating Seeds
  misc_feature: MA Experiment ID: 108488 Result: Up-regulated in Transcription
  misc_feature: MA Experiment ID: 108595 Result: Down-regulated in Transcription
  misc_feature: MA Experiment 108595 PARAMETER Experiment Name: At_Ler-pi_Ovule_cDNA_P Parameter: Plant Line Value: null
  misc_feature: MA Experiment ID: 20000185 Result: Down-regulated in Transcription
  misc_feature: MA Experiment 20000185 PARAMETER Experiment Name: At_Roots__P Parameter: Age (day) Value: 7 vs. 21
  misc_feature: MA Experiment 20000185 PARAMETER Experiment Name: At_Roots__P Parameter: Organism Value: A. thaliana
  misc_feature: MA Experiment 20000185 PARAMETER Experiment Name: At_Roots__P Parameter: Tissue Value: Roots vs. Whole Plant
  misc_feature: MA Experiment ID: 20000437 Result: Down-regulated in Transcription
  misc_feature: MA Experiment 20000437 PARAMETER Experiment Name: At_Drought_P Parameter: Age (day) Value: 8
  misc_feature: MA Experiment 20000437 PARAMETER Experiment Name: At_Drought_P Parameter: Organism Value: A. thaliana
  misc_feature: MA Experiment 20000437 PARAMETER Experiment Name: At_Drought_P Parameter: Plant Line Value: WS
  misc_feature: MA Experiment 20000437 PARAMETER Experiment Name: At_Drought_P Parameter: Timepoint (hr) Value: 24
  misc_feature: MA Experiment 20000437 PARAMETER Experiment Name: At_Drought_P Parameter: Tissue Value: Whole Plant
  misc_feature: MA Experiment 20000437 PARAMETER Experiment Name: At_Drought_P Parameter: Treatment Value: Drought vs. No Drought
  misc_feature: MA Experiment ID: 20000439 Result: Down-regulated in Transcription
  misc_feature: MA Experiment 20000439 PARAMETER Experiment Name: At_Roots__P Parameter: Age (day) Value: 14 vs. 21
  misc_feature: MA Experiment 20000439 PARAMETER Experiment Name: At_Roots__P Parameter: Organism Value: A. thaliana
  misc_feature: MA Experiment 20000439 PARAMETER Experiment Name: At_Roots__P Parameter: Tissue Value: Roots vs. Whole Plant
  misc_feature: MA Experiment ID: 20000573 Result: Down-regulated in Transcription
  misc_feature: MA Experiment 20000573 PARAMETER Experiment Name: At_100uM_ABA_Mutants__P Parameter: Organism Value: A. thaliana
  misc_feature: MA Experiment 20000573 PARAMETER Experiment Name: At_100uM_ABA_Mutants__P Parameter: Plant Line Value: CS22 vs. Ler wt
  misc_feature: MA Experiment 20000573 PARAMETER Experiment Name: At_100uM_ABA_Mutants__P Parameter: Timepoint (hr) Value: N/A
  misc_feature: MA Experiment 20000573 PARAMETER Experiment Name: At_100uM_ABA_Mutants__P Parameter: Tissue Value: Whole Plant
  misc_feature: MA Experiment 20000573 PARAMETER Experiment Name: At_100uM_ABA_Mutants__P Parameter: Treatment Value: None
  misc_feature: MA Experiment ID: 20000574 Result: Down-regulated in Transcription
  misc_feature: MA Experiment 20000574 PARAMETER Experiment Name: At_100uM_ABA_Mutants__P Parameter: Organism Value: A. thaliana
  misc_feature: MA Experiment 20000574 PARAMETER Experiment Name: At_100uM_ABA_Mutants__P Parameter: Plant Line Value: CS23 vs. Ler wt
  misc_feature: MA Experiment 20000574 PARAMETER Experiment Name: At_100uM_ABA_Mutants__P Parameter: Timepoint (hr) Value: N/A
  misc_feature: MA Experiment 20000574 PARAMETER Experiment Name: At_100uM_ABA_Mutants__P Parameter: Tissue Value: Whole Plant
  misc_feature: MA Experiment 20000574 PARAMETER Experiment Name: At_100uM_ABA_Mutants__P Parameter: Treatment Value: None
  misc_feature: MA Experiment ID: 20001248 Result: Down-regulated in Transcription
  misc_feature: MA Experiment 20001248 PARAMETER Experiment Name: At_Far-red-induction_P Parameter: Age (day) Value: 7
  misc_feature: MA Experiment 20001248 PARAMETER Experiment Name: At_Far-red-induction_P Parameter: Light Value: Far-red vs. White
  misc_feature: MA Experiment 20001248 PARAMETER Experiment Name: At_Far-red-induction_P Parameter: Organism Value: A. thaliana
  misc_feature: MA Experiment 20001248 PARAMETER Experiment Name: At_Far-red-induction_P Parameter: Plant Line Value: Columbia
  misc_feature: MA Experiment 20001248 PARAMETER Experiment Name: At_Far-red-induction_P Parameter: Timepoint (hr) Value: 4
  misc_feature: MA Experiment 20001248 PARAMETER Experiment Name: At_Far-red-induction_P Parameter: Tissue Value: Whole Plant
  misc_feature: MA Experiment ID: 20001450 Result: Down-regulated in Transcription
  misc_feature: MA Experiment 20001450 PARAMETER Experiment Name: At_Far-red-induction_P Parameter: Age (day) Value: 7
  misc_feature: MA Experiment 20001450 PARAMETER Experiment Name: At_Far-red-induction_P Parameter: Light Value: Far-red vs. White
  misc_feature: MA Experiment 20001450 PARAMETER Experiment Name: At_Far-red-induction_P Parameter: Organism Value: A. thaliana
  misc_feature: MA Experiment 20001450 PARAMETER Experiment Name: At_Far-red-induction_P Parameter: Plant Line Value: Columbia
  misc_feature: MA Experiment 20001450 PARAMETER Experiment Name: At_Far-red-induction_P Parameter: Timepoint (hr) Value: 8
  misc_feature: MA Experiment 20001450 PARAMETER Experiment Name: At_Far-red-induction_P Parameter: Tissue Value: Whole Plant
  misc_feature: MA Experiment ID: 20001905 Result: Down-regulated in Transcription
  misc_feature: MA Experiment 20001905 PARAMETER Experiment Name: At_Drought_Reproduction_P Parameter: Age (day) Value: 40
  misc_feature: MA Experiment 20001905 PARAMETER Experiment Name: At_Drought_Reproduction_P Parameter: Organism Value: A. thaliana
  misc_feature: MA Experiment 20001905 PARAMETER Experiment Name: At_Drought_Reproduction_P Parameter: Plant Line Value: WS
  misc_feature: MA Experiment 20001905 PARAMETER Experiment Name: At_Drought_Reproduction_P Parameter: Timepoint (day) Value: 10
  misc_feature: MA Experiment 20001905 PARAMETER Experiment Name: At_Drought_Reproduction_P Parameter: Tissue Value: Rosettes
  misc_feature: MA Experiment 20001905 PARAMETER Experiment Name: At_Drought_Reproduction_P Parameter: Treatment Value: Drought vs. No Drought
acaagatacaatgagaatgttagttcttcgcactcccaccggacctgtctccgccgtcagattcatcaccaaatccaaaccttctcctttctcttctcccgattcatggctcctccctgcaccaaacactcaccggagtcgtccccgcgtcgtcctcgctctctctaaccccgacggaagcgtcaactcaaaaccctcaacctcagcttctcaaatcccttcttcaggagatgaaacagttttcgtgggtcaagataatgttcctctcgagggcgtgattcaattcgataaaccgtcatctacttcatcttctaacattaccaaatggggtcgtgtggctttacttgcgggtggtgatgttttagctctgcttatcttctctgccattgggagatttagccatggtttccctgttttttctcttgatactctccacacagctgaccctttcattgcgggatggtttctgagtgcttatttcttggggggttatgcggaggaaggacgaggaatgaagggaaagtctaaagctgtggttgcagctgcgaaatcttggattgtcggaactccgcttggaattatcattaggtcagcttcatcaggtcacattccggcatatagctttgtgttggtgacaatgggaagtactgctgttttacttataggatggagagcattgttattcagtgtgcttcctacagagtccaagaagaaagatgatacgtatcggaagggtagtgcattcgagctatttgagttgcttacttcattgataagacgatggtgaaggagcatccatgaatattcggtcggttggaggttgagatttaagtatgcacaacaaaaatgtaaatgtactttgtcacaagtcacaaccgctaacagatcatataaatatgtgtgttgagaagttccaggaccaagtgtaatatcgatatagttgcagtggccagtggaggaggaaagcaatgatgagagatgatttgtctcaagtcaaacaataaacagaggaagtaaactccagtactcttttttgggtggtttttctccattgacagtaagaatcaaagattttcagtatatatccaattaacagagaaatgaaatgaaaacaaaaatatcattacagtg

SEQ ID NO: 101444 - protein, 261 aa, Arabidopsis thaliana; identical to SEQ ID NO: 30919
  peptide (1)..(261): Ceres Seq. ID no. 13607867
  misc_feature (4)..(261): Homolog of NCBI NO: 18401414 NR Description: expressed protein [Arabidopsis thaliana] Contains similarity to hypothetical protein F27F5.3 gi|7767678 Arabidopsis thaliana F27F5 gb|AC007915 and contains a terpene
  misc_feature (4)..(259): Homolog of NCBI NO: 25405875 NR Description: protein F27F5.3 [imported] - Arabidopsis thaliana
  misc_feature (6)..(261): Homolog of NCBI NO: 28273393 NR Description: unknown protein [Oryza sativa (japonica
  misc_feature (109)..(224): Homolog of NCBI NO: 22970530 NR Description: hypothetical protein [Chloroflexus aurantiacus]
  misc_feature (106)..(226): Homolog of NCBI NO: 25029256 NR Description: conserved hypothetical protein [Corynebacterium

SEQ ID NO: 101445 - protein, 258 aa, Arabidopsis thaliana; identical to SEQ ID NO: 30920
  peptide (1)..(258): Ceres Seq. ID no. 13607868
  misc_feature (1)..(258): Homolog of NCBI NO: 18401414 NR Description: expressed protein [Arabidopsis thaliana] Contains similarity to hypothetical protein F27F5.3 gi|7767678 Arabidopsis thaliana F27F5 gb|AC007915 and contains a terpene
  misc_feature (1)..(256): Homolog of NCBI NO: 25405875 NR Description: protein F27F5.3 [imported] - Arabidopsis thaliana
  misc_feature (3)..(258): Homolog of NCBI NO: 28273393 NR Description: unknown protein [Oryza sativa (japonica
  misc_feature (106)..(221): Homolog of NCBI NO: 22970530 NR Description: hypothetical protein [Chloroflexus aurantiacus]
  misc_feature (103)..(223): Homolog of NCBI NO: 25029256 NR Description: conserved hypothetical protein [Corynebacterium

SEQ ID NO: 101446 - protein, 256 aa, Arabidopsis thaliana; identical to SEQ ID NO: 30921
  peptide (1)..(256): Ceres Seq. ID no. 13607869
  misc_feature (1)..(256): Homolog of NCBI NO: 18401414 NR Description: expressed protein [Arabidopsis thaliana] Contains similarity to hypothetical protein F27F5.3 gi|7767678 Arabidopsis thaliana F27F5 gb|AC007915 and contains a terpene
  misc_feature (1)..(254): Homolog of NCBI NO: 25405875 NR Description: protein F27F5.3 [imported] - Arabidopsis thaliana
  misc_feature (1)..(256): Homolog of NCBI NO: 28273393 NR Description: unknown protein [Oryza sativa (japonica
  misc_feature (104)..(219): Homolog of NCBI NO: 22970530 NR Description: hypothetical protein [Chloroflexus aurantiacus]
  misc_feature (101)..(221): Homolog of NCBI NO: 25029256 NR Description: conserved hypothetical protein [Corynebacterium

SEQ ID NO: 101447 - DNA, 1444 bp, Arabidopsis thaliana
  misc_feature (1)..(1444): Ceres Seq. ID no. 13607874
  misc_feature: MA Experiment ID: 108461 Result: Up-regulated in Transcription
  misc_feature: MA Experiment 108461 PARAMETER Experiment Name: At_Germinating_Seeds_cDNA_P Parameter: Age (day) Value: 1 vs. 0
  misc_feature: MA Experiment 108461 PARAMETER Experiment Name: At_Germinating_Seeds_cDNA_P Parameter: Tissue Value: Germinating Seeds
  misc_feature: MA Experiment ID: 108469 Result: Up-regulated in Transcription
  misc_feature: MA Experiment ID: 20000069 Result: Down-regulated in Transcription
  misc_feature: MA Experiment 20000069 PARAMETER Experiment Name: At_100uM_ABA_Mutants_cDNA_P Parameter: Plant Line Value: CS23
  misc_feature: MA Experiment 20000069 PARAMETER Experiment Name: At_100uM_ABA_Mutants_cDNA_P Parameter: Timepoint (hr) Value: 6
  misc_feature: MA Experiment 20000069 PARAMETER Experiment Name: At_100uM_ABA_Mutants_cDNA_P Parameter: Tissue Value: Aerial
  misc_feature: MA Experiment 20000069 PARAMETER Experiment Name: At_100uM_ABA_Mutants_cDNA_P Parameter: Treatment Value: 100uM ABA vs. No Treatment
  misc_feature: MA Experiment ID: 20000171 Result: Down-regulated in Transcription
  misc_feature: MA Experiment 20000171 PARAMETER Experiment Name: At_42deg_Heat_P Parameter: Age (day) Value: 14
  misc_feature: MA Experiment 20000171 PARAMETER Experiment Name: At_42deg_Heat_P Parameter: Organism Value: A. thaliana
  misc_feature: MA Experiment 20000171 PARAMETER Experiment Name: At_42deg_Heat_P Parameter: Plant Line Value: WS
  misc_feature: MA Experiment 20000171 PARAMETER Experiment Name: At_42deg_Heat_P Parameter: Temperature (deg C) Value: 42 vs. 22
  misc_feature: MA Experiment 20000171 PARAMETER Experiment Name: At_42deg_Heat_P Parameter: Timepoint (hr) Value: 1
  misc_feature: MA Experiment 20000171 PARAMETER Experiment Name: At_42deg_Heat_P Parameter: Tissue Value: Aerial
  misc_feature: MA Experiment ID: 20000173 Result: Down-regulated in Transcription
  misc_feature: MA Experiment 20000173 PARAMETER Experiment Name: At_42deg_Heat_P Parameter: Age (day) Value: 14
  misc_feature: MA Experiment 20000173 PARAMETER Experiment Name: At_42deg_Heat_P Parameter: Organism Value: A. thaliana
  misc_feature: MA Experiment 20000173 PARAMETER Experiment Name: At_42deg_Heat_P Parameter: Plant Line Value: WS
  misc_feature: MA Experiment 20000173 PARAMETER Experiment Name: At_42deg_Heat_P Parameter: Temperature (deg C) Value: 42 vs. 22
  misc_feature: MA Experiment 20000173 PARAMETER Experiment Name: At_42deg_Heat_P Parameter: Timepoint (hr) Value: 6
  misc_feature: MA Experiment 20000173 PARAMETER Experiment Name: At_42deg_Heat_P Parameter: Tissue Value: Aerial
  misc_feature: MA Experiment ID: 20000179 Result: Up-regulated in Transcription
  misc_feature: MA Experiment 20000179 PARAMETER Experiment Name: At_Germinating_Seeds_P Parameter: Age (hr) Value: 6 vs. 0
  misc_feature: MA Experiment 20000179 PARAMETER Experiment Name: At_Germinating_Seeds_P Parameter: Tissue Value: Germinating Seeds
  misc_feature: MA Experiment ID: 20000180 Result: Up-regulated in Transcription
  misc_feature: MA Experiment 20000180 PARAMETER Experiment Name: At_Germinating_Seeds_P Parameter: Age (hr) Value: 24 vs. 0
  misc_feature: MA Experiment 20000180 PARAMETER Experiment Name: At_Germinating_Seeds_P Parameter: Tissue Value: Germinating Seeds
  misc_feature: MA Experiment ID: 20000185 Result: Up-regulated in Transcription
  misc_feature: MA Experiment 20000185 PARAMETER Experiment Name: At_Roots__P Parameter: Age (day) Value: 7 vs. 21
  misc_feature: MA Experiment 20000185 PARAMETER Experiment Name: At_Roots__P Parameter: Organism Value: A. thaliana
  misc_feature: MA Experiment 20000185 PARAMETER Experiment Name: At_Roots__P Parameter: Tissue Value: Roots vs. Whole Plant
  misc_feature: MA Experiment ID: 20000224 Result: Up-regulated in Transcription
  misc_feature: MA Experiment ID: 20000437 Result: Down-regulated in Transcription
  misc_feature: MA Experiment 20000437 PARAMETER Experiment Name: At_Drought_P Parameter: Age (day) Value: 8
  misc_feature: MA Experiment 20000437 PARAMETER Experiment Name: At_Drought_P Parameter: Organism Value: A. thaliana
  misc_feature: MA Experiment 20000437 PARAMETER Experiment Name: At_Drought_P Parameter: Plant Line Value: WS
  misc_feature: MA Experiment 20000437 PARAMETER Experiment Name: At_Drought_P Parameter: Timepoint (hr) Value: 24
  misc_feature: MA Experiment 20000437 PARAMETER Experiment Name: At_Drought_P Parameter: Tissue Value: Whole Plant
  misc_feature: MA Experiment 20000437 PARAMETER Experiment Name: At_Drought_P Parameter: Treatment Value: Drought vs. No Drought
  misc_feature: MA Experiment ID: 20001451 Result: Down-regulated in Transcription
  misc_feature: MA Experiment 20001451 PARAMETER Experiment Name: At_Far-red-induction_P Parameter: Age (day) Value: 7
  misc_feature: MA Experiment 20001451 PARAMETER Experiment Name: At_Far-red-induction_P Parameter: Light Value: Far-red vs. White
  misc_feature: MA Experiment 20001451 PARAMETER Experiment Name: At_Far-red-induction_P Parameter: Organism Value: A. thaliana
  misc_feature: MA Experiment 20001451 PARAMETER Experiment Name: At_Far-red-induction_P Parameter: Plant Line Value: Columbia
  misc_feature: MA Experiment 20001451 PARAMETER Experiment Name: At_Far-red-induction_P Parameter: Timepoint (hr) Value: 24
  misc_feature: MA Experiment 20001451 PARAMETER Experiment Name: At_Far-red-induction_P Parameter: Tissue Value: Whole Plant
cactcatccgatctctcaatcctctcaaatctcaaactctctcttcccatcactctctcgctctctcttcaatctcatctcaatcatgacagagcaagagatctgcgtgagggttacaagagcggcggcgaaacgaaaagcttcgacggcgatgggtattgacggagatcgggtcaacaagaagagagttgttctcggtgagcttctaaacgtctccaatgtcaatctcttggctaatctcaatcagaagaaagaaacccagaagccaaaaaggaatcttaaacctcctccggcgaaacagattaagtcagctccggtggctattattgacctagaatcaaaatctgacattgattctcgatctgatgatcctcaaatgtgtggaccttatgttgctgatatctatgagtatcttcgtcaacttgaggtgaagccaaagcagagacctttaccagattacatagagaaagttcagaaagatgtaacaccaagtatgagaggtgttttggttgattggttagtggaagttgctgaagagtataaacttggatctgaaacactttatctcactgtctcacatattgatagattcttgtctttaaagactgttaacaagcaaaagctacagcttgttggagtttctgctatgcttattgcttcgtaatatgaagagataagtcctcctaaagtggatgatttttgttacattacggataatacgttttcgaaacaagatgttgtgaagatggaagctgatatacttcttgctcttcagtttgagttgggaagaccaacgattaatacttttatgagacggtttactagagttgcacaagacgatttcaaagttccacatttgcagctagagcctctttgttgctatttgtcagaattgagtatattagattataagactgtgaagtttgtgccgtctctgttggctgcttctgctgtttttctcgctcggttcatcatccgtccgaaacaacatccttggaaccaaatgttagaagagtacacaaagtacaaagcggctgatctacaagtgtgtgttggaatcatacatgacttgtatttgagcagaagaggaggtgctttacaagctgttagagagaaatataagcaccataagttccaatgcgttgcgaccatgcctgtttcaccagagctgccggttaccttttgggaggatgttaccatttgatctgaggttatgctatcttaagcaaatgttacggagctggattaccgaatcttgtttcaaatagtataatggacacagatcttcaagtgaagctagaagagtaagaaatatagaagtgaaggcaggagcaaataagtctgcgttatgtgaagatgtgtgatgtattattgaaatctcttcttttttatttacaaaattttagtgtgaaattcggaataatataattttatacaattatgc

SEQ ID NO: 101448 - protein, 220 aa, Arabidopsis thaliana
  peptide (1)..(220): Ceres Seq. ID no. 13607875
  misc_feature (133)..(220): Pfam Name: Cyclin, N-terminal domain Pfam Description: Cyclin, N-terminal domain
  misc_feature (29)..(220): Homolog of NCBI NO: 30694019 NR Description: cyclin family [Arabidopsis thaliana]
  misc_feature (29)..(220): Homolog of NCBI NO: 15220147 NR Description: cyclin, putative [Arabidopsis thaliana]
  misc_feature (67)..(220): Homolog of NCBI NO: 15239172 NR Description: cyclin, putative [Arabidopsis thaliana]
  misc_feature (110)..(220): Homolog of NCBI NO: 15220145 NR Description: cyclin, putative [Arabidopsis thaliana]
  misc_feature (27)..(220): Homolog of NCBI NO: 7438513 NR Description: cyclin A-type (clone 59) - common tobacco
  misc_feature (29)..(220): Homolog of NCBI NO: 7438516 NR Description: cyclin A-type - Madagascar periwinkle
  misc_feature (113)..(220): Homolog of NCBI NO: 7242793 NR Description: cyclin A3.1 [Pisum sativum]
  misc_feature (29)..(220): Homolog of NCBI NO: 18401622 NR Description: cyclin family [Arabidopsis thaliana]
  misc_feature (37)..(220): Homolog of NCBI NO: 40538955 NR Description: putative A-type cyclin [Oryza sativa (japonica
THPISQSSQISNSLFPSLSRSLFNLISIMTEQEICVRVTRAAAKRKASTAMGIDGDRVNKKRVVLGELLNVSNVNLLANLNQKKETQKPKRNLKPPPAKQIKSAPVAIIDLESKSDIDSRSDDPQMCGPYVADIYEYLRQLEVKPKQRPLPDYIEKVQKDVTPSMRGVLVDWLVEVAEEYKLGSETLYLTVSHIDRFLSLKTVNKQKLQLVGVSAMLIAS

SEQ ID NO: 101449 - protein, 192 aa, Arabidopsis thaliana
  peptide (1)..(192): Ceres Seq. ID no. 13607876
  misc_feature (105)..(192): Pfam Name: Cyclin, N-terminal domain Pfam Description: Cyclin, N-terminal domain
  misc_feature (1)..(192): Homolog of NCBI NO: 30694019 NR Description: cyclin family [Arabidopsis thaliana]
  misc_feature (1)..(192): Homolog of NCBI NO: 15220147 NR Description: cyclin, putative [Arabidopsis thaliana]
  misc_feature (39)..(192): Homolog of NCBI NO: 15239172 NR Description: cyclin, putative [Arabidopsis thaliana]
  misc_feature (82)..(192): Homolog of NCBI NO: 15220145 NR Description: cyclin, putative [Arabidopsis thaliana]
  misc_feature (1)..(192): Homolog of NCBI NO: 7438513 NR Description: cyclin A-type (clone 59) - common tobacco
  misc_feature (1)..(192): Homolog of NCBI NO: 7438516 NR Description: cyclin A-type - Madagascar periwinkle
  misc_feature (85)..(192): Homolog of NCBI NO: 7242793 NR Description: cyclin A3.1 [Pisum sativum]
  misc_feature (1)..(192): Homolog of NCBI NO: 18401622 NR Description: cyclin family [Arabidopsis thaliana]
  misc_feature (9)..(192): Homolog of NCBI NO: 40538955 NR Description: putative A-type cyclin [Oryza sativa (japonica
MTEQEICVRVTRAAAKRKASTAMGIDGDRVNKKRVVLGELLNVSNVNLLANLNQKKETQKPKRNLKPPPAKQIKSAPVAIIDLESKSDIDSRSDDPQMCGPYVADIYEYLRQLEVKPKQRPLPDYIEKVQKDVTPSMRGVLVDWLVEVAEEYKLGSETLYLTVSHIDRFLSLKTVNKQKLQLVGVSAMLIAS

SEQ ID NO: 101450 - protein, 170 aa, Arabidopsis thaliana
  peptide (1)..(170): Ceres Seq. ID no. 13607877
  misc_feature (83)..(170): Pfam Name: Cyclin, N-terminal domain Pfam Description: Cyclin, N-terminal domain
  misc_feature (1)..(170): Homolog of NCBI NO: 30694019 NR Description: cyclin family [Arabidopsis thaliana]
  misc_feature (1)..(170): Homolog of NCBI NO: 15220147 NR Description: cyclin, putative [Arabidopsis thaliana]
  misc_feature (17)..(170): Homolog of NCBI NO: 15239172 NR Description: cyclin, putative [Arabidopsis thaliana]
  misc_feature (60)..(170): Homolog of NCBI NO: 15220145 NR Description: cyclin, putative [Arabidopsis thaliana]
  misc_feature (1)..(170): Homolog of NCBI NO: 7438513 NR Description: cyclin A-type (clone 59) - common tobacco
  misc_feature (1)..(170): Homolog of NCBI NO: 7438516 NR Description: cyclin A-type - Madagascar periwinkle
  misc_feature (63)..(170): Homolog of NCBI NO: 7242793 NR Description: cyclin A3.1 [Pisum sativum]
  misc_feature (1)..(170): Homolog of NCBI NO: 18401622 NR Description: cyclin family [Arabidopsis thaliana]
  misc_feature (1)..(170): Homolog of NCBI NO: 40538955 NR Description: putative A-type cyclin [Oryza sativa (japonica
MGIDGDRVNKKRVVLGELLNVSNVNLLANLNQKKETQKPKRNLKPPPAKQIKSAPVAIIDLESKSDIDSRSDDPQMCGPYVADIYEYLRQLEVKPKQRPLPDYIEKVQKDVTPSMRGVLVDWLVEVAEEYKLGSETLYLTVSHIDRFLSLKTVNKQKLQLVGVSAMLIAS

SEQ ID NO: 101451 - DNA, 939 bp, Arabidopsis thaliana
  misc_feature (1)..(939): Ceres Seq. ID no. 13607878
  misc_feature: MA Experiment ID: 108435 Result: Down-regulated in Transcription
  misc_feature: MA Experiment 108435 PARAMETER Experiment Name: At_stm_Mutants_cDNA_P Parameter: Plant Line Value: wt Landsburg vs stm
  misc_feature: MA Experiment 108435 PARAMETER Experiment Name: At_stm_Mutants_cDNA_P Parameter: Tissue Value: Shoot Apical Meristem Region
  misc_feature: MA Experiment ID: 108462 Result: Up-regulated in Transcription
  misc_feature: MA Experiment 108462 PARAMETER Experiment Name: At_Germinating_Seeds_cDNA_P Parameter: Age (day) Value: 2 vs. 0
  misc_feature: MA Experiment 108462 PARAMETER Experiment Name: At_Germinating_Seeds_cDNA_P Parameter: Tissue Value: Germinating Seeds
  misc_feature: MA Experiment ID: 108595 Result: Down-regulated in Transcription
  misc_feature: MA Experiment 108595 PARAMETER Experiment Name: At_Ler-pi_Ovule_cDNA_P Parameter: Plant Line Value: null
  misc_feature: MA Experiment ID: 20000090 Result: Down-regulated in Transcription
  misc_feature: MA Experiment ID: 20000113 Result: Down-regulated in Transcription
  misc_feature: MA Experiment 20000113 PARAMETER Experiment Name: At_42deg_Heat_cDNA_P Parameter: Temperature (deg C) Value: 42 vs. 22
  misc_feature: MA Experiment 20000113 PARAMETER Experiment Name: At_42deg_Heat_cDNA_P Parameter: Timepoint (hr) Value: 8
  misc_feature: MA Experiment 20000113 PARAMETER Experiment Name: At_42deg_Heat_cDNA_P Parameter: Tissue Value: Aerial
ccacgcgtccgagagtcagaacagaacaaaaacgtaagcaaaaaaaaataaaacagagcaaaatggccgtagttttacgtggaggcatcaccggaggatttcttcaccatcgtcgtgacgcttcatccgtcatcacaagaagaatctcatccgtcaaagccgcaggaggaggcatcaacccaacggtggctgttgaacgtgccacgtggctacctggactaaaccctcctccttatcttgatggaaatttagctggagattacgggtttgacccactcgggttaggagaggatccggaaagcttgaagtggtatgttcaagcagagcttgttcactctcgtttcgctatgctcggtgttgcaggaatactcttcactgatctccttcggaccacagggattcgtaatttaccggtttggtatgaagctggagctgtgaaatttgattttgctagtacaaaaactctcatagttgtacagtttctacttatggggtttgctgagactaaaaggtatatggattttgtctctccgggatcacaagccaaagaaggatcgtttttctttggacttgaagcagcactcgaggggctcgagcctggatatcccggaggaccgcttttaaacccattaggccttgctaaggatgttcaaaatgctcatgactggaagcttaaggagatcaagaacggtcgtctagcgatgatggcgatgctcgggttctttgttcaagcctctgtgactcacactggccctattgataaccttgttgagcatctctctaatccatggcataagaccatcattcaaaccctcttcacctctacatcttagtttcaggagtcacattactactgcttgcttgtggggtcacattactactgcttgcttgttcaccaaatgtaaacgttgttggttgatgcaaagccgatttagactt

SEQ ID NO: 101452 - protein, 276 aa, Arabidopsis thaliana
  peptide (1)..(276): Ceres Seq. ID no. 13607879
  misc_feature (74)..(245): Pfam Name: Chlorophyll A-B binding protein Pfam Description: Chlorophyll A-B binding protein
  misc_feature (21)..(276): Homolog of NCBI NO: 15220077 NR Description: light-harvesting chlorophyll a/b binding protein
  misc_feature (21)..(276): Homolog of NCBI NO: 25299023 NR Description: chlorophyll a/b-binding protein Lhca5,
  misc_feature (21)..(276): Homolog of NCBI NO: 21593722 NR Description: light-harvesting complex protein [Arabidopsis
  misc_feature (41)..(264): Homolog of NCBI NO: 27542569 NR Description: light-harvesting complex I protein [Chlamydomonas
  misc_feature (44)..(264): Homolog of NCBI NO: 40714515 NR Description: light-harvesting chlorophyll-a/b protein of
  misc_feature (41)..(264): Homolog of NCBI NO: 40714521 NR Description: light-harvesting chlorophyll-a/b protein of
  misc_feature (64)..(264): Homolog of NCBI NO: 5902596 NR Description: light harvesting complex a protein [Volvox
  misc_feature (57)..(271): Homolog of NCBI NO: 322392 NR Description: chlorophyll a/b-binding protein type 4,
  misc_feature (57)..(271): Homolog of NCBI NO: 322393 NR Description: chlorophyll a/b-binding protein type 4, I - Scotch pine (fragment) >gi|829287|emb|CAA78901.1| Lhca4
  misc_feature (40)..(271): Homolog of NCBI NO: 100196 NR Description: chlorophyll a/b-binding protein (cab-11) - tomato
TRPRVRTEQKRKQKKIKQSKMAVVLRGGITGGFLHHRRDASSVITRRISSVKAAGGGINPTVAVERATWLPGLNPPPYLDGNLAGDYGFDPLGLGEDPESLKWYVQAELVHSRFAMLGVAGILFTDLLRTTGIRNLPVWYEAGAVKFDFASTKTLIVVQFLLMGFAETKRYMDFVSPGSQAKEGSFFFGLEAALEGLEPGYPGGPLLNPLGLAKDVQNAHDWKLKEIKNGRLAMMAMLGFFVQASVTHTGPIDNLVEHLSNPWHKTIIQTLFTSTS

SEQ ID NO: 101453 - protein, 256 aa, Arabidopsis thaliana; identical to SEQ ID NO: 37618
  peptide (1)..(256): Ceres Seq. ID no. 13607880
  misc_feature (54)..(225): Pfam Name: Chlorophyll A-B binding protein Pfam Description: Chlorophyll A-B binding protein
  misc_feature (1)..(256): Homolog of NCBI NO: 15220077 NR Description: light-harvesting chlorophyll a/b binding protein
  misc_feature (1)..(256): Homolog of NCBI NO: 25299023 NR Description: chlorophyll a/b-binding protein Lhca5,
  misc_feature (1)..(256): Homolog of NCBI NO: 21593722 NR Description: light-harvesting complex protein [Arabidopsis
  misc_feature (21)..(244): Homolog of NCBI NO: 27542569 NR Description: light-harvesting complex I protein [Chlamydomonas
  misc_feature (24)..(244): Homolog of NCBI NO: 40714515 NR Description: light-harvesting chlorophyll-a/b protein of
  misc_feature (21)..(244): Homolog of NCBI NO: 40714521 NR Description: light-harvesting chlorophyll-a/b protein of
  misc_feature (44)..(244): Homolog of NCBI NO: 5902596 NR Description: light harvesting complex a protein [Volvox
  misc_feature (37)..(251): Homolog of NCBI NO: 322392 NR Description: chlorophyll a/b-binding protein type 4,
  misc_feature (37)..(251): Homolog of NCBI NO: 322393 NR Description: chlorophyll a/b-binding protein type 4, I - Scotch pine (fragment) >gi|829287|emb|CAA78901.1| Lhca4
  misc_feature (20)..(251): Homolog of NCBI NO: 100196 NR Description: chlorophyll a/b-binding protein (cab-11) - tomato

SEQ ID NO: 101454 - protein, 161 aa, Arabidopsis thaliana; identical to SEQ ID NO: 37619
  peptide (1)..(161): Ceres Seq. ID no. 13607881
  misc_feature (1)..(130): Pfam Name: Chlorophyll A-B binding protein Pfam Description: Chlorophyll A-B binding protein
  misc_feature (1)..(161): Homolog of NCBI NO: 15220077 NR Description: light-harvesting chlorophyll a/b binding protein
  misc_feature (1)..(161): Homolog of NCBI NO: 25299023 NR Description: chlorophyll a/b-binding protein Lhca5,
  misc_feature (1)..(161): Homolog of NCBI NO: 21593722 NR Description: light-harvesting complex protein [Arabidopsis
  misc_feature (1)..(149): Homolog of NCBI NO: 27542569 NR Description: light-harvesting complex I protein [Chlamydomonas
  misc_feature (1)..(149): Homolog of NCBI NO: 40714515 NR Description: light-harvesting chlorophyll-a/b protein of
  misc_feature (1)..(149): Homolog of NCBI NO: 40714521 NR Description: light-harvesting chlorophyll-a/b protein of
  misc_feature (1)..(149): Homolog of NCBI NO: 5902596 NR Description: light harvesting complex a protein [Volvox
  misc_feature (1)..(156): Homolog of NCBI NO: 322392 NR Description: chlorophyll a/b-binding protein type 4,
  misc_feature (1)..(156): Homolog of NCBI NO: 322393 NR Description: chlorophyll a/b-binding protein type 4, I - Scotch pine (fragment) >gi|829287|emb|CAA78901.1| Lhca4
  misc_feature (1)..(156): Homolog of NCBI NO: 100196 NR Description: chlorophyll a/b-binding protein (cab-11) - tomato

SEQ ID NO: 101455 - DNA, 1260 bp, Arabidopsis thaliana
  misc_feature (1)..(1260): Ceres Seq. ID no. 13607882
  misc_feature: MA Experiment ID: 20000072 Result: Down-regulated in Transcription
  misc_feature: MA Experiment 20000072 PARAMETER Experiment Name: At_100uM_ABA_Mutants_cDNA_P Parameter: Plant Line Value: CS8105
  misc_feature: MA Experiment 20000072 PARAMETER Experiment Name: At_100uM_ABA_Mutants_cDNA_P Parameter: Timepoint (hr) Value: 6
  misc_feature: MA Experiment 20000072 PARAMETER Experiment Name: At_100uM_ABA_Mutants_cDNA_P Parameter: Tissue Value: Aerial
  misc_feature: MA Experiment 20000072 PARAMETER Experiment Name: At_100uM_ABA_Mutants_cDNA_P Parameter: Treatment Value: 100uM ABA vs. No Treatment
  misc_feature: MA Experiment ID: 20000086 Result: Down-regulated in Transcription
  misc_feature: MA Experiment 20000086 PARAMETER Experiment Name: At_100uM_ABA_Mutants_cDNA_P Parameter: Plant Line Value: CS22
  misc_feature: MA Experiment 20000086 PARAMETER Experiment Name: At_100uM_ABA_Mutants_cDNA_P Parameter: Timepoint (hr) Value: 6
  misc_feature: MA Experiment 20000086 PARAMETER Experiment Name: At_100uM_ABA_Mutants_cDNA_P Parameter: Tissue Value: Aerial
  misc_feature: MA Experiment 20000086 PARAMETER Experiment Name: At_100uM_ABA_Mutants_cDNA_P Parameter: Treatment Value: 100uM ABA vs. No Treatment
  misc_feature: MA Experiment ID: 20000087 Result: Down-regulated in Transcription
  misc_feature: MA Experiment 20000087 PARAMETER Experiment Name: At_100uM_ABA_Mutants_cDNA_P Parameter: Plant Line Value: WS
  misc_feature: MA Experiment 20000087 PARAMETER Experiment Name: At_100uM_ABA_Mutants_cDNA_P Parameter: Timepoint (hr) Value: 6
  misc_feature: MA Experiment 20000087 PARAMETER Experiment Name: At_100uM_ABA_Mutants_cDNA_P Parameter: Tissue Value: Aerial
  misc_feature: MA Experiment 20000087 PARAMETER Experiment Name: At_100uM_ABA_Mutants_cDNA_P Parameter: Treatment Value: 100uM ABA vs. No Treatment
  misc_feature: MA Experiment ID: 20000437 Result: Down-regulated in Transcription
  misc_feature: MA Experiment 20000437 PARAMETER Experiment Name: At_Drought_P Parameter: Age (day) Value: 8
  misc_feature: MA Experiment 20000437 PARAMETER Experiment Name: At_Drought_P Parameter: Organism Value: A. thaliana
  misc_feature: MA Experiment 20000437 PARAMETER Experiment Name: At_Drought_P Parameter: Plant Line Value: WS
  misc_feature: MA Experiment 20000437 PARAMETER Experiment Name: At_Drought_P Parameter: Timepoint (hr) Value: 24
  misc_feature: MA Experiment 20000437 PARAMETER Experiment Name: At_Drought_P Parameter: Tissue Value: Whole Plant
  misc_feature: MA Experiment 20000437 PARAMETER Experiment Name: At_Drought_P Parameter: Treatment Value: Drought vs. No Drought
ctcgcactgaacttcaattctctctttccttttttccgttcgatgagagcttaagctctgccgcgttttcgttctccgatctttttccatttttatcagtttcttctcttccaaattagggtttttcttttcagtctttgggaatgattttgatgcggtgaaaaagttttttttttttgagggggaaggatttctgggtttgctcttagggttttgtcttttcaatcgccggagcctgaaataatccggcagatatggcgtctgaattgccgatgagccctcatttggagcagattcacggagaaatccgtgaccatttccgagccctcgcgaatggcttccagaggttggataagatcaaggattctagtagacaaagcaagcaactcgaagaacttgctgagaagatgagagactgtaaaaggttggttaaggagtttgatcgtgaactcaaagatggggaagctcgaaattctcctcaagtaaataagcaattgaatgatgagaaacaatctatgattaaggaactcaactcttatgttgcactaagaaaaacgtacttgaatacactcggcaacaagaaagttgaactttttgatactggagctggagtcagcggtgaacccacagctgaagaaaacgtccaaatggcttcaacaatgtcaaaccaagagcttgtcgatgctggaatgaaaaggatggacgagactgaccaggctattgaacgttctaaacaggttgtgcatcagacactcgaagttggcactcaaactgcatctaacttaaagggacagacggatcaaatgggccgcgttgtaaacgacctagacacaattcagttctctcttaagaaagcttcgcagctggtgaaagagataggaagacaggtagctacagataaatgcataatggcgttcctgtttctgattgtctgtggtgttatagctataatcattgtgaagatcgtgaacccaaacaacaaagacatcagagacatccctggactagctcctccagcgcaatcgagaaagctcttgtacttcagagaatagccttttggcagggccgagagggaaggtttggtgcatattacacttgctgttgcgtgtgtgttcattctttcatgaaagagggcttgtttatgtcatttaaatttgagctttcattagagttttgtatcatatatcatcattctttaacttatgaccacatgttgtataattttataccaagttcaatatattttataagatccgtttt

SEQ ID NO: 101456 - protein, 265 aa, Arabidopsis thaliana; identical to SEQ ID NO: 30750
  peptide (1)..(265): Ceres Seq. ID no. 13607883
  misc_feature (77)..(215): Pfam Name: Vesicle transport v-SNARE protein Pfam Description: Vesicle transport v-SNARE protein
  misc_feature (1)..(265): Homolog of NCBI NO: 22330102 NR Description: expressed protein [Arabidopsis thaliana] Novel plant SNARE 12 (AtNPSN12) F21D18.4 [Arabidopsis thaliana]
  misc_feature (1)..(264): Homolog of NCBI NO: 18401508 NR Description: expressed protein [Arabidopsis thaliana] Novel plant SNARE 13 (AtNPSN13) >gi|11994682|dbj|BAB02920.1|
  misc_feature (1)..(264): Homolog of NCBI NO: 21536876 NR Description: unknown [Arabidopsis thaliana]
  misc_feature (1)..(261): Homolog of NCBI NO: 23237830 NR Description: contains ESTs to vesicle soluble NSF attachment protein receptor [Oryza sativa
  misc_feature (1)..(257): Homolog of NCBI NO: 34896946 NR Description: putative vesicle soluble NSF attachment protein [Oryza sativa] >gi|12039356|gb|AAG46143.1| putative vesicle
  misc_feature (17)..(265): Homolog of NCBI NO: 25370781 NR Description: F11A17.20 [imported] - Arabidopsis thaliana
  misc_feature (7)..(262): Homolog of NCBI NO: 18403771 NR Description: expressed protein [Arabidopsis thaliana]
  misc_feature (7)..(262): Homolog of NCBI NO: 27805643 NR Description: Novel plant SNARE 11 (AtNPSN11) At2g35190/T4C15.14 [Arabidopsis thaliana]
  misc_feature (7)..(262): Homolog of NCBI NO: 25370780 NR Description: hypothetical protein At2g35190 [imported] -
  misc_feature (1)..(94): Homolog of NCBI NO: 25370781 NR Description: F11A17.20 [imported] - Arabidopsis thaliana

SEQ ID NO: 101457 - protein, 259 aa, Arabidopsis thaliana; identical to SEQ ID NO: 30751
  peptide (1)..(259): Ceres Seq. ID no. 13607884
  misc_feature (71)..(209): Pfam Name: Vesicle transport v-SNARE protein Pfam Description: Vesicle transport v-SNARE protein
  misc_feature (1)..(259): Homolog of NCBI NO: 22330102 NR Description: expressed protein [Arabidopsis thaliana] Novel plant SNARE 12 (AtNPSN12) F21D18.4 [Arabidopsis thaliana]
  misc_feature (1)..(258): Homolog of NCBI NO: 18401508 NR Description: expressed protein [Arabidopsis thaliana] Novel plant SNARE 13 (AtNPSN13) >gi|11994682|dbj|BAB02920.1|
  misc_feature (1)..(258): Homolog of NCBI NO: 21536876 NR Description: unknown [Arabidopsis thaliana]
  misc_feature (1)..(255): Homolog of NCBI NO: 23237830 NR Description: contains ESTs to vesicle soluble NSF attachment protein receptor [Oryza sativa
  misc_feature (1)..(251): Homolog of NCBI NO: 34896946 NR Description: putative vesicle soluble NSF attachment protein [Oryza sativa] >gi|12039356|gb|AAG46143.1| putative vesicle
  misc_feature (11)..(259): Homolog of NCBI NO: 25370781 NR Description: F11A17.20 [imported] - Arabidopsis thaliana
  misc_feature (1)..(256): Homolog of NCBI NO: 18403771 NR Description: expressed protein [Arabidopsis thaliana]
  misc_feature (1)..(256): Homolog of NCBI NO: 27805643 NR Description: Novel plant SNARE 11 (AtNPSN11) At2g35190/T4C15.14 [Arabidopsis thaliana]
  misc_feature (1)..(256): Homolog of NCBI NO: 25370780 NR Description: hypothetical protein At2g35190 [imported] -
  misc_feature (1)..(88): Homolog of NCBI NO: 25370781 NR Description: F11A17.20 [imported] - Arabidopsis thaliana

SEQ ID NO: 101458 - protein, 214 aa, Arabidopsis thaliana; identical to SEQ ID NO: 30752
  peptide (1)..(214): Ceres Seq. ID no. 13607885
  misc_feature (26)..(164): Pfam Name: Vesicle transport v-SNARE protein Pfam Description: Vesicle transport v-SNARE protein
  misc_feature (1)..(214): Homolog of NCBI NO: 22330102 NR Description: expressed protein [Arabidopsis thaliana] Novel plant SNARE 12 (AtNPSN12) F21D18.4 [Arabidopsis thaliana]
  misc_feature (1)..(213): Homolog of NCBI NO: 18401508 NR Description: expressed protein [Arabidopsis thaliana] Novel plant SNARE 13 (AtNPSN13) >gi|11994682|dbj|BAB02920.1|
  misc_feature (1)..(213): Homolog of NCBI NO: 21536876 NR Description: unknown [Arabidopsis thaliana]
  misc_feature (1)..(210): Homolog of NCBI NO: 23237830 NR Description: contains ESTs to vesicle soluble NSF attachment protein receptor [Oryza sativa
  misc_feature (1)..(206): Homolog of NCBI NO: 34896946 NR Description: putative vesicle soluble NSF attachment protein [Oryza sativa] >gi|12039356|gb|AAG46143.1| putative vesicle
  misc_feature (1)..(214): Homolog of NCBI NO: 25370781 NR Description: F11A17.20 [imported] - Arabidopsis thaliana
  misc_feature (1)..(211): Homolog of NCBI NO: 18403771 NR Description: expressed protein [Arabidopsis thaliana]
  misc_feature (1)..(211): Homolog of NCBI NO: 27805643 NR Description: Novel plant SNARE 11 (AtNPSN11) At2g35190/T4C15.14 [Arabidopsis thaliana]
  misc_feature (1)..(211): Homolog of NCBI NO: 25370780 NR Description: hypothetical protein At2g35190 [imported] -
  misc_feature (1)..(43): Homolog of NCBI NO: 25370781 NR Description: F11A17.20 [imported] - Arabidopsis thaliana

SEQ ID NO: 101459 - DNA, 1296 bp, Arabidopsis thaliana
  misc_feature (1)..(1296): Ceres Seq. ID no. 13607906
  misc_feature: MA Experiment ID: 108462 Result: Down-regulated in Transcription
  misc_feature: MA Experiment 108462 PARAMETER Experiment Name: At_Germinating_Seeds_cDNA_P Parameter: Age (day) Value: 2 vs. 0
  misc_feature: MA Experiment 108462 PARAMETER Experiment Name: At_Germinating_Seeds_cDNA_P Parameter: Tissue Value: Germinating Seeds
  misc_feature: MA Experiment ID: 108463 Result: Down-regulated in Transcription
  misc_feature: MA Experiment 108463 PARAMETER Experiment Name: At_Germinating_Seeds_cDNA_P Parameter: Age (day) Value: 3 vs. 0
  misc_feature: MA Experiment 108463 PARAMETER Experiment Name: At_Germinating_Seeds_cDNA_P Parameter: Tissue Value: Germinating Seeds
  misc_feature: MA Experiment ID: 108464 Result: Down-regulated in Transcription
  misc_feature: MA Experiment 108464 PARAMETER Experiment Name: At_Germinating_Seeds_cDNA_P Parameter: Age (day) Value: 4 vs. 0
  misc_feature: MA Experiment 108464 PARAMETER Experiment Name: At_Germinating_Seeds_cDNA_P Parameter: Tissue Value: Germinating Seeds
  misc_feature: MA Experiment ID: 108579 Result: Up-regulated in Transcription
  misc_feature: MA Experiment 108579 PARAMETER Experiment Name: At_4deg_Cold_cDNA_P Parameter: Temperature (deg C) Value: 4 vs. 22
  misc_feature: MA Experiment 108579 PARAMETER Experiment Name: At_4deg_Cold_cDNA_P Parameter: Timepoint (hr) Value: 6
  misc_feature: MA Experiment 108579 PARAMETER Experiment Name: At_4deg_Cold_cDNA_P Parameter: Tissue Value: Aerial
  misc_feature: MA Experiment ID: 108668 Result: Down-regulated in Transcription
  misc_feature: MA Experiment 108668 PARAMETER Experiment Name: At_2mM_SA_cDNA_P Parameter: Plant Line Value: WS
  misc_feature: MA Experiment 108668 PARAMETER Experiment Name: At_2mM_SA_cDNA_P Parameter: Timepoint (hr) Value: 6
  misc_feature: MA Experiment 108668 PARAMETER Experiment Name: At_2mM_SA_cDNA_P Parameter: Treatment Value: 2mM SA vs. No Treatment
  misc_feature: MA Experiment ID: 20000093 Result: Down-regulated in Transcription
  misc_feature: MA Experiment 20000093 PARAMETER Experiment Name: At_42deg_Heat_cDNA_P Parameter: Temperature (deg C) Value: 42 vs. 22
  misc_feature: MA Experiment 20000093 PARAMETER Experiment Name: At_42deg_Heat_cDNA_P Parameter: Timepoint (hr) Value: 0.5
  misc_feature: MA Experiment 20000093 PARAMETER Experiment Name: At_42deg_Heat_cDNA_P Parameter: Tissue Value: Aerial
ataaaaatccttatccaaaaaagtgcaacctctttcgccgtagaaaatattccgggaaccatgctccgaagaatcacttgttcttcttcacttgcttcaccctctctcttcctccgcttctttcgccaactccctcgctcttactcctcaccgaccaccatcgccgtctcaggccgcaacattcgccgactatcaactccaaccactcttcgttgcatttgttcacactcttcatctgaaatcatctccgagcatcctccgttcgtcagggtttacaaagacggtcgtatcgaacgtctttccggcaccgaaacagtcccggcttctctaaacccacgaaacgacgtcgtttcaaaagacgttgtctactcaccggggcataacctctccgttcgtctctttctccctcacaaatcaacacaactcgccgccggtaacaaactccctctacttatctacttccacggcggagcttggataaacgaatcccctttctccccaatctaccacaatttcctcacggaggtagttaaatccgctaactgcctcgccgtctcggttcaataccgccgtgcaccggaagatccggttccggctgcctatgaagatacatggtctgctattcaatggattttctcacattcctgtggatctggtgaagaagattggattaacaaatacgctgatttcgaaagagtttttctcgccggagatagtgccggtggtaatatatctcatcacatggctatgagagctggtaaagagaagcttaagcctagaatcaaagggactgtgattgtgcatccagcgatttgggggaaagatccggtcgatgagcacgatgtgcaagatagagagatcagagacggagttgcagaagtttgggagaaaattgtgagtccgaatagtgttgatggagcggatgatccgtggtttaatgtggttggatccgggtcgaatttttccgggatgggatgtgacaaggttttggttgaggtggctgggaaagatgtgttttggcggcaaggattagcttacgcggcgaagctaaagaagagtgggtggaaaggagaggtggaggtgattgaggaagaagatgaagagcattgcttccatctcttaaatccaagttctgaaaatgctcccagcttcatgaagagatttgtggagtttatcactggttaacattgttctttgtgtgacacgaataaattttgatgtaacctttgaatttgatttggttctctatataattatggttaaggaattaaatacaggaatgactcggttgtgact

SEQ ID NO: 101460 - protein, 394 aa, Arabidopsis thaliana
  peptide (1)..(394): Ceres Seq. ID no. 13607907
  misc_feature (122)..(173): Pfam Name: Carboxylesterase Pfam Description: Carboxylesterase
  misc_feature (21)..(394): Homolog of NCBI NO: 18402731 NR Description: expressed protein [Arabidopsis thaliana]
  misc_feature (21)..(394): Homolog of NCBI NO: 21537287 NR Description: putative esterase [Arabidopsis thaliana]
  misc_feature (79)..(394): Homolog of NCBI NO: 15222795 NR Description: expressed protein [Arabidopsis thaliana]
  misc_feature (79)..(392): Homolog of NCBI NO: 15222791 NR Description: hypothetical protein [Arabidopsis thaliana]
  misc_feature (79)..(394): Homolog of NCBI NO: 15228425 NR Description: expressed protein [Arabidopsis thaliana]
  misc_feature (79)..(394): Homolog of NCBI NO: 18086341 NR Description: AT3g48690/T8P19_200 [Arabidopsis thaliana]
  misc_feature (79)..(392): Homolog of NCBI NO: 15227669 NR Description: expressed protein [Arabidopsis thaliana]
  misc_feature (81)..(392): Homolog of NCBI NO: 28393060 NR Description: putative esterase [Arabidopsis thaliana]
  misc_feature (79)..(394): Homolog of NCBI NO: 15228426 NR Description: expressed protein [Arabidopsis thaliana]
  misc_feature (79)..(392): Homolog of NCBI NO: 15221975 NR Description: expressed protein [Arabidopsis thaliana]
IKILIQKSATSFAVENIPGTMLRRITCSSSLASPSLFLRFFRQLPRSYSSPTTIAVSGRNIRRLSTPTTLRCICSHSSSEIISEHPPFVRVYKDGRIERLSGTETVPASLNPRNDVVSKDVVYSPGHNLSVRLFLPHKSTQLAAGNKLPLLIYFHGGAWINESPFSPIYHNFLTEVVKSANCLAVSVQYRRAPEDPVPAAYEDTWSAIQWIFSHSCGSGEEDWINKYADFERVFLAGDSAGGNISHHMAMRAGKEKLKPRIKGTVIVHPAIWGKDPVDEHDVQDREIRDGVAEVWEKIVSPNSVDGADDPWFNVVGSGSNFSGMGCDKVLVEVAGKDVFWRQGLAYAAKLKKSGWKGEVEVIEEEDEEHCFHLLNPSSENAPSFMKRFVEFITG

SEQ ID NO: 101461 - protein, 374 aa, Arabidopsis thaliana
  peptide (1)..(374): Ceres Seq. ID no. 13607908
  misc_feature (102)..(153): Pfam Name: Carboxylesterase Pfam Description: Carboxylesterase
  misc_feature (1)..(374): Homolog of NCBI NO: 18402731 NR Description: expressed protein [Arabidopsis thaliana]
  misc_feature (1)..(374): Homolog of NCBI NO: 21537287 NR Description: putative esterase [Arabidopsis thaliana]
  misc_feature (59)..(374): Homolog of NCBI NO: 15222795 NR Description: expressed protein [Arabidopsis thaliana]
  misc_feature (59)..(372): Homolog of NCBI NO: 15222791 NR Description: hypothetical protein [Arabidopsis thaliana]
  misc_feature (59)..(374): Homolog of NCBI NO: 15228425 NR Description: expressed protein [Arabidopsis thaliana]
  misc_feature (59)..(374): Homolog of NCBI NO: 18086341 NR Description: AT3g48690/T8P19_200 [Arabidopsis thaliana]
  misc_feature (59)..(372): Homolog of NCBI NO: 15227669 NR Description: expressed protein [Arabidopsis thaliana]
  misc_feature (61)..(372): Homolog of NCBI NO: 28393060 NR Description: putative esterase [Arabidopsis thaliana]
  misc_feature (59)..(374): Homolog of NCBI NO: 15228426 NR Description: expressed protein [Arabidopsis thaliana]
  misc_feature (59)..(372): Homolog of NCBI NO: 15221975 NR Description: expressed protein [Arabidopsis thaliana]
MLRRITCSSSLASPSLFLRFFRQLPRSYSSPTTIAVSGRNIRRLSTPTTLRCICSHSSSEIISEHPPFVRVYKDGRIERLSGTETVPASLNPRNDVVSKDVVYSPGHNLSVRLFLPHKSTQLAAGNKLPLLIYFHGGAWINESPFSPIYHNFLTEVVKSANCLAVSVQYRRAPEDPVPAAYEDTWSAIQWIFSHSCGSGEEDWINKYADFERVFLAGDSAGGNISHHMAMRAGKEKLKPRIKGTVIVHPAIWGKDPVDEHDVQDREIRDGVAEVWEKIVSPNSVDGADDPWFNVVGSGSNFSGMGCDKVLVEVAGKDVFWRQGLAYAAKLKKSGWKGEVEVIEEEDEEHCFHLLNPSSENAPSFMKRFVEFITG

SEQ ID NO: 101462 - DNA, 1247 bp, Arabidopsis thaliana
  misc_feature (1)..(1247): Ceres Seq. ID no. 13607917
  misc_feature: MA Experiment ID: 108461 Result: Up-regulated in Transcription
  misc_feature: MA Experiment 108461 PARAMETER Experiment Name: At_Germinating_Seeds_cDNA_P Parameter: Age (day) Value: 1 vs. 0
  misc_feature: MA Experiment 108461 PARAMETER Experiment Name: At_Germinating_Seeds_cDNA_P Parameter: Tissue Value: Germinating Seeds
  misc_feature: MA Experiment ID: 108462 Result: Up-regulated in Transcription
  misc_feature: MA Experiment 108462 PARAMETER Experiment Name: At_Germinating_Seeds_cDNA_P Parameter: Age (day) Value: 2 vs. 0
  misc_feature: MA Experiment 108462 PARAMETER Experiment Name: At_Germinating_Seeds_cDNA_P Parameter: Tissue Value: Germinating Seeds
  misc_feature: MA Experiment ID: 108463 Result: Up-regulated in Transcription
  misc_feature: MA Experiment 108463 PARAMETER Experiment Name: At_Germinating_Seeds_cDNA_P Parameter: Age (day) Value: 3 vs. 0
  misc_feature: MA Experiment 108463 PARAMETER Experiment Name: At_Germinating_Seeds_cDNA_P Parameter: Tissue Value: Germinating Seeds
  misc_feature: MA Experiment ID: 108488 Result: Down-regulated in Transcription
  misc_feature: MA Experiment ID: 108489 Result: Up-regulated in Transcription
  misc_feature: MA Experiment ID: 108594 Result: Down-regulated in Transcription
  misc_feature: MA Experiment 108594 PARAMETER Experiment Name: At_Ler-rhl_Root_cDNA_P Parameter: Plant Line Value: null
  misc_feature: MA Experiment ID: 108595 Result: Down-regulated in Transcription
  misc_feature: MA Experiment 108595 PARAMETER Experiment Name: At_Ler-pi_Ovule_cDNA_P Parameter: Plant Line Value: null
  misc_feature: MA Experiment ID: 20000180 Result: Up-regulated in Transcription
  misc_feature: MA Experiment 20000180 PARAMETER Experiment Name: At_Germinating_Seeds_P Parameter: Age (hr) Value: 24 vs. 0
  misc_feature: MA Experiment 20000180 PARAMETER Experiment Name: At_Germinating_Seeds_P Parameter: Tissue Value: Germinating Seeds
  misc_feature: MA Experiment ID: 20000184 Result: Up-regulated in Transcription
  misc_feature: MA Experiment 20000184 PARAMETER Experiment Name: At_Shoots__P Parameter: Age (day) Value: 7
  misc_feature: MA Experiment 20000184 PARAMETER Experiment Name: At_Shoots__P Parameter: Tissue Value: Shoots vs. Whole Plant
  misc_feature: MA Experiment ID: 20000185 Result: Up-regulated in Transcription
  misc_feature: MA Experiment 20000185 PARAMETER Experiment Name: At_Roots__P Parameter: Age (day) Value: 7 vs. 21
  misc_feature: MA Experiment 20000185 PARAMETER Experiment Name: At_Roots__P Parameter: Organism Value: A. thaliana
  misc_feature: MA Experiment 20000185 PARAMETER Experiment Name: At_Roots__P Parameter: Tissue Value: Roots vs. Whole Plant
  misc_feature: MA Experiment ID: 20000227 Result: Up-regulated in Transcription
  misc_feature: MA Experiment 20000227 PARAMETER Experiment Name: At_Root-Tips-vs-Tops_P Parameter: Tissue Value: Root Tips vs. Root Tops
  misc_feature: MA Experiment ID: 20000265 Result: Up-regulated in Transcription
  misc_feature: MA Experiment 20000265 PARAMETER Experiment Name: At_Open_Flower_P Parameter: Age (day) Value: 21
  misc_feature: MA Experiment 20000265 PARAMETER Experiment Name: At_Open_Flower_P Parameter: Plant Line Value: WS
  misc_feature: MA Experiment 20000265 PARAMETER Experiment Name: At_Open_Flower_P Parameter: Tissue Value: Closed Flower vs. Whole Plant
  misc_feature: MA Experiment ID: 20000438 Result: Up-regulated in Transcription
  misc_feature: MA Experiment 20000438 PARAMETER Experiment Name: At_Shoots__P Parameter: Age (day) Value: 14
  misc_feature: MA Experiment 20000438 PARAMETER Experiment Name: At_Shoots__P Parameter: Tissue Value: Shoots vs. Whole Plant
  misc_feature: MA Experiment ID: 20000439 Result: Up-regulated in Transcription
  misc_feature: MA Experiment 20000439 PARAMETER Experiment Name: At_Roots__P Parameter: Age (day) Value: 14 vs. 21
  misc_feature: MA Experiment 20000439 PARAMETER Experiment Name: At_Roots__P Parameter: Organism Value: A. thaliana
  misc_feature: MA Experiment 20000439 PARAMETER Experiment Name: At_Roots__P Parameter: Tissue Value: Roots vs. Whole Plant
  misc_feature: MA Experiment ID: 20000495 Result: Up-regulated in Transcription
  misc_feature: MA Experiment 20000495 PARAMETER Experiment Name: At_Guard_Cells_P Parameter: Harvest Date Value: 8/2/2002
  misc_feature: MA Experiment 20000495 PARAMETER Experiment Name: At_Guard_Cells_P Parameter: Organism Value: A. thaliana
  misc_feature: MA Experiment 20000495 PARAMETER Experiment Name: At_Guard_Cells_P Parameter: Tissue Value: Guard Cells vs. Leaves
  misc_feature: MA Experiment ID: 20000794 Result: Up-regulated in Transcription
  misc_feature: MA Experiment 20000794 PARAMETER Experiment Name: At_Petals_P Parameter: Age (day) Value: 23-25 days
  misc_feature: MA Experiment 20000794 PARAMETER Experiment Name: At_Petals_P Parameter: Plant Line Value: WS
  misc_feature: MA Experiment 20000794 PARAMETER Experiment Name: At_Petals_P Parameter: Tissue Value: Petals vs. Whole plant
  misc_feature: MA Experiment ID: 20001450 Result: Up-regulated in Transcription
  misc_feature: MA Experiment 20001450 PARAMETER Experiment Name: At_Far-red-induction_P Parameter: Age (day) Value: 7
  misc_feature: MA Experiment 20001450 PARAMETER Experiment Name: At_Far-red-induction_P Parameter: Light Value: Far-red vs. White
  misc_feature: MA Experiment 20001450 PARAMETER Experiment Name: At_Far-red-induction_P Parameter: Organism Value: A. thaliana
  misc_feature: MA Experiment 20001450 PARAMETER Experiment Name: At_Far-red-induction_P Parameter: Plant Line Value: Columbia
  misc_feature: MA Experiment 20001450 PARAMETER Experiment Name: At_Far-red-induction_P Parameter: Timepoint (hr) Value: 8
  misc_feature: MA Experiment 20001450 PARAMETER Experiment Name: At_Far-red-induction_P Parameter: Tissue Value: Whole Plant
aactttgtccatcccaattctctcttttttttttgtttccctaatgttttagacaaacacaattttccataattatttatttattcaatttttatctgtttttgggttacatatatcatcatcattggagactgccatatttgttaatcgtgatattaatttaactaatgtctcaaacaagctactaccgatcaccgttcggagacacgacttacaccaaagtgttcgtcggaggattagcgtgggaaactcctaccgacgaaatgcgtcgttacttcgaacagttcggagagattcttgaagccgtcatcatcaccgataaaaacaccggcaagtctaaaggctacggattcgtgacgtttcgggagtcggactcagccacgagagccgtcgctgatccaaatccggtgatcgacggaagaaaagccaattgtaatattgcatcttttggacggcctcgaccatcgccgcctcgaggtcgaggacaaacaggaagtccgagtcagtaccaaagtggaggaccatcaacctataccgggatggctgcaccactgccaccggctgcagctccccagctcatgtatccgtcgtacgggtacacctataaccctgatcaatttgggtaccaccaagcattgtacaacacacagttgcaacaagcacaatactatcagcagcagcaacagctttatggaggaggagcaacatcaccatcatcatcaggagcaaccatcatgccttctccatactattatggctattctcttcaagctcctagagtaccataccaacaccatcatcatcttcctcaaccatataatcctcaacaacatcatcatcaacggttttcttctccttctttcctcgtttacccatccaattcctcttttgcccctcctctccaaggagtactatcttcttccaccgaatctgaagcagtaccacaacaagtaccagctgcagaaggcgaagcaacaacgactgctcctgaaatcacaacaagcaacaccaaagaacctatttcttcttgatctctctctcatttcccaatttgtacaatcttcacatttttacctctctctctctgaaaaaaagaaaacagctaattcatttatttctcaaccagagcaatgacttgagccccaagaagacagactcaacactgtcaaacttaaaaagacggctcaagataaatctcttgtcatattttgctctttttctgacggaatatatataaaaatttgagc

SEQ ID NO: 101463 - protein, 287 aa, Arabidopsis thaliana; identical to SEQ ID NO: 41742
  peptide (1)..(287): Ceres Seq. ID no. 13607918
  misc_feature (19)..(76): Pfam Name: RNA recognition motif. (a.k.a. RRM, RBD, or RNP domain) Pfam Description: RNA recognition motif. (a.k.a. RRM, RBD, or RNP
  misc_feature (1)..(287): Homolog of NCBI NO: 18411885 NR Description: RNA recognition motif (RRM)-containing protein
  misc_feature (1)..(287): Homolog of NCBI NO: 25405025 NR Description: protein F3F9.20 [imported] - Arabidopsis thaliana
  misc_feature (1)..(287): Homolog of NCBI NO: 25518109 NR Description: T16E15.6 protein - Arabidopsis thaliana Contains similarity to seb4D protein from Mus musculus gb|X75316
  misc_feature (1)..(144): Homolog of NCBI NO: 18395106 NR Description: RNA recognition motif (RRM)-containing protein thaliana] >gi|21593674|gb|AAM65641.1| unknown [Arabidopsis
  misc_feature (11)..(257): Homolog of NCBI NO: 34907334 NR Description: P0698A10.29 [Oryza sativa (japonica
  misc_feature (6)..(279): Homolog of NCBI NO: 22330665 NR Description: RNA recognition motif (RRM)-containing protein
  misc_feature (6)..(271): Homolog of NCBI NO: 18394923 NR Description: RNA recognition motif (RRM)-containing protein
  misc_feature (6)..(271): Homolog of NCBI NO: 15010636 NR Description: At1g20880/F9H16_14 [Arabidopsis thaliana]
  misc_feature (6)..(271): Homolog of NCBI NO: 23505939 NR Description: At1g20880/F9H16_14 [Arabidopsis thaliana]
  misc_feature (12)..(245): Homolog of NCBI NO: 18395177 NR Description: RNA recognition motif (RRM)-containing protein thaliana] >gi|13605871|gb|AAK32921.1|AF367334_1 [Arabidopsis thaliana] >gi|16323282|gb|AAL15396.1|

SEQ ID NO: 101464 - protein, 255 aa, Arabidopsis thaliana; identical to SEQ ID NO: 41743
  peptide (1)..(255): Ceres Seq. ID no. 13607919
  misc_feature (1)..(44): Pfam Name: RNA recognition motif. (a.k.a. RRM, RBD, or RNP domain) Pfam Description: RNA recognition motif. (a.k.a. RRM, RBD, or RNP
  misc_feature (1)..(255): Homolog of NCBI NO: 18411885 NR Description: RNA recognition motif (RRM)-containing protein
  misc_feature (1)..(255): Homolog of NCBI NO: 25405025 NR Description: protein F3F9.20 [imported] - Arabidopsis thaliana
  misc_feature (1)..(255): Homolog of NCBI NO: 25518109 NR Description: T16E15.6 protein - Arabidopsis thaliana Contains similarity to seb4D protein from Mus musculus gb|X75316
  misc_feature (1)..(112): Homolog of NCBI NO: 18395106 NR Description: RNA recognition motif (RRM)-containing protein thaliana] >gi|21593674|gb|AAM65641.1| unknown [Arabidopsis
  misc_feature (1)..(225): Homolog of NCBI NO: 34907334 NR Description: P0698A10.29 [Oryza sativa (japonica
  misc_feature (1)..(247): Homolog of NCBI NO: 22330665 NR Description: RNA recognition motif (RRM)-containing protein
  misc_feature (1)..(239): Homolog of NCBI NO: 18394923 NR Description: RNA recognition motif (RRM)-containing protein
  misc_feature (1)..(239): Homolog of NCBI NO: 15010636 NR Description: At1g20880/F9H16_14 [Arabidopsis thaliana]
  misc_feature (1)..(239): Homolog of NCBI NO: 23505939 NR Description: At1g20880/F9H16_14 [Arabidopsis thaliana]
  misc_feature (1)..(213): Homolog of NCBI NO: 18395177 NR Description: RNA recognition motif (RRM)-containing protein thaliana] >gi|13605871|gb|AAK32921.1|AF367334_1 [Arabidopsis thaliana] >gi|16323282|gb|AAL15396.1|

SEQ ID NO: 101465 - protein, 163 aa, Arabidopsis thaliana; identical to SEQ ID NO: 41744
  peptide (1)..(163): Ceres Seq. ID no. 13607920
  misc_feature (1)..(163): Homolog of NCBI NO: 18411885 NR Description: RNA recognition motif (RRM)-containing protein
  misc_feature (1)..(163): Homolog of NCBI NO: 25405025 NR Description: protein F3F9.20 [imported] - Arabidopsis thaliana
  misc_feature (1)..(163): Homolog of NCBI NO: 25518109 NR Description: T16E15.6 protein - Arabidopsis thaliana Contains similarity to seb4D protein from Mus musculus gb|X75316
  misc_feature (1)..(20): Homolog of NCBI NO: 18395106 NR Description: RNA recognition motif (RRM)-containing protein thaliana] >gi|21593674|gb|AAM65641.1| unknown [Arabidopsis
  misc_feature (1)..(133): Homolog of NCBI NO: 34907334 NR Description: P0698A10.29 [Oryza sativa (japonica
  misc_feature (1)..(155): Homolog of NCBI NO: 22330665 NR Description: RNA recognition motif (RRM)-containing protein
  misc_feature (1)..(147): Homolog of NCBI NO: 18394923 NR Description: RNA recognition motif (RRM)-containing protein
  misc_feature (1)..(147): Homolog of NCBI NO: 15010636 NR Description: At1g20880/F9H16_14 [Arabidopsis thaliana]
  misc_feature (1)..(147): Homolog of NCBI NO: 23505939 NR Description: At1g20880/F9H16_14 [Arabidopsis thaliana]
  misc_feature (1)..(121): Homolog of NCBI NO: 18395177 NR Description: RNA recognition motif (RRM)-containing protein thaliana] >gi|13605871|gb|AAK32921.1|AF367334_1 [Arabidopsis thaliana] >gi|16323282|gb|AAL15396.1|

SEQ ID NO: 101466 - DNA, 2363 bp, Arabidopsis thaliana
  misc_feature (1)..(2363): Ceres Seq. ID no. 13607948
  misc_feature: MA Experiment ID: 108434 Result: Down-regulated in Transcription
  misc_feature: MA Experiment 108434 PARAMETER Experiment Name: At_Root_Tips_cDNA_P Parameter: Tissue Value: Root Tips
  misc_feature: MA Experiment ID: 108462 Result: Up-regulated in Transcription
  misc_feature: MA Experiment 108462 PARAMETER Experiment Name: At_Germinating_Seeds_cDNA_P Parameter: Age (day) Value: 2 vs. 0
  misc_feature: MA Experiment 108462 PARAMETER Experiment Name: At_Germinating_Seeds_cDNA_P Parameter: Tissue Value: Germinating Seeds
  misc_feature: MA Experiment ID: 20000111 Result: Down-regulated in Transcription
  misc_feature: MA Experiment 20000111 PARAMETER Experiment Name: At_42deg_Heat_cDNA_P Parameter: Temperature (deg C) Value: 42 vs. 22
  misc_feature: MA Experiment 20000111 PARAMETER Experiment Name: At_42deg_Heat_cDNA_P Parameter: Timepoint (hr) Value: 6
  misc_feature: MA Experiment 20000111 PARAMETER Experiment Name: At_42deg_Heat_cDNA_P Parameter: Tissue Value: Aerial
  misc_feature: MA Experiment ID: 20000113 Result: Down-regulated in Transcription
  misc_feature: MA Experiment 20000113 PARAMETER Experiment Name: At_42deg_Heat_cDNA_P Parameter: Temperature (deg C) Value: 42 vs. 22
  misc_feature: MA Experiment 20000113 PARAMETER Experiment Name: At_42deg_Heat_cDNA_P Parameter: Timepoint (hr) Value: 8
  misc_feature: MA Experiment 20000113 PARAMETER Experiment Name: At_42deg_Heat_cDNA_P Parameter: Tissue Value: Aerial
  misc_feature: MA Experiment ID: 20000173 Result: Down-regulated in Transcription
  misc_feature: MA Experiment 20000173 PARAMETER Experiment Name: At_42deg_Heat_P Parameter: Age (day) Value: 14
  misc_feature: MA Experiment 20000173 PARAMETER Experiment Name: At_42deg_Heat_P Parameter: Organism Value: A. thaliana
  misc_feature: MA Experiment 20000173 PARAMETER Experiment Name: At_42deg_Heat_P Parameter: Plant Line Value: WS
  misc_feature: MA Experiment 20000173 PARAMETER Experiment Name: At_42deg_Heat_P Parameter: Temperature (deg C) Value: 42 vs. 22
  misc_feature: MA Experiment 20000173 PARAMETER Experiment Name: At_42deg_Heat_P Parameter: Timepoint (hr) Value: 6
  misc_feature: MA Experiment 20000173 PARAMETER Experiment Name: At_42deg_Heat_P Parameter: Tissue Value: Aerial
  misc_feature: MA Experiment ID: 20000184 Result: Down-regulated in Transcription
  misc_feature: MA Experiment 20000184 PARAMETER Experiment Name: At_Shoots__P Parameter: Age (day) Value: 7
  misc_feature: MA Experiment 20000184 PARAMETER Experiment Name: At_Shoots__P Parameter: Tissue Value: Shoots vs. Whole Plant
  misc_feature: MA Experiment ID: 20000265 Result: Down-regulated in Transcription
  misc_feature: MA Experiment 20000265 PARAMETER Experiment Name: At_Open_Flower_P Parameter: Age (day) Value: 21
  misc_feature: MA Experiment 20000265 PARAMETER Experiment Name: At_Open_Flower_P Parameter: Plant Line Value: WS
  misc_feature: MA Experiment 20000265 PARAMETER Experiment Name: At_Open_Flower_P Parameter: Tissue Value: Closed Flower vs. Whole Plant
  misc_feature: MA Experiment ID: 20000451 Result: Down-regulated in Transcription
  misc_feature: MA Experiment 20000451 PARAMETER Experiment Name: At_CS6879_Shoots-Roots_P Parameter: Age (day) Value: 14
  misc_feature: MA Experiment 20000451 PARAMETER Experiment Name: At_CS6879_Shoots-Roots_P Parameter: Organism Value: A. thaliana
  misc_feature: MA Experiment 20000451 PARAMETER Experiment Name: At_CS6879_Shoots-Roots_P Parameter: Plant Line Value: CS6879 vs. WS
  misc_feature: MA Experiment 20000451 PARAMETER Experiment Name: At_CS6879_Shoots-Roots_P Parameter: Tissue Value: Roots
  misc_feature: MA Experiment ID: 20001905 Result: Down-regulated in Transcription
  misc_feature: MA Experiment 20001905 PARAMETER Experiment Name: At_Drought_Reproduction_P Parameter: Age (day) Value: 40
  misc_feature: MA Experiment 20001905 PARAMETER Experiment Name: At_Drought_Reproduction_P Parameter: Organism Value: A. thaliana
  misc_feature: MA Experiment 20001905 PARAMETER Experiment Name: At_Drought_Reproduction_P Parameter: Plant Line Value: WS
  misc_feature: MA Experiment 20001905 PARAMETER Experiment Name: At_Drought_Reproduction_P Parameter: Timepoint (day) Value: 10
  misc_feature: MA Experiment 20001905 PARAMETER Experiment Name: At_Drought_Reproduction_P Parameter: Tissue Value: Rosettes
  misc_feature: MA Experiment 20001905 PARAMETER Experiment Name: At_Drought_Reproduction_P Parameter: Treatment Value: Drought vs. No Drought
agagaaaaaaaaaatgaagagaaggagactttttttctctgttctactctctatcctaactctgttcatcaatggtcctttgataacgacagctcaatctccaccttcttcttcaacttcatgtaaccgtatctgtggaggaatcgagattccttttccttttggaatcggacgaagagactgttttctcaacgactggtacgaggttgtctgtaacagcaccacctccggtaaatccttagctccgttcctctataagatcaacagagaattagttagcatcactcttcgaagcagcatcgacagttcctacggagttgttcacattaaatctccggtgacttcctccggctgttctcaacgacccgtaaagcctcttcctttaaacctcaccggtaaaggaagtccctttttcatcaccgactcgaatcgtctcgtctcagttggttgtgacaacagagcattgattacagacatcgaatctcagatcacaggatgcgaatcgagctgcgacggagataagagtcgtttagacaagatctgcggtggttacacatgttgtcaggcgaagattccggcggatagaccgcaagtaatcggcgttgaccttgaaagctccggtggtaacacaactcaaggaggaaactgtaaagttgctttcttgacgaatgagacttactctccggcgaatgttacagagccggaacaattttatactaatgggtttacggtgattgagcttggttggtactttgatacatcagattctcggttaacgaatcctgtgggttgtgtgaatttgacggaaacagggatttacacgagcgcaccgagctgtgtttgtgagtatggtaacttctctggctttggttacagtaactgttactgcaatcagattggttacagagggaatccttatcttcctggtggatgcattgacattgacgaatgtgaggaaggaaaaggactaagcagctgtggagaactaacttgtgtgaatgttcctggatcgtggaggtgcgagctgaatggagtagggaagatcaagcctctgtttccaggtcttgttctaggttttccactgttgttcttggtacttgggatatggggattgatcaagttcgttaagaagagaaggaagattatccgaaagagaatgttctttaaacgtaatggaggcttgttgttgaaacaacagttaactacaagaggaggtaatgtgcagtcatcgaagatattcagttcgaaagagctggagaaagcgacggataacttcaatatgaacagggttcttgggcaaggaggtcaaggcactgtctacaaaggaatgttggtagatgggcgaattgttgctgtgaaaagatctaaagttttagatgaagataaagttgaggagtttatcaatgaagttggtgttctctcgcagattaaccatagaaatattgtcaaactcatggggtgttgtctcgagacagaggttcctatcttggtttatgaacatattccaaatggagacctattcaagcggcttcaccatgattctgatgattacactatgacttgggatgtgcgattgcgcatctctgttgagattgcaggagcacttgcttacttgcactcggctgcatcaactccggtctatcatagagatgtcaagaccacaaacatacttttggatgagaagtatagagccaaggtatcggatttcgggacctcgagatccataaacgtagatcaaactcacttgactactctagttgcaggtacttttggatacttggatccagagtactttcaaactagccagtttacggataaaagtgatgtttatagttttggggtcgtcttggttgagctcataactggagaaaagccgttttctgtaatgcggcccgaagaaaacagaggacttgtgtctcatttcaatgaggctatgaaacagaacagagttcttgatattgttgattctcggatcaaagaaggttgcacgttggaacaagtgttggctgtggcgaaacttgccagaaggtgtttaagtctaaaagggaagaaacgaccaaatatgagagaggtttcagttgagcttgagaggatccgttcatcacccgaagatttggagttacatattgaagaggaggacgaagaagaatgcgccatggaaatcaacatggatgattcttggagcgtcgacatgactgctccagcttccctctttgatttatcgcccaagttagacgttgaaccgctggttcctcaacgaacatggtgatgatggaacctaaaacactgcaaatgtacaaagtgctgtgataacaaattctctcaatgttccattctttattaataaaaaatttgatgatgtc

SEQ ID NO: 101467 - protein, 755 aa, Arabidopsis thaliana
  peptide (1)..(755): Ceres Seq. ID no. 13607949
  misc_feature (3)..(755): Homolog of NCBI NO: 15219134 NR Description: WAK-like kinase (WLK) [Arabidopsis thaliana] putative WAK kinase (WLK) [Arabidopsis thaliana]
  misc_feature (342)..(755): Homolog of NCBI NO: 15219140 NR Description: WAK-like kinase (WLK) [Arabidopsis thaliana]
  misc_feature (3)..(354): Homolog of NCBI NO: 15219140 NR Description: WAK-like kinase (WLK) [Arabidopsis thaliana]
  misc_feature (23)..(724): Homolog of NCBI NO: 15219143 NR Description: WAK-like kinase (WLK) [Arabidopsis thaliana]
  misc_feature (5)..(722): Homolog of NCBI NO: 15219132 NR Description: WAK-like kinase (WLK) [Arabidopsis thaliana]
  misc_feature (38)..(170): Homolog of NCBI NO: 25405037 NR Description: protein F20B17.10 [imported] - Arabidopsis >gi|7715604|gb|AAF68122.1|AC010793_17 F20B17.10 [Arabidopsis
  misc_feature (316)..(755): Homolog of NCBI NO: 25287660 NR Description: hypothetical protein T24D18.23 [imported] - thaliana >gi|6587819|gb|AAF18510.1|AC010924_23 Contains
  misc_feature (3)..(288): Homolog of NCBI NO: 25287660 NR Description: hypothetical protein T24D18.23 [imported] - thaliana >gi|6587819|gb|AAF18510.1|AC010924_23 Contains
  misc_feature (338)..(755): Homolog of NCBI NO: 25287658 NR Description: hypothetical protein T24D18.21 - Arabidopsis
  misc_feature (3)..(267): Homolog of NCBI NO: 25287658 NR Description: hypothetical protein T24D18.21 - Arabidopsis
EKKKMKRRRLFFSVLLSILTLFINGPLITTAQSPPSSSTSCNRICGGIEIPFPFGIGRRDCFLNDWYEVVCNSTTSGKSLAPFLYKINRELVSITLRSSIDSSYGVVHIKSPVTSSGCSQRPVKPLPLNLTGKGSPFFITDSNRLVSVGCDNRALITDIESQITGCESSCDGDKSRLDKICGGYTCCQAKIPADRPQVIGVDLESSGGNTTQGGNCKVAFLTNETYSPANVTEPEQFYTNGFTVIELGWYFDTSDSRLTNPVGCVNLTETGIYTSAPSCVCEYGNFSGFGYSNCYCNQIGYRGNPYLPGGCIDIDECEEGKGLSSCGELTCVNVPGSWRCELNGVGKIKPLFPGLVLGFPLLFLVLGIWGLIKFVKKRRKIIRKRMFFKRNGGLLLKQQLTTRGGNVQSSKIFSSKELEKATDNFNMNRVLGQGGQGTVYKGMLVDGRIVAVKRSKVLDEDKVEEFINEVGVLSQINHRNIVKLMGCCLETEVPILVYEHIPNGDLFKRLHHDSDDYTMTWDVRLRISVEIAGALAYLHSAASTPVYHRDVKTTNILLDEKYRAKVSDFGTSRSINVDQTHLTTLVAGTFGYLDPEYFQTSQFTDKSDVYSFGVVLVELITGEKPFSVMRPEENRGLVSHFNEAMKQNRVLDIVDSRIKEGCTLEQVLAVAKLARRCLSLKGKKRPNMREVSVELERIRSSPEDLELHIEEEDEEECAMEINMDDSWSVDMTAPASLFDLSPKLDVEPLVPQRTW

SEQ ID NO: 101468 - protein, 751 aa, Arabidopsis thaliana; identical to SEQ ID NO: 38317
  peptide (1)..(751): Ceres Seq. ID no. 13607950
  misc_feature (1)..(751): Homolog of NCBI NO: 15219134 NR Description: WAK-like kinase (WLK) [Arabidopsis thaliana] putative WAK kinase (WLK) [Arabidopsis thaliana]
  misc_feature (338)..(751): Homolog of NCBI NO: 15219140 NR Description: WAK-like kinase (WLK) [Arabidopsis thaliana]
  misc_feature (1)..(350): Homolog of NCBI NO: 15219140 NR Description: WAK-like kinase (WLK) [Arabidopsis thaliana]
  misc_feature (19)..(720): Homolog of NCBI NO: 15219143 NR Description: WAK-like kinase (WLK) [Arabidopsis thaliana]
  misc_feature (1)..(718): Homolog of NCBI NO: 15219132 NR Description: WAK-like kinase (WLK) [Arabidopsis thaliana]
  misc_feature (34)..(166): Homolog of NCBI NO: 25405037 NR Description: protein F20B17.10 [imported] - Arabidopsis >gi|7715604|gb|AAF68122.1|AC010793_17 F20B17.10 [Arabidopsis
  misc_feature (312)..(751): Homolog of NCBI NO: 25287660 NR Description: hypothetical protein T24D18.23 [imported] - thaliana >gi|6587819|gb|AAF18510.1|AC010924_23 Contains
  misc_feature (1)..(284): Homolog of NCBI NO: 25287660 NR Description: hypothetical protein T24D18.23 [imported] - thaliana >gi|6587819|gb|AAF18510.1|AC010924_23 Contains
  misc_feature (334)..(751): Homolog of NCBI NO: 25287658 NR Description: hypothetical protein T24D18.21 - Arabidopsis
  misc_feature (1)..(263): Homolog of NCBI NO: 25287658 NR Description: hypothetical protein T24D18.21 - Arabidopsis

SEQ ID NO: 101469 - DNA, 1015 bp, Arabidopsis thaliana
  misc_feature (1)..(1015): Ceres Seq. ID no. 13607959
  misc_feature: MA Experiment ID: 108434 Result: Up-regulated in Transcription
  misc_feature: MA Experiment 108434 PARAMETER Experiment Name: At_Root_Tips_cDNA_P Parameter: Tissue Value: Root Tips
  misc_feature: MA Experiment ID: 108461 Result: Down-regulated in Transcription
  misc_feature: MA Experiment 108461 PARAMETER Experiment Name: At_Germinating_Seeds_cDNA_P Parameter: Age (day) Value: 1 vs. 0
  misc_feature: MA Experiment 108461 PARAMETER Experiment Name: At_Germinating_Seeds_cDNA_P Parameter: Tissue Value: Germinating Seeds
  misc_feature: MA Experiment ID: 108462 Result: Down-regulated in Transcription
  misc_feature: MA Experiment 108462 PARAMETER Experiment Name: At_Germinating_Seeds_cDNA_P Parameter: Age (day) Value: 2 vs. 0
  misc_feature: MA Experiment 108462 PARAMETER Experiment Name: At_Germinating_Seeds_cDNA_P Parameter: Tissue Value: Germinating Seeds
  misc_feature: MA Experiment ID: 108463 Result: Down-regulated in Transcription
  misc_feature: MA Experiment 108463 PARAMETER Experiment Name: At_Germinating_Seeds_cDNA_P Parameter: Age (day) Value: 3 vs. 0
  misc_feature: MA Experiment 108463 PARAMETER Experiment Name: At_Germinating_Seeds_cDNA_P Parameter: Tissue Value: Germinating Seeds
  misc_feature: MA Experiment ID: 108573 Result: Up-regulated in Transcription
  misc_feature: MA Experiment 108573 PARAMETER Experiment Name: At_Drought_cDNA_P Parameter: Timepoint (hr) Value: 6
  misc_feature: MA Experiment 108573 PARAMETER Experiment Name: At_Drought_cDNA_P Parameter: Tissue Value: Aerial
  misc_feature: MA Experiment 108573 PARAMETER Experiment Name: At_Drought_cDNA_P Parameter: Treatment Value: Drought vs. No Drought
  misc_feature: MA Experiment ID: 20000179 Result: Down-regulated in Transcription
  misc_feature: MA Experiment 20000179 PARAMETER Experiment Name: At_Germinating_Seeds_P Parameter: Age (hr) Value: 6 vs. 0
  misc_feature: MA Experiment 20000179 PARAMETER Experiment Name: At_Germinating_Seeds_P Parameter: Tissue Value: Germinating Seeds
agagctcataaattttgtggagagcaaagttctcagcaaaatcaaagaagaaccgaacgagagagagaaacgaattcttctcaggtgttaaagaatgtctcggagatatgatagccgtaccacaatcttctcgccagaaggtcgtctttaccaggtagagtatgctatggaggccattggaaacgccggttctgcgattggaatcttatccaaagacggtgttgtgttgatcggtgagaagaaagtcacctcaaagcttcttcaaacctcaacctctgctgagaaaatgtacaagattgatgaccatgttgcctgtgctgttgctggtataatgtctgatgctaacatacttatcaacacggctcgagttcaagctcaacgttacaccttcatgtaccaagagcccatgccggttgagcagctggttcaatctctttgtgacacaaaacaaggatacacacagtttggtggtcttcgcccgtttggtgtctcctttctctttgcaggatgggacaagcaccatggtttccagctttatatgagtgacccgagtgggaactatggtggttggaaagctgcagctgttggagcaaacaatcaggcggctcagtctatcctgaaacaagactacaaggacgatgcaaccagggaagaagcagtcgagcttgccttgaaggttctgaccaagacaatggacagcactagcttaacatctgagaagctagagcttgctgaagtgtatctgactccatccaagactgttaagtaccatgttcactcacctgagtcgctcaccaaactgttggtcaagcacggtgtgactcaacccgctgctgaaacatcttaagcccaaaagtatctctagtcttattcgcctggtacggtgtctccgctttatgtttgtagttctctgttttacagctttccttttggtttgaactttgaagttacctttggcgatgaaactagatttgacaatgttatgaatttatcttcaatgcatcatctttttact

SEQ ID NO: 101470 - protein, 250 aa, Arabidopsis thaliana; identical to SEQ ID NO: 30939
  peptide (1)..(250): Ceres Seq. ID no. 13607960
  misc_feature (28)..(215): Pfam Name: Proteasome A-type and B-type Pfam Description: Proteasome A-type and B-type
  misc_feature (1)..(250): Homolog of NCBI NO: 15233268 NR Description: 20S proteasome alpha subunit C (PAC1) thaliana] >gi|12643237|sp|O81148|PSA4_ARATH Proteasome subunit type 4 (20S proteasome alpha subunit C) (Proteasome 27 kDa
  misc_feature (1)..(250): Homolog of NCBI NO: 2511584 NR Description: multicatalytic endopeptidase [Arabidopsis
  misc_feature (1)..(250): Homolog of NCBI NO: 1709761 NR Description: Proteasome subunit alpha type 4 (20S proteasome
  misc_feature (1)..(250): Homolog of NCBI NO: 12229904 NR Description: Proteasome subunit alpha type 4 (20S proteasome
  misc_feature (9)..(250): Homolog of NCBI NO: 6984140 NR Description: proteasome 27 kDa subunit [Euphorbia esula]
  misc_feature (1)..(248): Homolog of NCBI NO: 34898416 NR Description: ESTs AU058081(E30812),AU058365(E50679), correspond to a region of the predicted gene.~Similar to Spinacia
  misc_feature (1)..(248): Homolog of NCBI NO: 34898458 NR Description: ESTs AU058081(E3082),AU075427(E30384) correspond a region of the predicted gene.~Similar to Spinacia oleracea
  misc_feature (6)..(172): Homolog of NCBI NO: 14594915 NR Description: putative alpha3 proteasome subunit [Nicotiana
  misc_feature (1)..(244): Homolog of NCBI NO: 464458 NR Description: Proteasome subunit alpha type 4 (Proteasome
  misc_feature (1)..(244): Homolog of NCBI NO: 40744887 NR Description: conserved hypothetical protein [Aspergillus

SEQ ID NO: 101471 - protein, 226 aa, Arabidopsis thaliana; identical to SEQ ID NO: 30940
  peptide (1)..(226): Ceres Seq. ID no. 13607961
  misc_feature (4)..(191): Pfam Name: Proteasome A-type and B-type Pfam Description: Proteasome A-type and B-type
  misc_feature (1)..(226): Homolog of NCBI NO: 15233268 NR Description: 20S proteasome alpha subunit C (PAC1) thaliana] >gi|12643237|sp|O81148|PSA4_ARATH Proteasome subunit type 4 (20S proteasome alpha subunit C) (Proteasome 27 kDa
  misc_feature (1)..(226): Homolog of NCBI NO: 2511584 NR Description: multicatalytic endopeptidase [Arabidopsis
  misc_feature (1)..(226): Homolog of NCBI NO: 1709761 NR Description: Proteasome subunit alpha type 4 (20S proteasome
  misc_feature (1)..(226): Homolog of NCBI NO: 12229904 NR Description: Proteasome subunit alpha type 4 (20S proteasome
  misc_feature (1)..(226): Homolog of NCBI NO: 6984140 NR Description: proteasome 27 kDa subunit [Euphorbia esula]
  misc_feature (1)..(224): Homolog of NCBI NO: 34898416 NR Description: ESTs AU058081(E30812),AU058365(E50679), correspond to a region of the predicted gene.~Similar to Spinacia
  misc_feature (1)..(224): Homolog of NCBI NO: 34898458 NR Description: ESTs AU058081(E3082),AU075427(E30384) correspond a region of the predicted gene.~Similar to Spinacia oleracea
  misc_feature (1)..(148): Homolog of NCBI NO: 14594915 NR Description: putative alpha3 proteasome subunit [Nicotiana
  misc_feature (1)..(220): Homolog of NCBI NO: 464458 NR Description: Proteasome subunit alpha type 4 (Proteasome
  misc_feature (1)..(220): Homolog of NCBI NO: 40744887 NR Description: conserved hypothetical protein [Aspergillus

SEQ ID NO: 101472 - protein, 186 aa, Arabidopsis thaliana; identical to SEQ ID NO: 30941
  peptide (1)..(186): Ceres Seq. ID no. 13607962
  misc_feature (1)..(151): Pfam Name: Proteasome A-type and B-type Pfam Description: Proteasome A-type and B-type
  misc_feature (1)..(186): Homolog of NCBI NO: 15233268 NR Description: 20S proteasome alpha subunit C (PAC1) thaliana] >gi|12643237|sp|O81148|PSA4_ARATH Proteasome subunit type 4 (20S proteasome alpha subunit C) (Proteasome 27 kDa
  misc_feature (1)..(186): Homolog of NCBI NO: 2511584 NR Description: multicatalytic endopeptidase [Arabidopsis
  misc_feature (1)..(186): Homolog of NCBI NO: 1709761 NR Description: Proteasome subunit alpha type 4 (20S proteasome
  misc_feature (1)..(186): Homolog of NCBI NO: 12229904 NR Description: Proteasome subunit alpha type 4 (20S proteasome
  misc_feature (1)..(186): Homolog of NCBI NO: 6984140 NR Description: proteasome 27 kDa subunit [Euphorbia esula]
  misc_feature (1)..(184): Homolog of NCBI NO: 34898416 NR Description: ESTs AU058081(E30812),AU058365(E50679), correspond to a region of the predicted gene.~Similar to Spinacia
  misc_feature (1)..(184): Homolog of NCBI NO: 34898458 NR Description: ESTs AU058081(E3082),AU075427(E30384) correspond a region of the predicted gene.~Similar to Spinacia oleracea
  misc_feature (1)..(108): Homolog of NCBI NO: 14594915 NR Description: putative alpha3 proteasome subunit [Nicotiana
  misc_feature (1)..(180): Homolog of NCBI NO: 464458 NR Description: Proteasome subunit alpha type 4 (Proteasome
  misc_feature (1)..(180): Homolog of NCBI NO: 40744887 NR Description: conserved hypothetical protein [Aspergillus

SEQ ID NO: 101473 - DNA, 1816 bp, Arabidopsis thaliana
  misc_feature (1)..(1816): Ceres Seq. ID no. 13607971
  misc_feature: MA Experiment ID: 20000436 Result: Up-regulated in Transcription
  misc_feature: MA Experiment 20000436 PARAMETER Experiment Name: At_Drought_P Parameter: Age (day) Value: 7
  misc_feature: MA Experiment 20000436 PARAMETER Experiment Name: At_Drought_P Parameter: Organism Value: A. thaliana
  misc_feature: MA Experiment 20000436 PARAMETER Experiment Name: At_Drought_P Parameter: Plant Line Value: WS
  misc_feature: MA Experiment 20000436 PARAMETER Experiment Name: At_Drought_P Parameter: Timepoint (hr) Value: 12
  misc_feature: MA Experiment 20000436 PARAMETER Experiment Name: At_Drought_P Parameter: Tissue Value: Whole Plant
  misc_feature: MA Experiment 20000436 PARAMETER Experiment Name: At_Drought_P Parameter: Treatment Value: Drought vs. No Drought
  misc_feature: MA Experiment ID: 20000437 Result: Up-regulated in Transcription
  misc_feature: MA Experiment 20000437 PARAMETER Experiment Name: At_Drought_P Parameter: Age (day) Value: 8
  misc_feature: MA Experiment 20000437 PARAMETER Experiment Name: At_Drought_P Parameter: Organism Value: A. thaliana
  misc_feature: MA Experiment 20000437 PARAMETER Experiment Name: At_Drought_P Parameter: Plant Line Value: WS
  misc_feature: MA Experiment 20000437 PARAMETER Experiment Name: At_Drought_P Parameter: Timepoint (hr) Value: 24
  misc_feature: MA Experiment 20000437 PARAMETER Experiment Name: At_Drought_P Parameter: Tissue Value: Whole Plant
  misc_feature: MA Experiment 20000437 PARAMETER Experiment Name: At_Drought_P Parameter: Treatment Value: Drought vs. No Drought
  misc_feature: MA Experiment ID: 20000794 Result: Up-regulated in Transcription
  misc_feature: MA Experiment 20000794 PARAMETER Experiment Name: At_Petals_P Parameter: Age (day) Value: 23-25 days
  misc_feature: MA Experiment 20000794 PARAMETER Experiment Name: At_Petals_P Parameter: Plant Line Value: WS
  misc_feature: MA Experiment 20000794 PARAMETER Experiment Name: At_Petals_P Parameter: Tissue Value: Petals vs. Whole plant
atggtcgggagcaacaacaacgccaagtcatcgacgaacaagcctccagcaacttccatccccaccgctgcagcttcatcttcacagaaccataaacctcgtgtgaattcaactaacaacgatggtggaatcagtaacaacaacaacaacaacaagaaagaaagcaagccgatgatgataggtgtccagaaaaccgccgataagaaaccactgaagcctaatccatctcctaagctagctccgatcccgaaacaatctaatccgaatcatcaaaatcaaacgggtccatcatcttcacgaccaatggctccgtttcctttccctgattcatctcccgcgctaggtcctcctcctcaaccgacttatggattccatatgttagagcgtcgcacaattgttctcgctgatggtagtgtccgttcctacttcgctcttcctcctaattacatggattttcctcctcagagtcgattagctggaccggtatttgggagattccctcctttttacccggaagagtttcgagatcagcggatgaaacggaagtatccaggtgaagaagagattgataggagagatgagagagctgagatgatgagacagagacagcagtttatgcagtatgcgaatcctaatgatcactcatttatggctggtacgagtagggatgttggagaggatgttagagctgctaagcatatgagggtaggatcaagtaggcatgacaatggaggtttccaggttgaccaggttgctctaaagaaatcgtttttgggttttgttaagcgagttttcgaggatccgatggagaagaagaactacttggagaacgggagaaaagggcggcttcagtgtctcgtttgtggcaggtcttctaaagatgtccaggatacacatagtttggtaatgcacacatactgttctgatgattctagctcacgcgtgcatcatttaggcctacacaaagctctctgtgtattgatgggatggaatttctcaaaggctcctgataattcaaaggcataccagaatctacctgctgatgaggcagcaatcaaccaagcccagctaattatttggccacctcatgttattgttcagaataccagtacagggaagggaaaagaagggcgcatggaaggctttggaaacaaaacaatggataacagaattagagaactaggactcactggtgggaaatcgaagtcgttgtatggaagagagggtcatttgggaattaccctgttcaagtttgctggagacgattcagggctcagggatgctatgagaatggcagaatattttgagaagataaaccgtgggcgtaagagttgggggagggtacagccactcactccaagcaaagatgatgagaaaaaccctggtcttgtcgaggttgatgggaggacgggagagaaaaagaggatcttttatggttatctcgcgactgtaacggacttggacaaagtcgatgtggagacaaagaagaaaaccacaatcgagagccttagagaactcacaagaacaaagtaaattacagttttcttctcccacgaaaggtacacttaactttcgaggtatttgttgcctattgaatctggattcttagtcgcaacctaaaaaactcgaaaggaggaacgaaagtttttttttttttttttttaatttatagatgaagtcttggtctctttgatccttcgattcagtgttcatattgcatagtctaatatcggttgaacctgatatatacaagttctctttaccaacatccttagaagtatattgtgatagttgcttgatgcttttgatgtcaaac

SEQ ID NO: 101474 - protein, 510 aa, Arabidopsis thaliana
  peptide (1)..(510): Ceres Seq. ID no. 13607972
  misc_feature (354)..(464): Pfam Name: XS domain Pfam Description: XS domain
  misc_feature (1)..(290): Homolog of NCBI NO: 18403376 NR Description: hypothetical protein [Arabidopsis thaliana]
  misc_feature (303)..(510): Homolog of NCBI NO: 9293880 NR Description: gene_id:MCB17.19~unknown protein [Arabidopsis
  misc_feature (328)..(510): Homolog of NCBI NO: 30686649 NR Description: expressed protein [Arabidopsis thaliana]
  misc_feature (248)..(505): Homolog of NCBI NO: 22773240 NR Description: Hypothetical protein [Oryza sativa (japonica
  misc_feature (73)..(171): Homolog of NCBI NO: 22773240 NR Description: Hypothetical protein [Oryza sativa (japonica
  misc_feature (379)..(510): Homolog of NCBI NO: 15081713 NR Description: AT3g22430/MCB17_17 [Arabidopsis thaliana]
MVGSNNNAKSSTNKPPATSIPTAAASSSQNHKPRVNSTNNDGGISNNNNNNKKESKPMMIGVQKTADKKPLKPNPSPKLAPIPKQSNPNHQNQTGPSSSRPMAPFPFPDSSPALGPPPQPTYGFHMLERRTIVLADGSVRSYFALPPNYMDFPPQSRLAGPVFGRFPPFYPEEFRDQRMKRKYPGEEEIDRRDERAEMMRQRQQFMQYANPNDHSFMAGTSRDVGEDVRAAKHMRVGSSRHDNGGFQVDQVALKKSFLGFVKRVFEDPMEKKNYLENGRKGRLQCLVCGRSSKDVQDTHSLVMHTYCSDDSSSRVHHLGLHKALCVLMGWNFSKAPDNSKAYQNLPADEAAINQAQLIIWPPHVIVQNTSTGKGKEGRMEGFGNKTMDNRIRELGLTGGKSKSLYGREGHLGITLFKFAGDDSGLRDAMRMAEYFEKINRGRKSWGRVQPLTPSKDDEKNPGLVEVDGRTGEKKRIFYGYLATVTDLDKVDVETKKKTTIESLRELTRTK

SEQ ID NO: 101475 - protein, 453 aa, Arabidopsis thaliana
  peptide (1)..(453): Ceres Seq. ID no. 13607973
  misc_feature (297)..(407): Pfam Name: XS domain Pfam Description: XS domain
  misc_feature (1)..(233): Homolog of NCBI NO: 18403376 NR Description: hypothetical protein [Arabidopsis thaliana]
  misc_feature (246)..(453): Homolog of NCBI NO: 9293880 NR Description: gene_id:MCB17.19~unknown protein [Arabidopsis
  misc_feature (271)..(453): Homolog of NCBI NO: 30686649 NR Description: expressed protein [Arabidopsis thaliana]
  misc_feature (191)..(448): Homolog of NCBI NO: 22773240 NR Description: Hypothetical protein [Oryza sativa (japonica
  misc_feature (16)..(114): Homolog of NCBI NO: 22773240 NR Description: Hypothetical protein [Oryza sativa (japonica
  misc_feature (322)..(453): Homolog of NCBI NO: 15081713 NR Description: AT3g22430/MCB17_17 [Arabidopsis thaliana]
MMIGVQKTADKKPLKPNPSPKLAPIPKQSNPNHQNQTGPSSSRPMAPFPFPDSSPALGPPPQPTYGFHMLERRTIVLADGSVRSYFALPPNYMDFPPQSRLAGPVFGRFPPFYPEEFRDQRMKRKYPGEEEIDRRDERAEMMRQRQQFMQYANPNDHSFMAGTSRDVGEDVRAAKHMRVGSSRHDNGGFQVDQVALKKSFLGFVKRVFEDPMEKKNYLENGRKGRLQCLVCGRSSKDVQDTHSLVMHTYCSDDSSSRVHHLGLHKALCVLMGWNFSKAPDNSKAYQNLPADEAAINQAQLIIWPPHVIVQNTSTGKGKEGRMEGFGNKTMDNRIRELGLTGGKSKSLYGREGHLGITLFKFAGDDSGLRDAMRMAEYFEKINRGRKSWGRVQPLTPSKDDEKNPGLVEVDGRTGEKKRIFYGYLATVTDLDKVDVETKKKTTIESLRELTRTK

SEQ ID NO: 101476 - protein, 452 aa, Arabidopsis thaliana
  peptide (1)..(452): Ceres Seq. ID no. 13607974
  misc_feature (296)..(406): Pfam Name: XS domain Pfam Description: XS domain
  misc_feature (1)..(232): Homolog of NCBI NO: 18403376 NR Description: hypothetical protein [Arabidopsis thaliana]
  misc_feature (245)..(452): Homolog of NCBI NO: 9293880 NR Description: gene_id:MCB17.19~unknown protein [Arabidopsis
  misc_feature (270)..(452): Homolog of NCBI NO: 30686649 NR Description: expressed protein [Arabidopsis thaliana]
  misc_feature (190)..(447): Homolog of NCBI NO: 22773240 NR Description: Hypothetical protein [Oryza sativa (japonica
  misc_feature (15)..(113): Homolog of NCBI NO: 22773240 NR Description: Hypothetical protein [Oryza sativa (japonica
  misc_feature (321)..(452): Homolog of NCBI NO: 15081713 NR Description: AT3g22430/MCB17_17 [Arabidopsis thaliana]
MIGVQKTADKKPLKPNPSPKLAPIPKQSNPNHQNQTGPSSSRPMAPFPFPDSSPALGPPPQPTYGFHMLERRTIVLADGSVRSYFALPPNYMDFPPQSRLAGPVFGRFPPFYPEEFRDQRMKRKYPGEEEIDRRDERAEMMRQRQQFMQYANPNDHSFMAGTSRDVGEDVRAAKHMRVGSSRHDNGGFQVDQVALKKSFLGFVKRVFEDPMEKKNYLENGRKGRLQCLVCGRSSKDVQDTHSLVMHTYCSDDSSSRVHHLGLHKALCVLMGWNFSKAPDNSKAYQNLPADEAAINQAQLIIWPPHVIVQNTSTGKGKEGRMEGFGNKTMDNRIRELGLTGGKSKSLYGREGHLGITLFKFAGDDSGLRDAMRMAEYFEKINRGRKSWGRVQPLTPSKDDEKNPGLVEVDGRTGEKKRIFYGYLATVTDLDKVDVETKKKTTIESLRELTRTK

SEQ ID NO: 101477 - DNA, 964 bp, Arabidopsis thaliana
  misc_feature (1)..(964): Ceres Seq. ID no. 13607987
  misc_feature: MA Experiment ID: 108435 Result: Down-regulated in Transcription
  misc_feature: MA Experiment 108435 PARAMETER Experiment Name: At_stm_Mutants_cDNA_P Parameter: Plant Line Value: wt Landsburg vs stm
  misc_feature: MA Experiment 108435 PARAMETER Experiment Name: At_stm_Mutants_cDNA_P Parameter: Tissue Value: Shoot Apical Meristem Region
  misc_feature: MA Experiment ID: 108461 Result: Up-regulated in Transcription
  misc_feature: MA Experiment 108461 PARAMETER Experiment Name: At_Germinating_Seeds_cDNA_P Parameter: Age (day) Value: 1 vs. 0
  misc_feature: MA Experiment 108461 PARAMETER Experiment Name: At_Germinating_Seeds_cDNA_P Parameter: Tissue Value: Germinating Seeds
  misc_feature: MA Experiment ID: 108462 Result: Up-regulated in Transcription
  misc_feature: MA Experiment 108462 PARAMETER Experiment Name: At_Germinating_Seeds_cDNA_P Parameter: Age (day) Value: 2 vs. 0
  misc_feature: MA Experiment 108462 PARAMETER Experiment Name: At_Germinating_Seeds_cDNA_P Parameter: Tissue Value: Germinating Seeds
  misc_feature: MA Experiment ID: 108463 Result: Up-regulated in Transcription
  misc_feature: MA Experiment 108463 PARAMETER Experiment Name: At_Germinating_Seeds_cDNA_P Parameter: Age (day) Value: 3 vs. 0
  misc_feature: MA Experiment 108463 PARAMETER Experiment Name: At_Germinating_Seeds_cDNA_P Parameter: Tissue Value: Germinating Seeds
  misc_feature: MA Experiment ID: 108464 Result: Up-regulated in Transcription
  misc_feature: MA Experiment 108464 PARAMETER Experiment Name: At_Germinating_Seeds_cDNA_P Parameter: Age (day) Value: 4 vs. 0
  misc_feature: MA Experiment 108464 PARAMETER Experiment Name: At_Germinating_Seeds_cDNA_P Parameter: Tissue Value: Germinating Seeds
  misc_feature: MA Experiment ID: 108488 Result: Up-regulated in Transcription
  misc_feature: MA Experiment ID: 108573 Result: Down-regulated in Transcription
  misc_feature: MA Experiment 108573 PARAMETER Experiment Name: At_Drought_cDNA_P Parameter: Timepoint (hr) Value: 6
  misc_feature: MA Experiment 108573 PARAMETER Experiment Name: At_Drought_cDNA_P Parameter: Tissue Value: Aerial
  misc_feature: MA Experiment 108573 PARAMETER Experiment Name: At_Drought_cDNA_P Parameter: Treatment Value: Drought vs. No Drought
  misc_feature: MA Experiment ID: 108585 Result: Down-regulated in Transcription
  misc_feature: MA Experiment 108585 PARAMETER Experiment Name: At_5mM_NaNP_cDNA_P Parameter: Timepoint (hr) Value: 6
  misc_feature: MA Experiment 108585 PARAMETER Experiment Name: At_5mM_NaNP_cDNA_P Parameter: Tissue Value: Aerial
  misc_feature: MA Experiment 108585 PARAMETER Experiment Name: At_5mM_NaNP_cDNA_P Parameter: Treatment Value: null
  misc_feature: MA Experiment ID: 108595 Result: Down-regulated in Transcription
  misc_feature: MA Experiment 108595 PARAMETER Experiment Name: At_Ler-pi_Ovule_cDNA_P Parameter: Plant Line Value: null
  misc_feature: MA Experiment ID: 20000111 Result: Down-regulated in Transcription
  misc_feature: MA Experiment 20000111 PARAMETER Experiment Name: At_42deg_Heat_cDNA_P Parameter: Temperature (deg C) Value: 42 vs. 22
  misc_feature: MA Experiment 20000111 PARAMETER Experiment Name: At_42deg_Heat_cDNA_P Parameter: Timepoint (hr) Value: 6
  misc_feature: MA Experiment 20000111 PARAMETER Experiment Name: At_42deg_Heat_cDNA_P Parameter: Tissue Value: Aerial
  misc_feature: MA Experiment ID: 20000173 Result: Down-regulated in Transcription
  misc_feature: MA Experiment 20000173 PARAMETER Experiment Name: At_42deg_Heat_P Parameter: Age (day) Value: 14
  misc_feature: MA Experiment 20000173 PARAMETER Experiment Name: At_42deg_Heat_P Parameter: Organism Value: A. thaliana
  misc_feature: MA Experiment 20000173 PARAMETER Experiment Name: At_42deg_Heat_P Parameter: Plant Line Value: WS
  misc_feature: MA Experiment 20000173 PARAMETER Experiment Name: At_42deg_Heat_P Parameter: Temperature (deg C) Value: 42 vs. 22
  misc_feature: MA Experiment 20000173 PARAMETER Experiment Name: At_42deg_Heat_P Parameter: Timepoint (hr) Value: 6
  misc_feature: MA Experiment 20000173 PARAMETER Experiment Name: At_42deg_Heat_P Parameter: Tissue Value: Aerial
  misc_feature: MA Experiment ID: 20000180 Result: Up-regulated in Transcription
  misc_feature: MA Experiment 20000180 PARAMETER Experiment Name: At_Germinating_Seeds_P Parameter: Age (hr) Value: 24 vs. 0
  misc_feature: MA Experiment 20000180 PARAMETER Experiment Name: At_Germinating_Seeds_P Parameter: Tissue Value: Germinating Seeds
  misc_feature: MA Experiment ID: 20000184 Result: Up-regulated in Transcription
  misc_feature: MA Experiment 20000184 PARAMETER Experiment Name: At_Shoots__P Parameter: Age (day) Value: 7
  misc_feature: MA Experiment 20000184 PARAMETER Experiment Name: At_Shoots__P Parameter: Tissue Value: Shoots vs. Whole Plant
  misc_feature: MA Experiment ID: 20000185 Result: Down-regulated in Transcription
  misc_feature: MA Experiment 20000185 PARAMETER Experiment Name: At_Roots__P Parameter: Age (day) Value: 7 vs. 21
  misc_feature: MA Experiment 20000185 PARAMETER Experiment Name: At_Roots__P Parameter: Organism Value: A. thaliana
  misc_feature: MA Experiment 20000185 PARAMETER Experiment Name: At_Roots__P Parameter: Tissue Value: Roots vs. Whole Plant
  misc_feature: MA Experiment ID: 20000437 Result: Down-regulated in Transcription
  misc_feature: MA Experiment 20000437 PARAMETER Experiment Name: At_Drought_P Parameter: Age (day) Value: 8
  misc_feature: MA Experiment 20000437 PARAMETER Experiment Name: At_Drought_P Parameter: Organism Value: A. thaliana
  misc_feature: MA Experiment 20000437 PARAMETER Experiment Name: At_Drought_P Parameter: Plant Line Value: WS
  misc_feature: MA Experiment 20000437 PARAMETER Experiment Name: At_Drought_P Parameter: Timepoint (hr) Value: 24
  misc_feature: MA Experiment 20000437 PARAMETER Experiment Name: At_Drought_P Parameter: Tissue Value: Whole Plant
  misc_feature: MA Experiment 20000437 PARAMETER Experiment Name: At_Drought_P Parameter: Treatment Value: Drought vs. No Drought
  misc_feature: MA Experiment ID: 20000438 Result: Up-regulated in Transcription
  misc_feature: MA Experiment 20000438 PARAMETER Experiment Name: At_Shoots__P Parameter: Age (day) Value: 14
  misc_feature: MA Experiment 20000438 PARAMETER Experiment Name: At_Shoots__P Parameter: Tissue Value: Shoots vs. Whole Plant
  misc_feature: MA Experiment ID: 20000439 Result: Down-regulated in Transcription
  misc_feature: MA Experiment 20000439 PARAMETER Experiment Name: At_Roots__P Parameter: Age (day) Value: 14 vs. 21
  misc_feature: MA Experiment 20000439 PARAMETER Experiment Name: At_Roots__P Parameter: Organism Value: A. thaliana
  misc_feature: MA Experiment 20000439 PARAMETER Experiment Name: At_Roots__P Parameter: Tissue Value: Roots vs. Whole Plant
  misc_feature: MA Experiment ID: 20000495 Result: Down-regulated in Transcription
  misc_feature: MA Experiment 20000495 PARAMETER Experiment Name: At_Guard_Cells_P Parameter: Harvest Date Value: 8/2/2002
  misc_feature: MA Experiment 20000495 PARAMETER Experiment Name: At_Guard_Cells_P Parameter: Organism Value: A. thaliana
  misc_feature: MA Experiment 20000495 PARAMETER Experiment Name: At_Guard_Cells_P Parameter: Tissue Value: Guard Cells vs. Leaves
  misc_feature: MA Experiment ID: 20000794 Result: Down-regulated in Transcription
  misc_feature: MA Experiment 20000794 PARAMETER Experiment Name: At_Petals_P Parameter: Age (day) Value: 23-25 days
  misc_feature: MA Experiment 20000794 PARAMETER Experiment Name: At_Petals_P Parameter: Plant Line Value: WS
  misc_feature: MA Experiment 20000794 PARAMETER Experiment Name: At_Petals_P Parameter: Tissue Value: Petals vs. Whole plant
  misc_feature: MA Experiment ID: 20001248 Result: Down-regulated in Transcription
  misc_feature: MA Experiment 20001248 PARAMETER Experiment Name: At_Far-red-induction_P Parameter: Age (day) Value: 7
  misc_feature: MA Experiment 20001248 PARAMETER Experiment Name: At_Far-red-induction_P Parameter: Light Value: Far-red vs. White
  misc_feature: MA Experiment 20001248 PARAMETER Experiment Name: At_Far-red-induction_P Parameter: Organism Value: A. thaliana
  misc_feature: MA Experiment 20001248 PARAMETER Experiment Name: At_Far-red-induction_P Parameter: Plant Line Value: Columbia
  misc_feature: MA Experiment 20001248 PARAMETER Experiment Name: At_Far-red-induction_P Parameter: Timepoint (hr) Value: 4
  misc_feature: MA Experiment 20001248 PARAMETER Experiment Name: At_Far-red-induction_P Parameter: Tissue Value: Whole Plant
  misc_feature: MA Experiment ID: 20001450 Result: Down-regulated in Transcription
  misc_feature: MA Experiment 20001450 PARAMETER Experiment Name: At_Far-red-induction_P Parameter: Age (day) Value: 7
  misc_feature: MA Experiment 20001450 PARAMETER Experiment Name: At_Far-red-induction_P Parameter: Light Value: Far-red vs. White
  misc_feature: MA Experiment 20001450 PARAMETER Experiment Name: At_Far-red-induction_P Parameter: Organism Value: A. thaliana
  misc_feature: MA Experiment 20001450 PARAMETER Experiment Name: At_Far-red-induction_P Parameter: Plant Line Value: Columbia
  misc_feature: MA Experiment 20001450 PARAMETER Experiment Name: At_Far-red-induction_P Parameter: Timepoint (hr) Value: 8
  misc_feature: MA Experiment 20001450 PARAMETER Experiment Name: At_Far-red-induction_P Parameter: Tissue Value: Whole Plant
  misc_feature: MA Experiment ID: 20001451 Result: Down-regulated in Transcription
  misc_feature: MA Experiment 20001451 PARAMETER Experiment Name: At_Far-red-induction_P Parameter: Age (day) Value: 7
  misc_feature: MA Experiment 20001451 PARAMETER Experiment Name: At_Far-red-induction_P Parameter: Light Value: Far-red vs. White
  misc_feature: MA Experiment 20001451 PARAMETER Experiment Name: At_Far-red-induction_P Parameter: Organism Value: A. thaliana
  misc_feature: MA Experiment 20001451 PARAMETER Experiment Name: At_Far-red-induction_P Parameter: Plant Line Value: Columbia
  misc_feature: MA Experiment 20001451 PARAMETER Experiment Name: At_Far-red-induction_P Parameter: Timepoint (hr) Value: 24
  misc_feature: MA Experiment 20001451 PARAMETER Experiment Name: At_Far-red-induction_P Parameter: Tissue Value: Whole Plant
  misc_feature: MA Experiment ID: 20001555 Result: Down-regulated in Transcription
  misc_feature: MA Experiment 20001555 PARAMETER Experiment Name: At_Drought_Soil_Dry_P Parameter: Age (day) Value: 24
  misc_feature: MA Experiment 20001555 PARAMETER Experiment Name: At_Drought_Soil_Dry_P Parameter: Organism Value: A. thaliana
  misc_feature: MA Experiment 20001555 PARAMETER Experiment Name: At_Drought_Soil_Dry_P Parameter: Plant Line Value: WS
  misc_feature: MA Experiment 20001555 PARAMETER Experiment Name: At_Drought_Soil_Dry_P Parameter: Post Timepoint (hr) Value: None
  misc_feature: MA Experiment 20001555 PARAMETER Experiment Name: At_Drought_Soil_Dry_P Parameter: Post-Treatment Value: None
  misc_feature: MA Experiment 20001555 PARAMETER Experiment Name: At_Drought_Soil_Dry_P Parameter: Timepoint (day) Value: 10
  misc_feature: MA Experiment 20001555 PARAMETER Experiment Name: At_Drought_Soil_Dry_P Parameter: Treatment Value: Drought vs. No Drought
  misc_feature: MA Experiment ID: 20001557 Result: Down-regulated in Transcription
  misc_feature: MA Experiment 20001557 PARAMETER Experiment Name: At_Drought_Soil_Dry_P Parameter: Age (day) Value: 27
  misc_feature: MA Experiment 20001557 PARAMETER Experiment Name: At_Drought_Soil_Dry_P Parameter: Organism Value: A. thaliana
  misc_feature: MA Experiment 20001557 PARAMETER Experiment Name: At_Drought_Soil_Dry_P Parameter: Plant Line Value: WS
  misc_feature: MA Experiment 20001557 PARAMETER Experiment Name: At_Drought_Soil_Dry_P Parameter: Post Timepoint (hr) Value: 3
  misc_feature: MA Experiment 20001557 PARAMETER Experiment Name: At_Drought_Soil_Dry_P Parameter: Post-Treatment Value: Re-Water vs. No Drought
  misc_feature: MA Experiment 20001557 PARAMETER Experiment Name: At_Drought_Soil_Dry_P Parameter: Timepoint (day) Value: 13
  misc_feature: MA Experiment 20001557 PARAMETER Experiment Name: At_Drought_Soil_Dry_P Parameter: Treatment Value: Drought vs. No Drought
  misc_feature: MA Experiment ID: 20001559 Result: Down-regulated in Transcription
  misc_feature: MA Experiment 20001559 PARAMETER Experiment Name: At_Drought_Soil_Dry_P Parameter: Age (day) Value: 28
  misc_feature: MA Experiment 20001559 PARAMETER Experiment Name: At_Drought_Soil_Dry_P Parameter: Organism Value: A. thaliana
  misc_feature: MA Experiment 20001559 PARAMETER Experiment Name: At_Drought_Soil_Dry_P Parameter: Plant Line Value: WS
  misc_feature: MA Experiment 20001559 PARAMETER Experiment Name: At_Drought_Soil_Dry_P Parameter: Post Timepoint (hr) Value: 29
  misc_feature: MA Experiment 20001559 PARAMETER Experiment Name: At_Drought_Soil_Dry_P Parameter: Post-Treatment Value: Re-Water vs. No Drought
  misc_feature: MA Experiment 20001559 PARAMETER Experiment Name: At_Drought_Soil_Dry_P Parameter: Timepoint (day) Value: 14
  misc_feature: MA Experiment 20001559 PARAMETER Experiment Name: At_Drought_Soil_Dry_P Parameter: Treatment Value: Drought vs. No Drought
  misc_feature: MA Experiment ID: 20001757 Result: Up-regulated in Transcription
  misc_feature: MA Experiment 20001757 PARAMETER Experiment Name: At_50mM_NH4NO3_L-to-H_P Parameter: Timepoint (hr) Value: 6
  misc_feature: MA Experiment 20001757 PARAMETER Experiment Name: At_50mM_NH4NO3_L-to-H_P Parameter: Tissue Value: Leaf
  misc_feature: MA Experiment 20001757 PARAMETER Experiment Name: At_50mM_NH4NO3_L-to-H_P Parameter: Treatment Value: 50mM NH4NO3 vs 100mM Mannitol
  misc_feature: MA Experiment ID: 20001904 Result: Down-regulated in Transcription
  misc_feature: MA Experiment 20001904 PARAMETER Experiment Name: At_Drought_Reproduction_P Parameter: Age (day) Value: 37
  misc_feature: MA Experiment 20001904 PARAMETER Experiment Name: At_Drought_Reproduction_P Parameter: Organism Value: A. thaliana
  misc_feature: MA Experiment 20001904 PARAMETER Experiment Name: At_Drought_Reproduction_P Parameter: Plant Line Value: WS
  misc_feature: MA Experiment 20001904 PARAMETER Experiment Name: At_Drought_Reproduction_P Parameter: Timepoint (day) Value: 7
  misc_feature: MA Experiment 20001904 PARAMETER Experiment Name: At_Drought_Reproduction_P Parameter: Tissue Value: Rosettes
  misc_feature: MA Experiment 20001904 PARAMETER Experiment Name: At_Drought_Reproduction_P Parameter: Treatment Value: Drought vs. No Drought
  misc_feature: MA Experiment ID: 20001905 Result: Down-regulated in Transcription
  misc_feature: MA Experiment 20001905 PARAMETER Experiment Name: At_Drought_Reproduction_P Parameter: Age (day) Value: 40
  misc_feature: MA Experiment 20001905 PARAMETER Experiment Name: At_Drought_Reproduction_P Parameter: Organism Value: A. thaliana
  misc_feature: MA Experiment 20001905 PARAMETER Experiment Name: At_Drought_Reproduction_P Parameter: Plant Line Value: WS
  misc_feature: MA Experiment 20001905 PARAMETER Experiment Name: At_Drought_Reproduction_P Parameter: Timepoint (day) Value: 10
  misc_feature: MA Experiment 20001905 PARAMETER Experiment Name: At_Drought_Reproduction_P Parameter: Tissue Value: Rosettes
  misc_feature: MA Experiment 20001905 PARAMETER Experiment Name: At_Drought_Reproduction_P Parameter: Treatment Value: Drought vs. No Drought
  misc_feature: MA Experiment ID: 20001906 Result: Down-regulated in Transcription
  misc_feature: MA Experiment 20001906 PARAMETER Experiment Name: At_Drought_Reproduction_P Parameter: Age (day) Value: 35
  misc_feature: MA Experiment 20001906 PARAMETER Experiment Name: At_Drought_Reproduction_P Parameter: Organism Value: A. thaliana
  misc_feature: MA Experiment 20001906 PARAMETER Experiment Name: At_Drought_Reproduction_P Parameter: Plant Line Value: WS
  misc_feature: MA Experiment 20001906 PARAMETER Experiment Name: At_Drought_Reproduction_P Parameter: Timepoint (day) Value: 5
  misc_feature: MA Experiment 20001906 PARAMETER Experiment Name: At_Drought_Reproduction_P Parameter: Tissue Value: Siliques
  misc_feature: MA Experiment 20001906 PARAMETER Experiment Name: At_Drought_Reproduction_P Parameter: Treatment Value: Drought vs. No Drought
  misc_feature: MA Experiment ID: 20001908 Result: Down-regulated in Transcription
  misc_feature: MA Experiment 20001908 PARAMETER Experiment Name: At_Drought_Reproduction_P Parameter: Age (day) Value: 40
  misc_feature: MA Experiment 20001908 PARAMETER Experiment Name: At_Drought_Reproduction_P Parameter: Organism Value: A. thaliana
  misc_feature: MA Experiment 20001908 PARAMETER Experiment Name: At_Drought_Reproduction_P Parameter: Plant Line Value: WS
  misc_feature: MA Experiment 20001908 PARAMETER Experiment Name: At_Drought_Reproduction_P Parameter: Timepoint (day) Value: 10
  misc_feature: MA Experiment 20001908 PARAMETER Experiment Name: At_Drought_Reproduction_P Parameter: Tissue Value: Siliques
  misc_feature: MA Experiment 20001908 PARAMETER Experiment Name: At_Drought_Reproduction_P Parameter: Treatment Value: Drought vs. No Drought
  misc_feature: MA Experiment ID: 20001911 Result: Down-regulated in Transcription
  misc_feature: MA Experiment 20001911 PARAMETER Experiment Name: At_Drought_Reproduction_P Parameter: Age (day) Value: 40
  misc_feature: MA Experiment 20001911 PARAMETER Experiment Name: At_Drought_Reproduction_P Parameter: Organism Value: A. thaliana
  misc_feature: MA Experiment 20001911 PARAMETER Experiment Name: At_Drought_Reproduction_P Parameter: Plant Line Value: WS
  misc_feature: MA Experiment 20001911 PARAMETER Experiment Name: At_Drought_Reproduction_P Parameter: Timepoint (day) Value: 10
  misc_feature: MA Experiment 20001911 PARAMETER Experiment Name: At_Drought_Reproduction_P Parameter: Tissue Value: Flowers
  misc_feature: MA Experiment 20001911 PARAMETER Experiment Name: At_Drought_Reproduction_P Parameter: Treatment Value: Drought vs. No Drought
atcgtcttcgagaaaccacaaatctctctttctctcaaactctctcaacaacaacaatggcgtctcttcaacaaactctattctctcttcaatccaaactcccaccatcctccttccaaatcgccagatctctcccactccgaaaaaccttcccaatccgaatcaacaacggtggaaacgccgccggagcaagaatgtcagccaccgcagcatcaagctacgcgatggcattagcagacgtcgcgaaaagaaacgacacaatggaattaacagtcacagacatcgagaagctcgaacaagtcttctcagatccacaagtactaaacttcttcgcgaatccaacaatcaccgtcgagaagaaacgtcaagtcatcgacgacatagtgaaatcgtcgtctcttcaatctcacacatctaacttcctcaacgtcctcgtcgacgcgaatcggatcaatatcgtgacggagatcgttaaggagtttgagttggtttacaataagctaacggatacacaattggcggaggttaggtcggtggtgaaattggaagcgccgcaattagctcagattgcgaaacaggttcagaagttaaccggagctaagaatgttcgggttaagacggttattgatgcgagtcttgtggctggttttacgattcggtatggtgaatccggttcgaagcttattgatatgagtgtgaagaaacagcttgaagatattgcttctcagcttgaacttggtgagattcaattagctacttgagatttgggaaaaattgtataagagaaaaatttgagaatcttttttttttgtgcaagtttaattttttttctcctcatcttctttctctattaatcaatcatataatatacagtactgatgatataataatgattctgagtttattatctttgtaattgttaaatttagtgaattcgaaaacgaattcgaatagtatgtttgcg

SEQ ID NO: 101478 - protein, 252 aa, Arabidopsis thaliana
  peptide (1)..(252): Ceres Seq. ID no. 13607988
  misc_feature (69)..(243): Pfam Name: ATP synthase delta (OSCP) subunit Pfam Description: ATP synthase delta (OSCP) subunit
  misc_feature (3)..(252): Homolog of NCBI NO: 18491181 NR Description: putative H+-transporting ATP synthase
  misc_feature (19)..(252): Homolog of NCBI NO: 15233985 NR Description: H+-transporting ATP synthase-related protein
  misc_feature (19)..(251): Homolog of NCBI NO: 416681 NR Description: ATP synthase delta chain, chloroplast precursor
  misc_feature (2)..(251): Homolog of NCBI NO: 399082 NR Description: ATP synthase delta chain, chloroplast precursor
  misc_feature (3)..(251): Homolog of NCBI NO: 114584 NR Description: ATP synthase delta chain, chloroplast precursor
  misc_feature (3)..(251): Homolog of NCBI NO: 170098 NR Description: ATP synthase delta subunit precursor
  misc_feature (119)..(251): Homolog of NCBI NO: 1480014 NR Description: putative delta subunit of ATP synthase [Brassica
  misc_feature (69)..(250): Homolog of NCBI NO: 1084479 NR Description: H+-transporting two-sector ATPase (EC 3.6.3.14)
  misc_feature (36)..(250): Homolog of NCBI NO: 1168587 NR Description: ATP synthase delta chain, chloroplast precursor
  misc_feature (63)..(243): Homolog of NCBI NO: 5902612 NR Description: ATP synthase-delta chain [Volvox carteri f.
RLRETTNLSFSQTLSTTTMASLQQTLFSLQSKLPPSSFQIARSLPLRKTFPIRINNGGNAAGARMSATAASSYAMALADVAKRNDTMELTVTDIEKLEQVFSDPQVLNFFANPTITVEKKRQVIDDIVKSSSLQSHTSNFLNVLVDANRINIVTEIVKEFELVYNKLTDTQLAEVRSVVKLEAPQLAQIAKQVQKLTGAKNVRVKTVIDASLVAGFTIRYGESGSKLIDMSVKKQLEDIASQLELGEIQLAT

SEQ ID NO: 101479 - protein, 234 aa, Arabidopsis thaliana; identical to SEQ ID NO: 24960
  peptide (1)..(234): Ceres Seq. ID no. 13607989
  misc_feature (51)..(225): Pfam Name: ATP synthase delta (OSCP) subunit Pfam Description: ATP synthase delta (OSCP) subunit
  misc_feature (1)..(234): Homolog of NCBI NO: 18491181 NR Description: putative H+-transporting ATP synthase
  misc_feature (1)..(234): Homolog of NCBI NO: 15233985 NR Description: H+-transporting ATP synthase-related protein
  misc_feature (1)..(233): Homolog of NCBI NO: 416681 NR Description: ATP synthase delta chain, chloroplast precursor
  misc_feature (1)..(233): Homolog of NCBI NO: 399082 NR Description: ATP synthase delta chain, chloroplast precursor
  misc_feature (1)..(233): Homolog of NCBI NO: 114584 NR Description: ATP synthase delta chain, chloroplast precursor
  misc_feature (1)..(233): Homolog of NCBI NO: 170098 NR Description: ATP synthase delta subunit precursor
  misc_feature (101)..(233): Homolog of NCBI NO: 1480014 NR Description: putative delta subunit of ATP synthase [Brassica
  misc_feature (51)..(232): Homolog of NCBI NO: 1084479 NR Description: H+-transporting two-sector ATPase (EC 3.6.3.14)
  misc_feature (18)..(232): Homolog of NCBI NO: 1168587 NR Description: ATP synthase delta chain, chloroplast precursor
  misc_feature (45)..(225): Homolog of NCBI NO: 5902612 NR Description: ATP synthase-delta chain [Volvox carteri f.

SEQ ID NO: 101480 - protein, 188 aa, Arabidopsis thaliana; identical to SEQ ID NO: 24961
  peptide (1)..(188): Ceres Seq. ID no. 13607990
  misc_feature (5)..(179): Pfam Name: ATP synthase delta (OSCP) subunit Pfam Description: ATP synthase delta (OSCP) subunit
  misc_feature (1)..(188): Homolog of NCBI NO: 18491181 NR Description: putative H+-transporting ATP synthase
  misc_feature (1)..(188): Homolog of NCBI NO: 15233985 NR Description: H+-transporting ATP synthase-related protein
  misc_feature (1)..(187): Homolog of NCBI NO: 416681 NR Description: ATP synthase delta chain, chloroplast precursor
  misc_feature (1)..(187): Homolog of NCBI NO: 399082 NR Description: ATP synthase delta chain, chloroplast precursor
  misc_feature (1)..(187): Homolog of NCBI NO: 114584 NR Description: ATP synthase delta chain, chloroplast precursor
  misc_feature (1)..(187): Homolog of NCBI NO: 170098 NR Description: ATP synthase delta subunit precursor
  misc_feature (55)..(187): Homolog of NCBI NO: 1480014 NR Description: putative delta subunit of ATP synthase [Brassica
  misc_feature (5)..(186): Homolog of NCBI NO: 1084479 NR Description: H+-transporting two-sector ATPase (EC 3.6.3.14)
  misc_feature (1)..(186): Homolog of NCBI NO: 1168587 NR Description: ATP synthase delta chain, chloroplast precursor
  misc_feature (1)..(179): Homolog of NCBI NO: 5902612 NR Description: ATP synthase-delta chain [Volvox carteri f.

SEQ ID NO: 101481 - DNA, 1407 bp, Arabidopsis thaliana
  misc_feature (1)..(1407): Ceres Seq. ID no. 13607991
  misc_feature: MA Experiment ID: 108595 Result: Down-regulated in Transcription
  misc_feature: MA Experiment 108595 PARAMETER Experiment Name: At_Ler-pi_Ovule_cDNA_P Parameter: Plant Line Value: null
atttcattcgttctttatcaacaacactctctctcttctctatcaacactttctttcatctctcgccggaaaaacccataaccacaacaatggccaccgaaacccaaatccgaatcggagtaatgggttgcgccgatatcgctcgaaaagtctctcgagcaatccacctcgctcccaacgccacaatctccggcgtagcaagccggtctttagaaaaagccaaagcctttgccaccgccaataactacccagaatcaaccaaaatccacggctcttacgaatctcttctcgaagatccagagatcgatgcgctctatgttcctctccccactagtctccacgttgagtgggctattaaagcagctgagaaagggaaacatatccttttggagaagcctgttgctatgaacgtaactgagtttgataagattgttgatgcttgtgaagctaatggtgttcagattatggatggtactatgtgggttcataatcctagaactgctttgcttaaagagtttctttctgattctgaacgttttggtcagcttaaaactgtacagagttgtttctcatttgctggagatgaagattttcttaaaaacgatatccgtgtgaaacctggtcttgacgggcttggtgcgctaggagatgcggggtggtacgcgatcagagcaactcttttagctaataactttgagcttccgaaaactgtgactgctttccccggtgctgtgttgaatgaagcaggagtgatactttcctgtggagcatctttgagttgggaagatggacgaactgcaactatatattgttcattcttggctaacttaacaatggagataactgccattggaacgaaaggcacactccgtgtacacgacttcattatcccgtataaggagactgaggcgtcgtttaccacgagcactaaagcttggttcaatgaccttgtgactgcgtgggttagtcccccgagtgagcatacggttaagacagagcttccacaagaggcatgtatggtgagagagtttgctcgattggttggagaaatcaagaacaatggtgcaaagcctgatgggtactggcctagtattagccgaaagacgcagctagtggttgatgctgttaaagagtctgttgataaaaactatcaacagattagtctctctggtcgttgaaggaaaggactcagactataaatgttgtcgtgtgttctctcctctctcgctctctatgttcaaacttcgatcaaccgtttaagtgtttgttaccacttaccaatatgttctgtcttctgctgtgtccgcctgtatgtatgttaattgttttagactccaattactagccttcaattactaagtaagtcaatactaaaagttacagtttataaaaatcgtatgttttggt

SEQ ID NO: 101482 - protein, 391 aa, Arabidopsis thaliana
  peptide (1)..(391): Ceres Seq. ID no. 13607992
  misc_feature (36)..(158): Pfam Name: Oxidoreductase family, NAD-binding Rossmann fold Pfam Description: Oxidoreductase family, NAD-binding Rossmann fold
  misc_feature (30)..(391): Homolog of NCBI NO: 15233990 NR Description: AX110P -related protein [Arabidopsis thaliana]
  misc_feature (54)..(391): Homolog of NCBI NO: 21954073 NR Description: putative AX110P protein [Arabidopsis thaliana]
  misc_feature (30)..(391): Homolog of NCBI NO: 18399170 NR Description: expressed protein [Arabidopsis thaliana] F23M19.12/F23M19.12 [Arabidopsis thaliana]
  misc_feature (30)..(391): Homolog of NCBI NO: 25518452 NR Description: hypothetical protein F23M19.12 [imported] - thaliana >gi|5091625|gb|AAD39613.1|AC007454_12 Similar to
  misc_feature (36)..(379): Homolog of NCBI NO: 7488933 NR Description: protein AX110P - carrot
  misc_feature (21)..(344): Homolog of NCBI NO: 37534168 NR Description: putative oxidoreductase [Oryza sativa (japonica group)] >gi|21671919|gb|AAM74281.1| Putative oxidoreductase
  misc_feature (32)..(388): Homolog of NCBI NO: 15218937 NR Description: oxidoreductase -related [Arabidopsis thaliana]
  misc_feature (32)..(378): Homolog of NCBI NO: 32474689 NR Description: putative oxidoreductase [Pirellula sp.]
  misc_feature (20)..(375): Homolog of NCBI NO: 17549134 NR Description: CONSERVED HYPOTHETICAL PROTEIN [Ralstonia >gi|17431385|emb|CAD18064.1| CONSERVED HYPOTHETICAL PROTEIN
  misc_feature (36)..(298): Homolog of NCBI NO: 15616405 NR Description: oxidoreductase [Bacillus halodurans]
FIRSLSTTLSLFSINTFFHLSPEKPITTTMATETQIRIGVMGCADIARKVSRAIHLAPNATISGVASRSLEKAKAFATANNYPESTKIHGSYESLLEDPEIDALYVPLPTSLHVEWAIKAAEKGKHILLEKPVAMNVTEFDKIVDACEANGVQIMDGTMWVHNPRTALLKEFLSDSERFGQLKTVQSCFSFAGDEDFLKNDIRVKPGLDGLGALGDAGWYAIRATLLANNFELPKTVTAFPGAVLNEAGVILSCGASLSWEDGRTATIYCSFLANLTMEITAIGTKGTLRVHDFIIPYKETEASFTTSTKAWFNDLVTAWVSPPSEHTVKTELPQEACMVREFARLVGEIKNNGAKPDGYWPSISRKTQLVVDAVKESVDKNYQQISLSGR

SEQ ID NO: 101483 - protein, 362 aa, Arabidopsis thaliana; identical to SEQ ID NO: 30928
  peptide (1)..(362): Ceres Seq. ID no. 13607993
  misc_feature (7)..(129): Pfam Name: Oxidoreductase family, NAD-binding Rossmann fold Pfam Description: Oxidoreductase family, NAD-binding Rossmann fold
  misc_feature (1)..(362): Homolog of NCBI NO: 15233990 NR Description: AX110P -related protein [Arabidopsis thaliana]
  misc_feature (25)..(362): Homolog of NCBI NO: 21954073 NR Description: putative AX110P protein [Arabidopsis thaliana]
  misc_feature (1)..(362): Homolog of NCBI NO: 18399170 NR Description: expressed protein [Arabidopsis thaliana] F23M19.12/F23M19.12 [Arabidopsis thaliana]
  misc_feature (1)..(362): Homolog of NCBI NO: 25518452 NR Description: hypothetical protein F23M19.12 [imported] - thaliana >gi|5091625|gb|AAD39613.1|AC007454_12 Similar to
  misc_feature (7)..(350): Homolog of NCBI NO: 7488933 NR Description: protein AX110P - carrot
  misc_feature (1)..(315): Homolog of NCBI NO: 37534168 NR Description: putative oxidoreductase [Oryza sativa (japonica group)] >gi|21671919|gb|AAM74281.1| Putative oxidoreductase
  misc_feature (3)..(359): Homolog of NCBI NO: 15218937 NR Description: oxidoreductase -related [Arabidopsis thaliana]
  misc_feature (3)..(349): Homolog of NCBI NO: 32474689 NR Description: putative oxidoreductase [Pirellula sp.]
  misc_feature (1)..(346): Homolog of NCBI NO: 17549134 NR Description: CONSERVED HYPOTHETICAL PROTEIN [Ralstonia >gi|17431385|emb|CAD18064.1| CONSERVED HYPOTHETICAL PROTEIN
  misc_feature (7)..(269): Homolog of NCBI NO: 15616405 NR Description: oxidoreductase [Bacillus halodurans]

SEQ ID NO: 101484 - protein, 351 aa, Arabidopsis thaliana; identical to SEQ ID NO: 30929
  peptide (1)..(351): Ceres Seq. ID no. 13607994
  misc_feature (1)..(118): Pfam Name: Oxidoreductase family, NAD-binding Rossmann fold Pfam Description: Oxidoreductase family, NAD-binding Rossmann fold
  misc_feature (1)..(351): Homolog of NCBI NO: 15233990 NR Description: AX110P -related protein [Arabidopsis thaliana]
  misc_feature (14)..(351): Homolog of NCBI NO: 21954073 NR Description: putative AX110P protein [Arabidopsis thaliana]
  misc_feature (1)..(351): Homolog of NCBI NO: 18399170 NR Description: expressed protein [Arabidopsis thaliana] F23M19.12/F23M19.12 [Arabidopsis thaliana]
  misc_feature (1)..(351): Homolog of NCBI NO: 25518452 NR Description: hypothetical protein F23M19.12 [imported] - thaliana >gi|5091625|gb|AAD39613.1|AC007454_12 Similar to
  misc_feature (1)..(339): Homolog of NCBI NO: 7488933 NR Description: protein AX110P - carrot
  misc_feature (1)..(304): Homolog of NCBI NO: 37534168 NR Description: putative oxidoreductase [Oryza sativa (japonica group)] >gi|21671919|gb|AAM74281.1| Putative oxidoreductase
  misc_feature (1)..(348): Homolog of NCBI NO: 15218937 NR Description: oxidoreductase -related [Arabidopsis thaliana]
  misc_feature (1)..(338): Homolog of NCBI NO: 32474689 NR Description: putative oxidoreductase [Pirellula sp.]
  misc_feature (1)..(335): Homolog of NCBI NO: 17549134 NR Description: CONSERVED HYPOTHETICAL PROTEIN [Ralstonia >gi|17431385|emb|CAD18064.1| CONSERVED HYPOTHETICAL PROTEIN
  misc_feature (1)..(258): Homolog of NCBI NO: 15616405 NR Description: oxidoreductase [Bacillus halodurans]

SEQ ID NO: 101485 - DNA, 647 bp, Arabidopsis thaliana
  misc_feature (1)..(647): Ceres Seq. ID no. 13608003
  misc_feature: MA Experiment ID: 108434 Result: Down-regulated in Transcription
  misc_feature: MA Experiment 108434 PARAMETER Experiment Name: At_Root_Tips_cDNA_P Parameter: Tissue Value: Root Tips
  misc_feature: MA Experiment ID: 108488 Result: Down-regulated in Transcription
  misc_feature: MA Experiment ID: 108574 Result: Up-regulated in Transcription
  misc_feature: MA Experiment 108574 PARAMETER Experiment Name: At_Wounding__cDNA_P Parameter: Timepoint (hr) Value: 1
  misc_feature: MA Experiment 108574 PARAMETER Experiment Name: At_Wounding__cDNA_P Parameter: Tissue Value: Aerial
  misc_feature: MA Experiment 108574 PARAMETER Experiment Name: At_Wounding__cDNA_P Parameter: Treatment Value: Wounding vs. No Wounding
  misc_feature: MA Experiment ID: 108576 Result: Up-regulated in Transcription
  misc_feature: MA Experiment 108576 PARAMETER Experiment Name: At_42deg_Heat_cDNA_P Parameter: Temperature (deg C) Value: 42 vs. 22
  misc_feature: MA Experiment 108576 PARAMETER Experiment Name: At_42deg_Heat_cDNA_P Parameter: Timepoint (hr) Value: 1
  misc_feature: MA Experiment 108576 PARAMETER Experiment Name: At_42deg_Heat_cDNA_P Parameter: Tissue Value: Aerial
  misc_feature: MA Experiment ID: 108577 Result: Up-regulated in Transcription
  misc_feature: MA Experiment 108577 PARAMETER Experiment Name: At_42deg_Heat_cDNA_P Parameter: Temperature (deg C) Value: 42 vs. 22
  misc_feature: MA Experiment 108577 PARAMETER Experiment Name: At_42deg_Heat_cDNA_P Parameter: Timepoint (hr) Value: 6
  misc_feature: MA Experiment 108577 PARAMETER Experiment Name: At_42deg_Heat_cDNA_P Parameter: Tissue Value: Aerial
  misc_feature: MA Experiment ID: 108579 Result: Up-regulated in Transcription
  misc_feature: MA Experiment 108579 PARAMETER Experiment Name: At_4deg_Cold_cDNA_P Parameter: Temperature (deg C) Value: 4 vs. 22
  misc_feature: MA Experiment 108579 PARAMETER Experiment Name: At_4deg_Cold_cDNA_P Parameter: Timepoint (hr) Value: 6
  misc_feature: MA Experiment 108579 PARAMETER Experiment Name: At_4deg_Cold_cDNA_P Parameter: Tissue Value: Aerial
  misc_feature: MA Experiment ID: 20000072 Result: Up-regulated in Transcription
  misc_feature: MA Experiment 20000072 PARAMETER Experiment Name: At_100uM_ABA_Mutants_cDNA_P Parameter: Plant Line Value: CS8105
  misc_feature: MA Experiment 20000072 PARAMETER Experiment Name: At_100uM_ABA_Mutants_cDNA_P Parameter: Timepoint (hr) Value: 6
  misc_feature: MA Experiment 20000072 PARAMETER Experiment Name: At_100uM_ABA_Mutants_cDNA_P Parameter: Tissue Value: Aerial
  misc_feature: MA Experiment 20000072 PARAMETER Experiment Name: At_100uM_ABA_Mutants_cDNA_P Parameter: Treatment Value: 100uM ABA vs. No Treatment
  misc_feature: MA Experiment ID: 20000087 Result: Up-regulated in Transcription
  misc_feature: MA Experiment 20000087 PARAMETER Experiment Name: At_100uM_ABA_Mutants_cDNA_P Parameter: Plant Line Value: WS
  misc_feature: MA Experiment 20000087 PARAMETER Experiment Name: At_100uM_ABA_Mutants_cDNA_P Parameter: Timepoint (hr) Value: 6
  misc_feature: MA Experiment 20000087 PARAMETER Experiment Name: At_100uM_ABA_Mutants_cDNA_P Parameter: Tissue Value: Aerial
  misc_feature: MA Experiment 20000087 PARAMETER Experiment Name: At_100uM_ABA_Mutants_cDNA_P Parameter: Treatment Value: 100uM ABA vs. No Treatment
  misc_feature: MA Experiment ID: 20000093 Result: Up-regulated in Transcription
  misc_feature: MA Experiment 20000093 PARAMETER Experiment Name: At_42deg_Heat_cDNA_P Parameter: Temperature (deg C) Value: 42 vs. 22
  misc_feature: MA Experiment 20000093 PARAMETER Experiment Name: At_42deg_Heat_cDNA_P Parameter: Timepoint (hr) Value: 0.5
  misc_feature: MA Experiment 20000093 PARAMETER Experiment Name: At_42deg_Heat_cDNA_P Parameter: Tissue Value: Aerial
  misc_feature: MA Experiment ID: 20000111 Result: Up-regulated in Transcription
  misc_feature: MA Experiment 20000111 PARAMETER Experiment Name: At_42deg_Heat_cDNA_P Parameter: Temperature (deg C) Value: 42 vs. 22
  misc_feature: MA Experiment 20000111 PARAMETER Experiment Name: At_42deg_Heat_cDNA_P Parameter: Timepoint (hr) Value: 6
  misc_feature: MA Experiment 20000111 PARAMETER Experiment Name: At_42deg_Heat_cDNA_P Parameter: Tissue Value: Aerial
  misc_feature: MA Experiment ID: 20000112 Result: Up-regulated in Transcription
  misc_feature: MA Experiment 20000112 PARAMETER Experiment Name: At_42deg_Heat_cDNA_P Parameter: Temperature (deg C) Value: 42 vs. 22
  misc_feature: MA Experiment 20000112 PARAMETER Experiment Name: At_42deg_Heat_cDNA_P Parameter: Timepoint (hr) Value: 2
  misc_feature: MA Experiment 20000112 PARAMETER Experiment Name: At_42deg_Heat_cDNA_P Parameter: Tissue Value: Aerial
  misc_feature: MA Experiment ID: 20000113 Result: Up-regulated in Transcription
  misc_feature: MA Experiment 20000113 PARAMETER Experiment Name: At_42deg_Heat_cDNA_P Parameter: Temperature (deg C) Value: 42 vs. 22
  misc_feature: MA Experiment 20000113 PARAMETER Experiment Name: At_42deg_Heat_cDNA_P Parameter: Timepoint (hr) Value: 8
  misc_feature: MA Experiment 20000113 PARAMETER Experiment Name: At_42deg_Heat_cDNA_P Parameter: Tissue Value: Aerial
  misc_feature: MA Experiment ID: 20000144 Result: Up-regulated in Transcription
  misc_feature: MA Experiment 20000144 PARAMETER Experiment Name: At_42deg_Heat_cDNA_P Parameter: Temperature (deg C) Value: 42 vs. 22
  misc_feature: MA Experiment 20000144 PARAMETER Experiment Name: At_42deg_Heat_cDNA_P Parameter: Timepoint (hr) Value: 1
  misc_feature: MA Experiment 20000144 PARAMETER Experiment Name: At_42deg_Heat_cDNA_P Parameter: Tissue Value: Aerial
  misc_feature: MA Experiment ID: 20000171 Result: Up-regulated in Transcription
  misc_feature: MA Experiment 20000171 PARAMETER Experiment Name: At_42deg_Heat_P Parameter: Age (day) Value: 14
  misc_feature: MA Experiment 20000171 PARAMETER Experiment Name: At_42deg_Heat_P Parameter: Organism Value: A. thaliana
  misc_feature: MA Experiment 20000171 PARAMETER Experiment Name: At_42deg_Heat_P Parameter: Plant Line Value: WS
  misc_feature: MA Experiment 20000171 PARAMETER Experiment Name: At_42deg_Heat_P Parameter: Temperature (deg C) Value: 42 vs. 22
  misc_feature: MA Experiment 20000171 PARAMETER Experiment Name: At_42deg_Heat_P Parameter: Timepoint (hr) Value: 1
  misc_feature: MA Experiment 20000171 PARAMETER Experiment Name: At_42deg_Heat_P Parameter: Tissue Value: Aerial
  misc_feature: MA Experiment ID: 20000173 Result: Up-regulated in Transcription
  misc_feature: MA Experiment 20000173 PARAMETER Experiment Name: At_42deg_Heat_P Parameter: Age (day) Value: 14
  misc_feature: MA Experiment 20000173 PARAMETER Experiment Name: At_42deg_Heat_P Parameter: Organism Value: A. thaliana
  misc_feature: MA Experiment 20000173 PARAMETER Experiment Name: At_42deg_Heat_P Parameter: Plant Line Value: WS
  misc_feature: MA Experiment 20000173 PARAMETER Experiment Name: At_42deg_Heat_P Parameter: Temperature (deg C) Value: 42 vs. 22
  misc_feature: MA Experiment 20000173 PARAMETER Experiment Name: At_42deg_Heat_P Parameter: Timepoint (hr) Value: 6
  misc_feature: MA Experiment 20000173 PARAMETER Experiment Name: At_42deg_Heat_P Parameter: Tissue Value: Aerial
  misc_feature: MA Experiment ID: 20000182 Result: Up-regulated in Transcription
  misc_feature: MA Experiment 20000182 PARAMETER Experiment Name: At_2mM_SA_P Parameter: Age (day) Value: 14
  misc_feature: MA Experiment 20000182 PARAMETER Experiment Name: At_2mM_SA_P Parameter: Organism Value: A. thaliana
  misc_feature: MA Experiment 20000182 PARAMETER Experiment Name: At_2mM_SA_P Parameter: Plant Line Value: WS
  misc_feature: MA Experiment 20000182 PARAMETER Experiment Name: At_2mM_SA_P Parameter: Timepoint (hr) Value: 6
  misc_feature: MA Experiment 20000182 PARAMETER Experiment Name: At_2mM_SA_P Parameter: Tissue Value: Aerial
  misc_feature: MA Experiment 20000182 PARAMETER Experiment Name: At_2mM_SA_P Parameter: Treatment Value: 2mM SA vs. No Treatment
  misc_feature: MA Experiment ID: 20000185 Result: Up-regulated in Transcription
  misc_feature: MA Experiment 20000185 PARAMETER Experiment Name: At_Roots__P Parameter: Age (day) Value: 7 vs. 21
  misc_feature: MA Experiment 20000185 PARAMETER Experiment Name: At_Roots__P Parameter: Organism Value: A. thaliana
  misc_feature: MA Experiment 20000185 PARAMETER Experiment Name: At_Roots__P Parameter: Tissue Value: Roots vs. Whole Plant
  misc_feature: MA Experiment ID: 20000264 Result: Up-regulated in Transcription
  misc_feature: MA Experiment 20000264 PARAMETER Experiment Name: At_Open_Flower_P Parameter: Age (day) Value: 21
  misc_feature: MA Experiment 20000264 PARAMETER Experiment Name: At_Open_Flower_P Parameter: Plant Line Value: WS
  misc_feature: MA Experiment 20000264 PARAMETER Experiment Name: At_Open_Flower_P Parameter: Tissue Value: Open Flower vs. Whole Plant
  misc_feature: MA Experiment ID: 20000439 Result: Up-regulated in Transcription
  misc_feature: MA Experiment 20000439 PARAMETER Experiment Name: At_Roots__P Parameter: Age (day) Value: 14 vs. 21
  misc_feature: MA Experiment 20000439 PARAMETER Experiment Name: At_Roots__P Parameter: Organism Value: A. thaliana
  misc_feature: MA Experiment 20000439 PARAMETER Experiment Name: At_Roots__P Parameter: Tissue Value: Roots vs. Whole Plant
  misc_feature: MA Experiment ID: 20000443 Result: Up-regulated in Transcription
  misc_feature: MA Experiment 20000443 PARAMETER Experiment Name: At_1uM_BR-BRZ__P Parameter: Tissue Value: Shoot Apices
  misc_feature: MA Experiment 20000443 PARAMETER Experiment Name: At_1uM_BR-BRZ__P Parameter: Treatment Value: 1uM BRZ vs. No Treatment
  misc_feature: MA Experiment ID: 20000527 Result: Down-regulated in Transcription
  misc_feature: MA Experiment 20000527 PARAMETER Experiment Name: At_10percent_PEG_P Parameter: Age (day) Value: 20
  misc_feature: MA Experiment 20000527 PARAMETER Experiment Name: At_10percent_PEG_P Parameter: Organism Value: A. thaliana
  misc_feature: MA Experiment 20000527 PARAMETER Experiment Name: At_10percent_PEG_P Parameter: Plant Line Value: WS
  misc_feature: MA Experiment 20000527 PARAMETER Experiment Name: At_10percent_PEG_P Parameter: Timepoint (day) Value: 20
  misc_feature: MA Experiment 20000527 PARAMETER Experiment Name: At_10percent_PEG_P Parameter: Tissue Value: Whole Plant
  misc_feature: MA Experiment 20000527 PARAMETER Experiment Name: At_10percent_PEG_P Parameter: Treatment Value: 10percent PEG vs. No Treatment
  misc_feature: MA Experiment ID: 20000709 Result: Up-regulated in Transcription
  misc_feature: MA Experiment 20000709 PARAMETER Experiment Name: At_15mM_NH4NO3_L-to-H_P Parameter: Age (hr) Value: 14
  misc_feature: MA Experiment 20000709 PARAMETER Experiment Name: At_15mM_NH4NO3_L-to-H_P Parameter: Organism Value: A. thaliana
  misc_feature: MA Experiment 20000709 PARAMETER Experiment Name: At_15mM_NH4NO3_L-to-H_P Parameter: Plant Line Value: WS
  misc_feature: MA Experiment 20000709 PARAMETER Experiment Name: At_15mM_NH4NO3_L-to-H_P Parameter: Timepoint (hr) Value: 4
  misc_feature: MA Experiment 20000709 PARAMETER Experiment Name: At_15mM_NH4NO3_L-to-H_P Parameter: Tissue Value: Aerial
  misc_feature: MA Experiment 20000709 PARAMETER Experiment Name: At_15mM_NH4NO3_L-to-H_P Parameter: Treatment Value: 15mM NH4NO3 vs. 30mM Mannitol
  misc_feature: MA Experiment ID: 20000794 Result: Up-regulated in Transcription
  misc_feature: MA Experiment 20000794 PARAMETER Experiment Name: At_Petals_P Parameter: Age (day) Value: 23-25 days
  misc_feature: MA Experiment 20000794 PARAMETER Experiment Name: At_Petals_P Parameter: Plant Line Value: WS
  misc_feature: MA Experiment 20000794 PARAMETER Experiment Name: At_Petals_P Parameter: Tissue Value: Petals vs. Whole plant
  misc_feature: MA Experiment ID: 20001248 Result: Down-regulated in Transcription
  misc_feature: MA Experiment 20001248 PARAMETER Experiment Name: At_Far-red-induction_P Parameter: Age (day) Value: 7
  misc_feature: MA Experiment 20001248 PARAMETER Experiment Name: At_Far-red-induction_P Parameter: Light Value: Far-red vs. White
  misc_feature: MA Experiment 20001248 PARAMETER Experiment Name: At_Far-red-induction_P Parameter: Organism Value: A. thaliana
  misc_feature: MA Experiment 20001248 PARAMETER Experiment Name: At_Far-red-induction_P Parameter: Plant Line Value: Columbia
  misc_feature: MA Experiment 20001248 PARAMETER Experiment Name: At_Far-red-induction_P Parameter: Timepoint (hr) Value: 4
  misc_feature: MA Experiment 20001248 PARAMETER Experiment Name: At_Far-red-induction_P Parameter: Tissue Value: Whole Plant
  misc_feature: MA Experiment ID: 20001560 Result: Up-regulated in Transcription
  misc_feature: MA Experiment 20001560 PARAMETER Experiment Name: At_Drought_Soil_Dry_P Parameter: Age (day) Value: 28
  misc_feature: MA Experiment 20001560 PARAMETER Experiment Name: At_Drought_Soil_Dry_P Parameter: Organism Value: A. thaliana
  misc_feature: MA Experiment 20001560 PARAMETER Experiment Name: At_Drought_Soil_Dry_P Parameter: Plant Line Value: WS
  misc_feature: MA Experiment 20001560 PARAMETER Experiment Name: At_Drought_Soil_Dry_P Parameter: Post Timepoint (hr) Value: None
  misc_feature: MA Experiment 20001560 PARAMETER Experiment Name: At_Drought_Soil_Dry_P Parameter: Post-Treatment Value: None
  misc_feature: MA Experiment 20001560 PARAMETER Experiment Name: At_Drought_Soil_Dry_P Parameter: Timepoint (day) Value: 14
  misc_feature: MA Experiment 20001560 PARAMETER Experiment Name: At_Drought_Soil_Dry_P Parameter: Treatment Value: Drought vs. No Drought
  misc_feature: MA Experiment ID: 20001904 Result: Up-regulated in Transcription
  misc_feature: MA Experiment 20001904 PARAMETER Experiment Name: At_Drought_Reproduction_P Parameter: Age (day) Value: 37
  misc_feature: MA Experiment 20001904 PARAMETER Experiment Name: At_Drought_Reproduction_P Parameter: Organism Value: A. thaliana
  misc_feature: MA Experiment 20001904 PARAMETER Experiment Name: At_Drought_Reproduction_P Parameter: Plant Line Value: WS
  misc_feature: MA Experiment 20001904 PARAMETER Experiment Name: At_Drought_Reproduction_P Parameter: Timepoint (day) Value: 7
  misc_feature: MA Experiment 20001904 PARAMETER Experiment Name: At_Drought_Reproduction_P Parameter: Tissue Value: Rosettes
  misc_feature: MA Experiment 20001904 PARAMETER Experiment Name: At_Drought_Reproduction_P Parameter: Treatment Value: Drought vs. No Drought
acttctcataaaaaaggtcatttcaaaaaaaaatcagaaaccgtcaaaaagccaccgttgatatttcttccttgttgcttcttcaatggcgtcgttcgacgaagcacctcccggaaaccccaaagccggtgaaaagatcttcagaaccaagtgcgctcagtgtcacaccgtcgagaaaggtgccggtcacaaacaaggaccgaatttgaatggattgtttggaagacaatctggaacaactccaggatattcttactctgctgctaacaaaagcatggctgtgaattgggaggagaagactctttacgattacttgttgaatcctaagaagtacatccctggaacaaaaatggtgtttcctggactgaaaaaaccgcaagatcgtgccgatctcatcgcttatttgaaggaaggtactgcttagacaggctcgtccagatatatgaagctggcatttttttttctcacagctaaataaaatcagaccaaaaatattatggtcatgaactgctttttgtatggtcttttattctttctttctttttacgttgttgaagaggctagttgcctcttataaagtggaatattcgttattgatgtgaagagctaagaaccaatttccaccacgatagtcatgagattttcct

SEQ ID NO: 101486 - protein, 112 aa, Arabidopsis thaliana; identical to SEQ ID NO: 21690
  peptide (1)..(112): Ceres Seq. ID no. 13608004
  misc_feature (1)..(112): Homolog of NCBI NO: 15234910 NR Description: cytochrome c [Arabidopsis thaliana]
  misc_feature (2)..(112): Homolog of NCBI NO: 117976 NR Description: Cytochrome c >gi|65496|pir||CCPU cytochrome c -
  misc_feature (2)..(112): Homolog of NCBI NO: 118018 NR Description: CYTOCHROME C >gi|65507|pir||CCED cytochrome c -
  misc_feature (1)..(112): Homolog of NCBI NO: 15219956 NR Description: cytochrome C -related [Arabidopsis thaliana]
  misc_feature (2)..(112): Homolog of NCBI NO: 117952 NR Description: CYTOCHROME C >gi|65504|pir||CCAB cytochrome c
  misc_feature (2)..(112): Homolog of NCBI NO: 117964 NR Description: Cytochrome c >gi|65494|pir||CCRPBN cytochrome c
  misc_feature (1)..(112): Homolog of NCBI NO: 118011 NR Description: Cytochrome c >gi|625189|pir||CCRZ cytochrome c - rice >gi|169786|gb|AAA63515.1| cytochrome c
  misc_feature (2)..(112): Homolog of NCBI NO: 118000 NR Description: CYTOCHROME C >gi|65505|pir||CCTO cytochrome c
  misc_feature (2)..(112): Homolog of NCBI NO: 476417 NR Description: cytochrome c - cuckoopint
  misc_feature (2)..(112): Homolog of NCBI NO: 118013 NR Description: CYTOCHROME C >gi|65497|pir||CCMB cytochrome c -

SEQ ID NO: 101487 - DNA, 1030 bp, Arabidopsis thaliana
  misc_feature (1)..(1030): Ceres Seq. ID no. 13608012
  misc_feature: MA Experiment ID: 108434 Result: Down-regulated in Transcription
  misc_feature: MA Experiment 108434 PARAMETER Experiment Name: At_Root_Tips_cDNA_P Parameter: Tissue Value: Root Tips
  misc_feature: MA Experiment ID: 108435 Result: Down-regulated in Transcription
  misc_feature: MA Experiment 108435 PARAMETER Experiment Name: At_stm_Mutants_cDNA_P Parameter: Plant Line Value: wt Landsburg vs stm
  misc_feature: MA Experiment 108435 PARAMETER Experiment Name: At_stm_Mutants_cDNA_P Parameter: Tissue Value: Shoot Apical Meristem Region
  misc_feature: MA Experiment ID: 108461 Result: Up-regulated in Transcription
  misc_feature: MA Experiment 108461 PARAMETER Experiment Name: At_Germinating_Seeds_cDNA_P Parameter: Age (day) Value: 1 vs. 0
  misc_feature: MA Experiment 108461 PARAMETER Experiment Name: At_Germinating_Seeds_cDNA_P Parameter: Tissue Value: Germinating Seeds
  misc_feature: MA Experiment ID: 108462 Result: Up-regulated in Transcription
  misc_feature: MA Experiment 108462 PARAMETER Experiment Name: At_Germinating_Seeds_cDNA_P Parameter: Age (day) Value: 2 vs. 0
  misc_feature: MA Experiment 108462 PARAMETER Experiment Name: At_Germinating_Seeds_cDNA_P Parameter: Tissue Value: Germinating Seeds
  misc_feature: MA Experiment ID: 108464 Result: Up-regulated in Transcription
  misc_feature: MA Experiment 108464 PARAMETER Experiment Name: At_Germinating_Seeds_cDNA_P Parameter: Age (day) Value: 4 vs. 0
  misc_feature: MA Experiment 108464 PARAMETER Experiment Name: At_Germinating_Seeds_cDNA_P Parameter: Tissue Value: Germinating Seeds
  misc_feature: MA Experiment ID: 108488 Result: Up-regulated in Transcription
  misc_feature: MA Experiment ID: 108489 Result: Down-regulated in Transcription
  misc_feature: MA Experiment ID: 108594 Result: Down-regulated in Transcription
  misc_feature: MA Experiment 108594 PARAMETER Experiment Name: At_Ler-rhl_Root_cDNA_P Parameter: Plant Line Value: null
  misc_feature: MA Experiment ID: 20000180 Result: Up-regulated in Transcription
  misc_feature: MA Experiment 20000180 PARAMETER Experiment Name: At_Germinating_Seeds_P Parameter: Age (hr) Value: 24 vs. 0
  misc_feature: MA Experiment 20000180 PARAMETER Experiment Name: At_Germinating_Seeds_P Parameter: Tissue Value: Germinating Seeds
  misc_feature: MA Experiment ID: 20000185 Result: Down-regulated in Transcription
  misc_feature: MA Experiment 20000185 PARAMETER Experiment Name: At_Roots__P Parameter: Age (day) Value: 7 vs. 21
  misc_feature: MA Experiment 20000185 PARAMETER Experiment Name: At_Roots__P Parameter: Organism Value: A. thaliana
  misc_feature: MA Experiment 20000185 PARAMETER Experiment Name: At_Roots__P Parameter: Tissue Value: Roots vs. Whole Plant
  misc_feature: MA Experiment ID: 20000269 Result: Down-regulated in Transcription
  misc_feature: MA Experiment 20000269 PARAMETER Experiment Name: At_1mM_KNO3_L-vs-H_Roots_P Parameter: Age (day) Value: 7,10,12
  misc_feature: MA Experiment 20000269 PARAMETER Experiment Name: At_1mM_KNO3_L-vs-H_Roots_P Parameter: Organism Value: A. thaliana
  misc_feature: MA Experiment 20000269 PARAMETER Experiment Name: At_1mM_KNO3_L-vs-H_Roots_P Parameter: Plant Line Value: WS
  misc_feature: MA Experiment 20000269 PARAMETER Experiment Name: At_1mM_KNO3_L-vs-H_Roots_P Parameter: Timepoint (day) Value: 7,10,12
  misc_feature: MA Experiment 20000269 PARAMETER Experiment Name: At_1mM_KNO3_L-vs-H_Roots_P Parameter: Tissue Value: Roots
  misc_feature: MA Experiment 20000269 PARAMETER Experiment Name: At_1mM_KNO3_L-vs-H_Roots_P Parameter: Treatment Value: 1mM KNO3 vs. 50mM KNO3
  misc_feature: MA Experiment ID: 20000437 Result: Down-regulated in Transcription
  misc_feature: MA Experiment 20000437 PARAMETER Experiment Name: At_Drought_P Parameter: Age (day) Value: 8
  misc_feature: MA Experiment 20000437 PARAMETER Experiment Name: At_Drought_P Parameter: Organism Value: A. thaliana
  misc_feature: MA Experiment 20000437 PARAMETER Experiment Name: At_Drought_P Parameter: Plant Line Value: WS
  misc_feature: MA Experiment 20000437 PARAMETER Experiment Name: At_Drought_P Parameter: Timepoint (hr) Value: 24
  misc_feature: MA Experiment 20000437 PARAMETER Experiment Name: At_Drought_P Parameter: Tissue Value: Whole Plant
  misc_feature: MA Experiment 20000437 PARAMETER Experiment Name: At_Drought_P Parameter: Treatment Value: Drought vs. No Drought
  misc_feature: MA Experiment ID: 20000439 Result: Down-regulated in Transcription
  misc_feature: MA Experiment 20000439 PARAMETER Experiment Name: At_Roots__P Parameter: Age (day) Value: 14 vs. 21
  misc_feature: MA Experiment 20000439 PARAMETER Experiment Name: At_Roots__P Parameter: Organism Value: A. thaliana
  misc_feature: MA Experiment 20000439 PARAMETER Experiment Name: At_Roots__P Parameter: Tissue Value: Roots vs. Whole Plant
  misc_feature: MA Experiment ID: 20000794 Result: Down-regulated in Transcription
  misc_feature: MA Experiment 20000794 PARAMETER Experiment Name: At_Petals_P Parameter: Age (day) Value: 23-25 days
  misc_feature: MA Experiment 20000794 PARAMETER Experiment Name: At_Petals_P Parameter: Plant Line Value: WS
  misc_feature: MA Experiment 20000794 PARAMETER Experiment Name: At_Petals_P Parameter: Tissue Value: Petals vs. Whole plant
  misc_feature: MA Experiment ID: 20001557 Result: Down-regulated in Transcription
  misc_feature: MA Experiment 20001557 PARAMETER Experiment Name: At_Drought_Soil_Dry_P Parameter: Age (day) Value: 27
  misc_feature: MA Experiment 20001557 PARAMETER Experiment Name: At_Drought_Soil_Dry_P Parameter: Organism Value: A. thaliana
  misc_feature: MA Experiment 20001557 PARAMETER Experiment Name: At_Drought_Soil_Dry_P Parameter: Plant Line Value: WS
  misc_feature: MA Experiment 20001557 PARAMETER Experiment Name: At_Drought_Soil_Dry_P Parameter: Post Timepoint (hr) Value: 3
  misc_feature: MA Experiment 20001557 PARAMETER Experiment Name: At_Drought_Soil_Dry_P Parameter: Post-Treatment Value: Re-Water vs. No Drought
  misc_feature: MA Experiment 20001557 PARAMETER Experiment Name: At_Drought_Soil_Dry_P Parameter: Timepoint (day) Value: 13
  misc_feature: MA Experiment 20001557 PARAMETER Experiment Name: At_Drought_Soil_Dry_P Parameter: Treatment Value: Drought vs. No Drought
  misc_feature: MA Experiment ID: 20001757 Result: Up-regulated in Transcription
  misc_feature: MA Experiment 20001757 PARAMETER Experiment Name: At_50mM_NH4NO3_L-to-H_P Parameter: Timepoint (hr) Value: 6
  misc_feature: MA Experiment 20001757 PARAMETER Experiment Name: At_50mM_NH4NO3_L-to-H_P Parameter: Tissue Value: Leaf
  misc_feature: MA Experiment 20001757 PARAMETER Experiment Name: At_50mM_NH4NO3_L-to-H_P Parameter: Treatment Value: 50mM NH4NO3 vs 100mM Mannitol
  misc_feature: MA Experiment ID: 20001904 Result: Down-regulated in Transcription
  misc_feature: MA Experiment 20001904 PARAMETER Experiment Name: At_Drought_Reproduction_P Parameter: Age (day) Value: 37
  misc_feature: MA Experiment 20001904 PARAMETER Experiment Name: At_Drought_Reproduction_P Parameter: Organism Value: A. thaliana
  misc_feature: MA Experiment 20001904 PARAMETER Experiment Name: At_Drought_Reproduction_P Parameter: Plant Line Value: WS
  misc_feature: MA Experiment 20001904 PARAMETER Experiment Name: At_Drought_Reproduction_P Parameter: Timepoint (day) Value: 7
  misc_feature: MA Experiment 20001904 PARAMETER Experiment Name: At_Drought_Reproduction_P Parameter: Tissue Value: Rosettes
  misc_feature: MA Experiment 20001904 PARAMETER Experiment Name: At_Drought_Reproduction_P Parameter: Treatment Value: Drought vs. No Drought
  misc_feature: MA Experiment ID: 20001906 Result: Down-regulated in Transcription
  misc_feature: MA Experiment 20001906 PARAMETER Experiment Name: At_Drought_Reproduction_P Parameter: Age (day) Value: 35
  misc_feature: MA Experiment 20001906 PARAMETER Experiment Name: At_Drought_Reproduction_P Parameter: Organism Value: A. thaliana
  misc_feature: MA Experiment 20001906 PARAMETER Experiment Name: At_Drought_Reproduction_P Parameter: Plant Line Value: WS
  misc_feature: MA Experiment 20001906 PARAMETER Experiment Name: At_Drought_Reproduction_P Parameter: Timepoint (day) Value: 5
  misc_feature: MA Experiment 20001906 PARAMETER Experiment Name: At_Drought_Reproduction_P Parameter: Tissue Value: Siliques
  misc_feature: MA Experiment 20001906 PARAMETER Experiment Name: At_Drought_Reproduction_P Parameter: Treatment Value: Drought vs. No Drought
  misc_feature: MA Experiment ID: 20001908 Result: Down-regulated in Transcription
  misc_feature: MA Experiment 20001908 PARAMETER Experiment Name: At_Drought_Reproduction_P Parameter: Age (day) Value: 40
  misc_feature: MA Experiment 20001908 PARAMETER Experiment Name: At_Drought_Reproduction_P Parameter: Organism Value: A. thaliana
  misc_feature: MA Experiment 20001908 PARAMETER Experiment Name: At_Drought_Reproduction_P Parameter: Plant Line Value: WS
  misc_feature: MA Experiment 20001908 PARAMETER Experiment Name: At_Drought_Reproduction_P Parameter: Timepoint (day) Value: 10
  misc_feature: MA Experiment 20001908 PARAMETER Experiment Name: At_Drought_Reproduction_P Parameter: Tissue Value: Siliques
  misc_feature: MA Experiment 20001908 PARAMETER Experiment Name: At_Drought_Reproduction_P Parameter: Treatment Value: Drought vs. No Drought
gacccacgcgtccgccagagtaaagcttgaaactttggactaaaagaatggcgtctttgggtgtgtcggaaatgcttggtactccccttaacttcagggcagtttcaagatcgtctgctccgttggcatcaagcccatccacgttcaagactgttgctctcttctctaagaaaaagccagctcctgctaagtccaaggctgtctctgagactagcgatgagctcgccaagtggtatggtcctgacaggagaattttcttgcctgatggtcttttggatagatcagagatcccagagtacttaaacggtgaagttgctggagattatggttatgacccatttggtcttggaaagaagcctgagaactttgctaaataccaagcttttgaattgatccatgcgagatgggctatgttaggagcagctggtttcatcattcctgaagctttaaacaaatatggcgctaactgtggcccagaagctgtctggtttaagactggtgctttgcttcttgatggaaacacattgaactactttggcaagaacatccctatcaaccttgttctcgccgtagttgctgaggttgttctcctcggtggagccgagtactacagaatcaccaacggattggatttcgaggacaagctacacccaggaggtccatttgatcctctaggccttgctaaggaccctgagcaaggagctcttctcaaagtcaaagagatcaagaacgggagattagccatgtttgcgatgctcggtttctttatccaagcgtatgttaccggagaaggtcctgttgagaaccttgcaaagcatctcagtgatccttttggaaacaacttgcttaccgtcatcgctggaactgccgagagagctcccactctctaagccatttctactttttttaagagcttccaaaatgtacactttgttcgattggaactccttttgacaatgttaaaaaaacttccatctgaatcttcttgatatatttcaaattttcaatggtgctttatcatgcttctaag

SEQ ID NO: 101488 - protein, 280 aa, Arabidopsis thaliana; identical to SEQ ID NO: 25086
  peptide (1)..(280): Ceres Seq. ID no. 13608013
  misc_feature (80)..(244): Pfam Name: Chlorophyll A-B binding protein Pfam Description: Chlorophyll A-B binding protein
  misc_feature (1)..(280): Homolog of NCBI NO: 15235029 NR Description: light-harvesting chlorophyll a/b binding protein
  misc_feature (1)..(280): Homolog of NCBI NO: 21593520 NR Description: chlorophyll a/b-binding protein-like [Arabidopsis
  misc_feature (3)..(280): Homolog of NCBI NO: 1644289 NR Description: chlorophyll a/b-binding protein CP26 in PS II
  misc_feature (3)..(280): Homolog of NCBI NO: 100200 NR Description: chlorophyll a/b-binding protein type I precursor
  misc_feature (3)..(280): Homolog of NCBI NO: 19184 NR Description: Type I (26 kD) CP29 polypeptide [Lycopersicon
  misc_feature (1)..(280): Homolog of NCBI NO: 7443227 NR Description: chlorophyll a/b-binding protein CP26 precursor -
  misc_feature (1)..(280): Homolog of NCBI NO: 100573 NR Description: chlorophyll a/b-binding protein CP29 precursor - >gi|18958|emb|CAA44777.1| Precursor of CP29, core chlorophyll a/b
  misc_feature (1)..(280): Homolog of NCBI NO: 7443226 NR Description: chlorophyll a/b-binding protein CP26 precursor -
  misc_feature (2)..(280): Homolog of NCBI NO: 322391 NR Description: chlorophyll a/b-binding protein Lhcb5 - Scotch >gi|22750|emb|CAA78900.1| Lhcb5 protein [Pinus sylvestris]
  misc_feature (110)..(280): Homolog of NCBI NO: 15487754 NR Description: ASCAB9 [Centromadia pungens]

SEQ ID NO: 101489 - protein, 272 aa, Arabidopsis thaliana; identical to SEQ ID NO: 25087
  peptide (1)..(272): Ceres Seq. ID no. 13608014
  misc_feature (72)..(236): Pfam Name: Chlorophyll A-B binding protein Pfam Description: Chlorophyll A-B binding protein
  misc_feature (1)..(272): Homolog of NCBI NO: 15235029 NR Description: light-harvesting chlorophyll a/b binding protein
  misc_feature (1)..(272): Homolog of NCBI NO: 21593520 NR Description: chlorophyll a/b-binding protein-like [Arabidopsis
  misc_feature (1)..(272): Homolog of NCBI NO: 1644289 NR Description: chlorophyll a/b-binding protein CP26 in PS II
  misc_feature (1)..(272): Homolog of NCBI NO: 100200 NR Description: chlorophyll a/b-binding protein type I precursor
  misc_feature (1)..(272): Homolog of NCBI NO: 19184 NR Description: Type I (26 kD) CP29 polypeptide [Lycopersicon
  misc_feature (1)..(272): Homolog of NCBI NO: 7443227 NR Description: chlorophyll a/b-binding protein CP26 precursor -
  misc_feature (1)..(272): Homolog of NCBI NO: 100573 NR Description: chlorophyll a/b-binding protein CP29 precursor - >gi|18958|emb|CAA44777.1| Precursor of CP29, core chlorophyll a/b
  misc_feature (1)..(272): Homolog of NCBI NO: 7443226 NR Description: chlorophyll a/b-binding protein CP26 precursor -
  misc_feature (1)..(272): Homolog of NCBI NO: 322391 NR Description: chlorophyll a/b-binding protein Lhcb5 - Scotch >gi|22750|emb|CAA78900.1| Lhcb5 protein [Pinus sylvestris]
  misc_feature (102)..(272): Homolog of NCBI NO: 15487754 NR Description: ASCAB9 [Centromadia pungens]

SEQ ID NO: 101490 - protein, 159 aa, Arabidopsis thaliana; identical to SEQ ID NO: 25088
  peptide (1)..(159): Ceres Seq. ID no. 13608015
  misc_feature (1)..(123): Pfam Name: Chlorophyll A-B binding protein Pfam Description: Chlorophyll A-B binding protein
  misc_feature (1)..(159): Homolog of NCBI NO: 15235029 NR Description: light-harvesting chlorophyll a/b binding protein
  misc_feature (1)..(159): Homolog of NCBI NO: 21593520 NR Description: chlorophyll a/b-binding protein-like [Arabidopsis
  misc_feature (1)..(159): Homolog of NCBI NO: 1644289 NR Description: chlorophyll a/b-binding protein CP26 in PS II
  misc_feature (1)..(159): Homolog of NCBI NO: 100200 NR Description: chlorophyll a/b-binding protein type I precursor
  misc_feature (1)..(159): Homolog of NCBI NO: 19184 NR Description: Type I (26 kD) CP29 polypeptide [Lycopersicon
  misc_feature (1)..(159): Homolog of NCBI NO: 7443227 NR Description: chlorophyll a/b-binding protein CP26 precursor -
  misc_feature (1)..(159): Homolog of NCBI NO: 100573 NR Description: chlorophyll a/b-binding protein CP29 precursor - >gi|18958|emb|CAA44777.1| Precursor of CP29, core chlorophyll a/b
  misc_feature (1)..(159): Homolog of NCBI NO: 7443226 NR Description: chlorophyll a/b-binding protein CP26 precursor -
  misc_feature (1)..(159): Homolog of NCBI NO: 322391 NR Description: chlorophyll a/b-binding protein Lhcb5 - Scotch >gi|22750|emb|CAA78900.1| Lhcb5 protein [Pinus sylvestris]
  misc_feature (1)..(159): Homolog of NCBI NO: 15487754 NR Description: ASCAB9 [Centromadia pungens]

SEQ ID NO: 101491 - DNA, 1219 bp, Arabidopsis thaliana
  misc_feature (1)..(1219): Ceres Seq. ID no. 13608020
  misc_feature: MA Experiment ID: 108461 Result: Up-regulated in Transcription
  misc_feature: MA Experiment 108461 PARAMETER Experiment Name: At_Germinating_Seeds_cDNA_P Parameter: Age (day) Value: 1 vs. 0
  misc_feature: MA Experiment 108461 PARAMETER Experiment Name: At_Germinating_Seeds_cDNA_P Parameter: Tissue Value: Germinating Seeds
  misc_feature: MA Experiment ID: 108462 Result: Up-regulated in Transcription
  misc_feature: MA Experiment 108462 PARAMETER Experiment Name: At_Germinating_Seeds_cDNA_P Parameter: Age (day) Value: 2 vs. 0
  misc_feature: MA Experiment 108462 PARAMETER Experiment Name: At_Germinating_Seeds_cDNA_P Parameter: Tissue Value: Germinating Seeds
  misc_feature: MA Experiment ID: 108569 Result: Up-regulated in Transcription
  misc_feature: MA Experiment 108569 PARAMETER Experiment Name: At_0.001%_MeJA__cDNA_P Parameter: Timepoint (hr) Value: 6
  misc_feature: MA Experiment 108569 PARAMETER Experiment Name: At_0.001%_MeJA__cDNA_P Parameter: Tissue Value: Aerial
  misc_feature: MA Experiment 108569 PARAMETER Experiment Name: At_0.001%_MeJA__cDNA_P Parameter: Treatment Value: 0.001% MeJA vs. No Treatment
  misc_feature: MA Experiment ID: 108573 Result: Up-regulated in Transcription
  misc_feature: MA Experiment 108573 PARAMETER Experiment Name: At_Drought_cDNA_P Parameter: Timepoint (hr) Value: 6
  misc_feature: MA Experiment 108573 PARAMETER Experiment Name: At_Drought_cDNA_P Parameter: Tissue Value: Aerial
  misc_feature: MA Experiment 108573 PARAMETER Experiment Name: At_Drought_cDNA_P Parameter: Treatment Value: Drought vs. No Drought
  misc_feature: MA Experiment ID: 108585 Result: Up-regulated in Transcription
  misc_feature: MA Experiment 108585 PARAMETER Experiment Name: At_5mM_NaNP_cDNA_P Parameter: Timepoint (hr) Value: 6
  misc_feature: MA Experiment 108585 PARAMETER Experiment Name: At_5mM_NaNP_cDNA_P Parameter: Tissue Value: Aerial
  misc_feature: MA Experiment 108585 PARAMETER Experiment Name: At_5mM_NaNP_cDNA_P Parameter: Treatment Value: null
  misc_feature: MA Experiment ID: 108594 Result: Down-regulated in Transcription
  misc_feature: MA Experiment 108594 PARAMETER Experiment Name: At_Ler-rhl_Root_cDNA_P Parameter: Plant Line Value: null
  misc_feature: MA Experiment ID: 20000173 Result: Down-regulated in Transcription
  misc_feature: MA Experiment 20000173 PARAMETER Experiment Name: At_42deg_Heat_P Parameter: Age (day) Value: 14
  misc_feature: MA Experiment 20000173 PARAMETER Experiment Name: At_42deg_Heat_P Parameter: Organism Value: A. thaliana
  misc_feature: MA Experiment 20000173 PARAMETER Experiment Name: At_42deg_Heat_P Parameter: Plant Line Value: WS
  misc_feature: MA Experiment 20000173 PARAMETER Experiment Name: At_42deg_Heat_P Parameter: Temperature (deg C) Value: 42 vs. 22
  misc_feature: MA Experiment 20000173 PARAMETER Experiment Name: At_42deg_Heat_P Parameter: Timepoint (hr) Value: 6
  misc_feature: MA Experiment 20000173 PARAMETER Experiment Name: At_42deg_Heat_P Parameter: Tissue Value: Aerial
  misc_feature: MA Experiment ID: 20000495 Result: Down-regulated in Transcription
  misc_feature: MA Experiment 20000495 PARAMETER Experiment Name: At_Guard_Cells_P Parameter: Harvest Date Value: 8/2/2002
  misc_feature: MA Experiment 20000495 PARAMETER Experiment Name: At_Guard_Cells_P Parameter: Organism Value: A. thaliana
  misc_feature: MA Experiment 20000495 PARAMETER Experiment Name: At_Guard_Cells_P Parameter: Tissue Value: Guard Cells vs. Leaves
  misc_feature: MA Experiment ID: 20001451 Result: Down-regulated in Transcription
  misc_feature: MA Experiment 20001451 PARAMETER Experiment Name: At_Far-red-induction_P Parameter: Age (day) Value: 7
  misc_feature: MA Experiment 20001451 PARAMETER Experiment Name: At_Far-red-induction_P Parameter: Light Value: Far-red vs. White
  misc_feature: MA Experiment 20001451 PARAMETER Experiment Name: At_Far-red-induction_P Parameter: Organism Value: A. thaliana
  misc_feature: MA Experiment 20001451 PARAMETER Experiment Name: At_Far-red-induction_P Parameter: Plant Line Value: Columbia
  misc_feature: MA Experiment 20001451 PARAMETER Experiment Name: At_Far-red-induction_P Parameter: Timepoint (hr) Value: 24
  misc_feature: MA Experiment 20001451 PARAMETER Experiment Name: At_Far-red-induction_P Parameter: Tissue Value: Whole Plant
attctaatcatccccttgaattttccaagttttctccttttgtcttctctaactattttcccttaaaataaaaatccaatttttctttgtttcagtcctctcttctgctcattgatcttttaattaactttgattctctccgtttatggattaaccatttgatcgagataactctccaagaaatcgactgagttcgtaacttgttgttgtctgatcttttaaagattcaaccttttttggtccgatcatggctgttgctgagaatgctggtgtcaaagtggactcttctggtcagaatttagacaacaacaacactgctgcttcagctaccgagacgacaaagccgccatgtcctgatgatgatcaaagccctaaatctgactcatccactcctcttaccatcgattcgactcctgaaactgacgatcggatcaatgagactgctcaaaaggttcagactttaaatgggtttagtggaaatggtgagagagataacaatggagagatcaaagatttggctgatgcgttttctaagcttaatccgatggctcaggagtttgttcctccttctcttgctcgaagtcaatctggggttttgagaaatggattagggtttactaacaattttgcagccccacctaaacttgctgatgggaatgatcattttcctagaaggagaaggagttttggccaagggaagcgaagaatgaacaaaaggacaagcttggctcagaaggatgatgtaatcaggagaactgtatatgtctctgacatcgaccaacaggttacagaggagaacctcgcaggtgtctttattaactgtggacaggttgttgattgtcgtgtatgcggtgatccaaattctgtccttcgtttcgctttcattgaatttaccaatgaagagggagctagagctgctttgagcatgtcgggtactgtgctaggtttttaccctcttaaggttcttccttccaaaacagctattgctcctgttaacccgacttttcttccacgatctgaggatgagcgtgagatgtgcgttaggactgtttactgtaccaacattgacaagcggatcactcaaattgacttgaaaggcttctttgaaatgctttgcggggaggttcatcgtctgaggcttggagactatcaccaccaaacccgtattgcttttgttgagtttgcgatggcggaaagcgcaattgctgcgcttcactgc

SEQ ID NO: 101492 - protein, 324 aa, Arabidopsis thaliana
  peptide (1)..(324): Ceres Seq. ID no. 13608021
  misc_feature (171)..(239): Pfam Name: RNA recognition motif. (a.k.a. RRM, RBD, or RNP domain) Pfam Description: RNA recognition motif. (a.k.a. RRM, RBD, or RNP
  misc_feature (1)..(323): Homolog of NCBI NO: 15229132 NR Description: RNA-binding protein, putative [Arabidopsis
  misc_feature (1)..(323): Homolog of NCBI NO: 15223304 NR Description: RNA-binding protein, putative [Arabidopsis
  misc_feature (76)..(323): Homolog of NCBI NO: 15235177 NR Description: RNA-binding protein RBP37 [Arabidopsis thaliana]
  misc_feature (76)..(323): Homolog of NCBI NO: 1174153 NR Description: RNA-binding protein
  misc_feature (80)..(323): Homolog of NCBI NO: 15231858 NR Description: RNA-binding protein, putative [Arabidopsis
  misc_feature (154)..(323): Homolog of NCBI NO: 14030687 NR Description: At1g32790 [Arabidopsis thaliana]
  misc_feature (37)..(323): Homolog of NCBI NO: 15238531 NR Description: RNA-binding protein, putative [Arabidopsis
  misc_feature (86)..(323): Homolog of NCBI NO: 15220902 NR Description: RNA-binding protein, putative [Arabidopsis
  misc_feature (94)..(323): Homolog of NCBI NO: 8671859 NR Description: Contains similarity to RNA-binding protein from thaliana gi|2129727 and contains RNA recognition PF|00076 domain.
  misc_feature (87)..(296): Homolog of NCBI NO: 34903832 NR Description: ATT4F9_7(AL049523|pid:g4539439) Arabidopsis
MAVAENAGVKVDSSGQNLDNNNTAASATETTKPPCPDDDQSPKSDSSTPLTIDSTPETDDRINETAQKVQTLNGFSGNGERDNNGEIKDLADAFSKLNPMAQEFVPPSLARSQSGVLRNGLGFTNNFAAPPKLADGNDHFPRRRRSFGQGKRRMNKRTSLAQKDDVIRRTVYVSDIDQQVTEENLAGVFINCGQVVDCRVCGDPNSVLRFAFIEFTNEEGARAALSMSGTVLGFYPLKVLPSKTAIAPVNPTFLPRSEDEREMCVRTVYCTNIDKRITQIDLKGFFEMLCGEVHRLRLGDYHHQTRIAFVEFAMAESAIAALHC

SEQ ID NO: 101493 - protein, 225 aa, Arabidopsis thaliana
  peptide (1)..(225): Ceres Seq. ID no. 13608022
  misc_feature (72)..(140): Pfam Name: RNA recognition motif. (a.k.a. RRM, RBD, or RNP domain) Pfam Description: RNA recognition motif. (a.k.a. RRM, RBD, or RNP
  misc_feature (1)..(224): Homolog of NCBI NO: 15229132 NR Description: RNA-binding protein, putative [Arabidopsis
  misc_feature (1)..(224): Homolog of NCBI NO: 15223304 NR Description: RNA-binding protein, putative [Arabidopsis
  misc_feature (1)..(224): Homolog of NCBI NO: 15235177 NR Description: RNA-binding protein RBP37 [Arabidopsis thaliana]
  misc_feature (1)..(224): Homolog of NCBI NO: 1174153 NR Description: RNA-binding protein
  misc_feature (1)..(224): Homolog of NCBI NO: 15231858 NR Description: RNA-binding protein, putative [Arabidopsis
  misc_feature (55)..(224): Homolog of NCBI NO: 14030687 NR Description: At1g32790 [Arabidopsis thaliana]
  misc_feature (1)..(224): Homolog of NCBI NO: 15238531 NR Description: RNA-binding protein, putative [Arabidopsis
  misc_feature (1)..(224): Homolog of NCBI NO: 15220902 NR Description: RNA-binding protein, putative [Arabidopsis
  misc_feature (1)..(224): Homolog of NCBI NO: 8671859 NR Description: Contains similarity to RNA-binding protein from thaliana gi|2129727 and contains RNA recognition PF|00076 domain.
  misc_feature (1)..(197): Homolog of NCBI NO: 34903832 NR Description: ATT4F9_7(AL049523|pid:g4539439) Arabidopsis
MAQEFVPPSLARSQSGVLRNGLGFTNNFAAPPKLADGNDHFPRRRRSFGQGKRRMNKRTSLAQKDDVIRRTVYVSDIDQQVTEENLAGVFINCGQVVDCRVCGDPNSVLRFAFIEFTNEEGARAALSMSGTVLGFYPLKVLPSKTAIAPVNPTFLPRSEDEREMCVRTVYCTNIDKRITQIDLKGFFEMLCGEVHRLRLGDYHHQTRIAFVEFAMAESAIAALHC

SEQ ID NO: 101494 - protein, 171 aa, Arabidopsis thaliana
  peptide (1)..(171): Ceres Seq. ID no. 13608023
  misc_feature (18)..(86): Pfam Name: RNA recognition motif. (a.k.a. RRM, RBD, or RNP domain) Pfam Description: RNA recognition motif. (a.k.a. RRM, RBD, or RNP
  misc_feature (1)..(170): Homolog of NCBI NO: 15229132 NR Description: RNA-binding protein, putative [Arabidopsis
  misc_feature (1)..(170): Homolog of NCBI NO: 15223304 NR Description: RNA-binding protein, putative [Arabidopsis
  misc_feature (1)..(170): Homolog of NCBI NO: 15235177 NR Description: RNA-binding protein RBP37 [Arabidopsis thaliana]
  misc_feature (1)..(170): Homolog of NCBI NO: 1174153 NR Description: RNA-binding protein
  misc_feature (1)..(170): Homolog of NCBI NO: 15231858 NR Description: RNA-binding protein, putative [Arabidopsis
  misc_feature (1)..(170): Homolog of NCBI NO: 14030687 NR Description: At1g32790 [Arabidopsis thaliana]
  misc_feature (1)..(170): Homolog of NCBI NO: 15238531 NR Description: RNA-binding protein, putative [Arabidopsis
  misc_feature (1)..(170): Homolog of NCBI NO: 15220902 NR Description: RNA-binding protein, putative [Arabidopsis
  misc_feature (1)..(170): Homolog of NCBI NO: 8671859 NR Description: Contains similarity to RNA-binding protein from thaliana gi|2129727 and contains RNA recognition PF|00076 domain.
  misc_feature (1)..(143): Homolog of NCBI NO: 34903832 NR Description: ATT4F9_7(AL049523|pid:g4539439) Arabidopsis
MNKRTSLAQKDDVIRRTVYVSDIDQQVTEENLAGVFINCGQVVDCRVCGDPNSVLRFAFIEFTNEEGARAALSMSGTVLGFYPLKVLPSKTAIAPVNPTFLPRSEDEREMCVRTVYCTNIDKRITQIDLKGFFEMLCGEVHRLRLGDYHHQTRIAFVEFAMAESAIAALHC

SEQ ID NO: 101495 - DNA, 1253 bp, Arabidopsis thaliana
  misc_feature (1)..(1253): Ceres Seq. ID no. 13608024
  misc_feature: MA Experiment ID: 20001557 Result: Up-regulated in Transcription
  misc_feature: MA Experiment 20001557 PARAMETER Experiment Name: At_Drought_Soil_Dry_P Parameter: Age (day) Value: 27
  misc_feature: MA Experiment 20001557 PARAMETER Experiment Name: At_Drought_Soil_Dry_P Parameter: Organism Value: A. thaliana
  misc_feature: MA Experiment 20001557 PARAMETER Experiment Name: At_Drought_Soil_Dry_P Parameter: Plant Line Value: WS
  misc_feature: MA Experiment 20001557 PARAMETER Experiment Name: At_Drought_Soil_Dry_P Parameter: Post Timepoint (hr) Value: 3
  misc_feature: MA Experiment 20001557 PARAMETER Experiment Name: At_Drought_Soil_Dry_P Parameter: Post-Treatment Value: Re-Water vs. No Drought
  misc_feature: MA Experiment 20001557 PARAMETER Experiment Name: At_Drought_Soil_Dry_P Parameter: Timepoint (day) Value: 13
  misc_feature: MA Experiment 20001557 PARAMETER Experiment Name: At_Drought_Soil_Dry_P Parameter: Treatment Value: Drought vs. No Drought
  misc_feature: MA Experiment ID: 20001757 Result: Up-regulated in Transcription
  misc_feature: MA Experiment 20001757 PARAMETER Experiment Name: At_50mM_NH4NO3_L-to-H_P Parameter: Timepoint (hr) Value: 6
  misc_feature: MA Experiment 20001757 PARAMETER Experiment Name: At_50mM_NH4NO3_L-to-H_P Parameter: Tissue Value: Leaf
  misc_feature: MA Experiment 20001757 PARAMETER Experiment Name: At_50mM_NH4NO3_L-to-H_P Parameter: Treatment Value: 50mM NH4NO3 vs 100mM Mannitol
agaaaccctagtttgaattttcacggccgacctctctctctcatctactaagctctcctccgagtattgttggcttcagaccaaatcttctccggcgctgtagcgtttcccccgtttcccctttttaacctttgcaaacaatgagtgggcgattttctcggtcaatctatgttggtaacttgcccggtgacattagggaacatgagattgaagatatcttttacaagtatggccgcattgtcgatattgaattgaaggttccacctcggcctccatgttattgctttgttgagtttgagcattctcgggatgctgaagatgccatcaagggccgtgatggctataatttggatggctgtcgcttgagggttgagcttgcacatggtggtcgaggacagtcttcaagtgatcgtcgtggtggctacggtggtggtggcagcggctatggtggtggaggtggtggtggtggatcagctcggtttggcgtctcacgacactctgaattccgagttattgtacgtgggctcccatcatctgcttcatggcaagatttgaaggatcatatgcggaaagctggtgatgtgtgctttgctgaggtgactcgagacagtgatggaacttatggtgttgtcgactacaccaattatgatgacatgaagtatgcaataaggaaacttgatgacacagagttcagaaacccctgggctagaggttttatccgggttaagaaatatgaaagctcccgatcaagaagcagaagcccaagcagaagcagaagcagaagcagaagtcgaagtcgtagccgaggccgtggtcgcagccatagccgcagtcgcagccttagcaggagcaagagcccaaggaaggatctgagtaaatcaccaaggcgatccctttccagatcgatttcaaaatctagatcgccatcgcccgacaagaagaagagtccccccagggcaatgtcgagatcaaagtccaggtccaggtccagatcgaggtctccgtccaaatctcctcccaaggttcgcgaaggcagtgtgtgattttgttaagcggtgaaaatggccaaaagaaagagtgcgaaaaattctcaagtcaagatccattctctgtgtttttttttttgctgttttcggataattgacattttctgctgttctctgcttctttactcacaaatgatcatctttatactattatgacctgttatgttatggatgtttccgtgaccatcacaatacctctgagttttg

SEQ ID NO: 101496 - protein, 300 aa, Arabidopsis thaliana
  peptide (1)..(300): Ceres Seq. ID no. 13608025
  misc_feature (9)..(77): Pfam Name: RNA recognition motif. (a.k.a. RRM, RBD, or RNP domain) Pfam Description: RNA recognition motif. (a.k.a. RRM, RBD, or RNP
  misc_feature (1)..(272): Homolog of NCBI NO: 22331714 NR Description: arginine/serine-rich splicing factor (atSRp34),
  misc_feature (1)..(295): Homolog of NCBI NO: 12324445 NR Description: putative splicing factor; 53460-55514
  misc_feature (1)..(179): Homolog of NCBI NO: 11346384 NR Description: PRE-MRNA SPLICING FACTOR SF2-like protein -
  misc_feature (1)..(299): Homolog of NCBI NO: 30678391 NR Description: pre-mRNA splicing factor SF2 (SR1 protein)
  misc_feature (1)..(299): Homolog of NCBI NO: 5815235 NR Description: splicing factor SR1 [Arabidopsis thaliana]
  misc_feature (1)..(299): Homolog of NCBI NO: 2129717 NR Description: splicing factor SF-2 homolog - Arabidopsis
  misc_feature (1)..(264): Homolog of NCBI NO: 2443473 NR Description: ASF/SF2 homolog [Arabidopsis thaliana]
  misc_feature (1)..(264): Homolog of NCBI NO: 30678395 NR Description: pre-mRNA splicing factor SF2 (SR1 protein)
  misc_feature (1)..(264): Homolog of NCBI NO: 5815236 NR Description: splicing factor SR1B [Arabidopsis thaliana]
  misc_feature (1)..(264): Homolog of NCBI NO: 5815237 NR Description: splicing factor SR1C [Arabidopsis thaliana]
MSGRFSRSIYVGNLPGDIREHEIEDIFYKYGRIVDIELKVPPRPPCYCFVEFEHSRDAEDAIKGRDGYNLDGCRLRVELAHGGRGQSSSDRRGGYGGGGSGYGGGGGGGGSARFGVSRHSEFRVIVRGLPSSASWQDLKDHMRKAGDVCFAEVTRDSDGTYGVVDYTNYDDMKYAIRKLDDTEFRNPWARGFIRVKKYESSRSRSRSPSRSRSRSRSRSRSRGRGRSHSRSRSLSRSKSPRKDLSKSPRRSLSRSISKSRSPSPDKKKSPPRAMSRSKSRSRSRSRSPSKSPPKVREGSV

SEQ ID NO: 101497 - protein, 159 aa, Arabidopsis thaliana
  peptide (1)..(159): Ceres Seq. ID no. 13608026
  misc_feature (1)..(131): Homolog of NCBI NO: 22331714 NR Description: arginine/serine-rich splicing factor (atSRp34),
  misc_feature (1)..(154): Homolog of NCBI NO: 12324445 NR Description: putative splicing factor; 53460-55514
  misc_feature (1)..(38): Homolog of NCBI NO: 11346384 NR Description: PRE-MRNA SPLICING FACTOR SF2-like protein -
  misc_feature (1)..(158): Homolog of NCBI NO: 30678391 NR Description: pre-mRNA splicing factor SF2 (SR1 protein)
  misc_feature (1)..(158): Homolog of NCBI NO: 5815235 NR Description: splicing factor SR1 [Arabidopsis thaliana]
  misc_feature (1)..(158): Homolog of NCBI NO: 2129717 NR Description: splicing factor SF-2 homolog - Arabidopsis
  misc_feature (1)..(123): Homolog of NCBI NO: 2443473 NR Description: ASF/SF2 homolog [Arabidopsis thaliana]
  misc_feature (1)..(123): Homolog of NCBI NO: 30678395 NR Description: pre-mRNA splicing factor SF2 (SR1 protein)
  misc_feature (1)..(123): Homolog of NCBI NO: 5815236 NR Description: splicing factor SR1B [Arabidopsis thaliana]
  misc_feature (1)..(123): Homolog of NCBI NO: 5815237 NR Description: splicing factor SR1C [Arabidopsis thaliana]
MRKAGDVCFAEVTRDSDGTYGVVDYTNYDDMKYAIRKLDDTEFRNPWARGFIRVKKYESSRSRSRSPSRSRSRSRSRSRSRGRGRSHSRSRSLSRSKSPRKDLSKSPRRSLSRSISKSRSPSPDKKKSPPRAMSRSKSRSRSRSRSPSKSPPKVREGSV

SEQ ID NO: 101498 - DNA, 1224 bp, Arabidopsis thaliana
  misc_feature (1)..(1224): Ceres Seq. ID no. 13608027
  misc_feature: MA Experiment ID: 20000169 Result: Down-regulated in Transcription
  misc_feature: MA Experiment 20000169 PARAMETER Experiment Name: At_100uM_ABA_P Parameter: Age (day) Value: 14
  misc_feature: MA Experiment 20000169 PARAMETER Experiment Name: At_100uM_ABA_P Parameter: Organism Value: A. thaliana
  misc_feature: MA Experiment 20000169 PARAMETER Experiment Name: At_100uM_ABA_P Parameter: Plant Line Value: WS
  misc_feature: MA Experiment 20000169 PARAMETER Experiment Name: At_100uM_ABA_P Parameter: Timepoint (hr) Value: 6
  misc_feature: MA Experiment 20000169 PARAMETER Experiment Name: At_100uM_ABA_P Parameter: Tissue Value: Aerial
  misc_feature: MA Experiment 20000169 PARAMETER Experiment Name: At_100uM_ABA_P Parameter: Treatment Value: 100uM ABA vs. No Treatment
  misc_feature: MA Experiment ID: 20000182 Result: Up-regulated in Transcription
  misc_feature: MA Experiment 20000182 PARAMETER Experiment Name: At_2mM_SA_P Parameter: Age (day) Value: 14
  misc_feature: MA Experiment 20000182 PARAMETER Experiment Name: At_2mM_SA_P Parameter: Organism Value: A. thaliana
  misc_feature: MA Experiment 20000182 PARAMETER Experiment Name: At_2mM_SA_P Parameter: Plant Line Value: WS
  misc_feature: MA Experiment 20000182 PARAMETER Experiment Name: At_2mM_SA_P Parameter: Timepoint (hr) Value: 6
  misc_feature: MA Experiment 20000182 PARAMETER Experiment Name: At_2mM_SA_P Parameter: Tissue Value: Aerial
  misc_feature: MA Experiment 20000182 PARAMETER Experiment Name: At_2mM_SA_P Parameter: Treatment Value: 2mM SA vs. No Treatment
  misc_feature: MA Experiment ID: 20000211 Result: Up-regulated in Transcription
  misc_feature: MA Experiment 20000211 PARAMETER Experiment Name: At_0.001percent_MeJA__P Parameter: Age (day) Value: 14
  misc_feature: MA Experiment 20000211 PARAMETER Experiment Name: At_0.001percent_MeJA__P Parameter: Organism Value: A. thaliana
  misc_feature: MA Experiment 20000211 PARAMETER Experiment Name: At_0.001percent_MeJA__P Parameter: Plant Line Value: WS
  misc_feature: MA Experiment 20000211 PARAMETER Experiment Name: At_0.001percent_MeJA__P Parameter: Timepoint (hr) Value: 1
  misc_feature: MA Experiment 20000211 PARAMETER Experiment Name: At_0.001percent_MeJA__P Parameter: Tissue Value: Aerial
  misc_feature: MA Experiment 20000211 PARAMETER Experiment Name: At_0.001percent_MeJA__P Parameter: Treatment Value: 0.001percent MeJA vs. No Treatment
  misc_feature: MA Experiment ID: 20000438 Result: Down-regulated in Transcription
  misc_feature: MA Experiment 20000438 PARAMETER Experiment Name: At_Shoots__P Parameter: Age (day) Value: 14
  misc_feature: MA Experiment 20000438 PARAMETER Experiment Name: At_Shoots__P Parameter: Tissue Value: Shoots vs. Whole Plant
  misc_feature: MA Experiment ID: 20000527 Result: Up-regulated in Transcription
  misc_feature: MA Experiment 20000527 PARAMETER Experiment Name: At_10percent_PEG_P Parameter: Age (day) Value: 20
  misc_feature: MA Experiment 20000527 PARAMETER Experiment Name: At_10percent_PEG_P Parameter: Organism Value: A. thaliana
  misc_feature: MA Experiment 20000527 PARAMETER Experiment Name: At_10percent_PEG_P Parameter: Plant Line Value: WS
  misc_feature: MA Experiment 20000527 PARAMETER Experiment Name: At_10percent_PEG_P Parameter: Timepoint (day) Value: 20
  misc_feature: MA Experiment 20000527 PARAMETER Experiment Name: At_10percent_PEG_P Parameter: Tissue Value: Whole Plant
  misc_feature: MA Experiment 20000527 PARAMETER Experiment Name: At_10percent_PEG_P Parameter: Treatment Value: 10percent PEG vs. No Treatment
  misc_feature: MA Experiment ID: 20000573 Result: Up-regulated in Transcription
  misc_feature: MA Experiment 20000573 PARAMETER Experiment Name: At_100uM_ABA_Mutants__P Parameter: Organism Value: A. thaliana
  misc_feature: MA Experiment 20000573 PARAMETER Experiment Name: At_100uM_ABA_Mutants__P Parameter: Plant Line Value: CS22 vs. Ler wt
  misc_feature: MA Experiment 20000573 PARAMETER Experiment Name: At_100uM_ABA_Mutants__P Parameter: Timepoint (hr) Value: N/A
  misc_feature: MA Experiment 20000573 PARAMETER Experiment Name: At_100uM_ABA_Mutants__P Parameter: Tissue Value: Whole Plant
  misc_feature: MA Experiment 20000573 PARAMETER Experiment Name: At_100uM_ABA_Mutants__P Parameter: Treatment Value: None
  misc_feature: MA Experiment ID: 20000574 Result: Up-regulated in Transcription
  misc_feature: MA Experiment 20000574 PARAMETER Experiment Name: At_100uM_ABA_Mutants__P Parameter: Organism Value: A. thaliana
  misc_feature: MA Experiment 20000574 PARAMETER Experiment Name: At_100uM_ABA_Mutants__P Parameter: Plant Line Value: CS23 vs. Ler wt
  misc_feature: MA Experiment 20000574 PARAMETER Experiment Name: At_100uM_ABA_Mutants__P Parameter: Timepoint (hr) Value: N/A
  misc_feature: MA Experiment 20000574 PARAMETER Experiment Name: At_100uM_ABA_Mutants__P Parameter: Tissue Value: Whole Plant
  misc_feature: MA Experiment 20000574 PARAMETER Experiment Name: At_100uM_ABA_Mutants__P Parameter: Treatment Value: None
  misc_feature: MA Experiment ID: 20000575 Result: Down-regulated in Transcription
  misc_feature: MA Experiment 20000575 PARAMETER Experiment Name: At_100uM_ABA_Mutants__P Parameter: Organism Value: A. thaliana
  misc_feature: MA Experiment 20000575 PARAMETER Experiment Name: At_100uM_ABA_Mutants__P Parameter: Plant Line Value: CS22
  misc_feature: MA Experiment 20000575 PARAMETER Experiment Name: At_100uM_ABA_Mutants__P Parameter: Timepoint (hr) Value: 6
  misc_feature: MA Experiment 20000575 PARAMETER Experiment Name: At_100uM_ABA_Mutants__P Parameter: Tissue Value: Whole Plant
  misc_feature: MA Experiment 20000575 PARAMETER Experiment Name: At_100uM_ABA_Mutants__P Parameter: Treatment Value: 1uM ABA vs. No Treatment
  misc_feature: MA Experiment ID: 20000576 Result: Down-regulated in Transcription
  misc_feature: MA Experiment 20000576 PARAMETER Experiment Name: At_100uM_ABA_Mutants__P Parameter: Organism Value: A. thaliana
  misc_feature: MA Experiment 20000576 PARAMETER Experiment Name: At_100uM_ABA_Mutants__P Parameter: Plant Line Value: CS23
  misc_feature: MA Experiment 20000576 PARAMETER Experiment Name: At_100uM_ABA_Mutants__P Parameter: Timepoint (hr) Value: 6
  misc_feature: MA Experiment 20000576 PARAMETER Experiment Name: At_100uM_ABA_Mutants__P Parameter: Tissue Value: Whole Plant
  misc_feature: MA Experiment 20000576 PARAMETER Experiment Name: At_100uM_ABA_Mutants__P Parameter: Treatment Value: 1uM ABA vs. No Treatment
  misc_feature: MA Experiment ID: 20000709 Result: Up-regulated in Transcription
  misc_feature: MA Experiment 20000709 PARAMETER Experiment Name: At_15mM_NH4NO3_L-to-H_P Parameter: Age (hr) Value: 14
  misc_feature: MA Experiment 20000709 PARAMETER Experiment Name: At_15mM_NH4NO3_L-to-H_P Parameter: Organism Value: A. thaliana
  misc_feature: MA Experiment 20000709 PARAMETER Experiment Name: At_15mM_NH4NO3_L-to-H_P Parameter: Plant Line Value: WS
  misc_feature: MA Experiment 20000709 PARAMETER Experiment Name: At_15mM_NH4NO3_L-to-H_P Parameter: Timepoint (hr) Value: 4
  misc_feature: MA Experiment 20000709 PARAMETER Experiment Name: At_15mM_NH4NO3_L-to-H_P Parameter: Tissue Value: Aerial
  misc_feature: MA Experiment 20000709 PARAMETER Experiment Name: At_15mM_NH4NO3_L-to-H_P Parameter: Treatment Value: 15mM NH4NO3 vs. 30mM Mannitol
  misc_feature: MA Experiment ID: 20001248 Result: Up-regulated in Transcription
  misc_feature: MA Experiment 20001248 PARAMETER Experiment Name: At_Far-red-induction_P Parameter: Age (day) Value: 7
  misc_feature: MA Experiment 20001248 PARAMETER Experiment Name: At_Far-red-induction_P Parameter: Light Value: Far-red vs. White
  misc_feature: MA Experiment 20001248 PARAMETER Experiment Name: At_Far-red-induction_P Parameter: Organism Value: A. thaliana
  misc_feature: MA Experiment 20001248 PARAMETER Experiment Name: At_Far-red-induction_P Parameter: Plant Line Value: Columbia
  misc_feature: MA Experiment 20001248 PARAMETER Experiment Name: At_Far-red-induction_P Parameter: Timepoint (hr) Value: 4
  misc_feature: MA Experiment 20001248 PARAMETER Experiment Name: At_Far-red-induction_P Parameter: Tissue Value: Whole Plant
  misc_feature: MA Experiment ID: 20001450 Result: Down-regulated in Transcription
  misc_feature: MA Experiment 20001450 PARAMETER Experiment Name: At_Far-red-induction_P Parameter: Age (day) Value: 7
  misc_feature: MA Experiment 20001450 PARAMETER Experiment Name: At_Far-red-induction_P Parameter: Light Value: Far-red vs. White
  misc_feature: MA Experiment 20001450 PARAMETER Experiment Name: At_Far-red-induction_P Parameter: Organism Value: A. thaliana
  misc_feature: MA Experiment 20001450 PARAMETER Experiment Name: At_Far-red-induction_P Parameter: Plant Line Value: Columbia
  misc_feature: MA Experiment 20001450 PARAMETER Experiment Name: At_Far-red-induction_P Parameter: Timepoint (hr) Value: 8
  misc_feature: MA Experiment 20001450 PARAMETER Experiment Name: At_Far-red-induction_P Parameter: Tissue Value: Whole Plant
  misc_feature: MA Experiment ID: 20001451 Result: Down-regulated in Transcription
  misc_feature: MA Experiment 20001451 PARAMETER Experiment Name: At_Far-red-induction_P Parameter: Age (day) Value: 7
  misc_feature: MA Experiment 20001451 PARAMETER Experiment Name: At_Far-red-induction_P Parameter: Light Value: Far-red vs. White
  misc_feature: MA Experiment 20001451 PARAMETER Experiment Name: At_Far-red-induction_P Parameter: Organism Value: A. thaliana
  misc_feature: MA Experiment 20001451 PARAMETER Experiment Name: At_Far-red-induction_P Parameter: Plant Line Value: Columbia
  misc_feature: MA Experiment 20001451 PARAMETER Experiment Name: At_Far-red-induction_P Parameter: Timepoint (hr) Value: 24
  misc_feature: MA Experiment 20001451 PARAMETER Experiment Name: At_Far-red-induction_P Parameter: Tissue Value: Whole Plant
  misc_feature: MA Experiment ID: 20001770 Result: Up-regulated in Transcription
  misc_feature: MA Experiment 20001770 PARAMETER Experiment Name: At_Far-red-enriched-adult_P Parameter: Age (day) Value: 28
  misc_feature: MA Experiment 20001770 PARAMETER Experiment Name: At_Far-red-enriched-adult_P Parameter: Light Value: Far-red enriched vs. White
  misc_feature: MA Experiment 20001770 PARAMETER Experiment Name: At_Far-red-enriched-adult_P Parameter: Organism Value: A. thaliana
  misc_feature: MA Experiment 20001770 PARAMETER Experiment Name: At_Far-red-enriched-adult_P Parameter: Plant Line Value: Columbia
  misc_feature: MA Experiment 20001770 PARAMETER Experiment Name: At_Far-red-enriched-adult_P Parameter: Timepoint (hr) Value: 8
  misc_feature: MA Experiment 20001770 PARAMETER Experiment Name: At_Far-red-enriched-adult_P Parameter: Tissue Value: Aerial
  misc_feature: MA Experiment ID: 20001904 Result: Down-regulated in Transcription
  misc_feature: MA Experiment 20001904 PARAMETER Experiment Name: At_Drought_Reproduction_P Parameter: Age (day) Value: 37
  misc_feature: MA Experiment 20001904 PARAMETER Experiment Name: At_Drought_Reproduction_P Parameter: Organism Value: A. thaliana
  misc_feature: MA Experiment 20001904 PARAMETER Experiment Name: At_Drought_Reproduction_P Parameter: Plant Line Value: WS
  misc_feature: MA Experiment 20001904 PARAMETER Experiment Name: At_Drought_Reproduction_P Parameter: Timepoint (day) Value: 7
  misc_feature: MA Experiment 20001904 PARAMETER Experiment Name: At_Drought_Reproduction_P Parameter: Tissue Value: Rosettes
  misc_feature: MA Experiment 20001904 PARAMETER Experiment Name: At_Drought_Reproduction_P Parameter: Treatment Value: Drought vs. No Drought
atggtaatatatcatcgcaaagtagtctttacgtacgtaagagcaaagcgtttctatcatttccttaatattgaaatggtgacagacttcaaatccctactaccagttatcgacatcagtcctttactggccaaatgtgatgatttcgacatggctgaggatgcgggggttgtggaagtagtcggaaaactggacagggcatgtcgggacgtcggattcttctacgtgattggtcatggaatatcggatgatcttataaataaggtgaaagagatgacgcatcagttcttcgagcttccttacgaggagaaacttaagatcaagattactccaactgctggatacagaggataccaaagaattggagtaaattttacgagtgggaaacaagatatgcacgaagccattgattgttacagagagttcaagcaagggaaacatggggacatcggaaaggtcttggaagggccaaaccagtggccaggaaatcctcaagagtacaaagatttaatggagaagtatattaagctgtgcacagatctttctagaaatatcttaaggggaatctcattagcccttggtggatcaccttatgagtttgagggaaagatgcttagagaccctttttgggtaatgcgtatcattggttatccaggtgtaaaccaagaaaatgttattggatgtggagctcacactgactatggcttgttgacgcttataaatcaagatgatgataaaactgctcttcaggtgaaaaacgtggacggtgattggataccagctattccgatccctggatcatttatctgcaacatcggtgacatgttaacgatactatcaaacggagtttaccaatccacactacataaagtaatcaataactctcctaaataccgtgtatgtgttgcatttttctacgagactaacttcgaggcggaggtagagccacttgatatctttaaagagaagcatccacgaaaagaaacatctcaagttgccaaaagagtcgtctatggacagcatctgattaacaaagtcctgacaacctttgcaaatttagtggaaaacagttaatatggttgatgggctttggatggtaattgttttacctaagcatggatttcgagttttagtaaaataaaagaagttctaggcgacaataaaaataaatgaagaagaaattgtaatttggtttctaatattaataaaactacaggtttgttt

SEQ ID NO: 101499 - protein, 357 aa, Arabidopsis thaliana
  peptide (1)..(357): Ceres Seq. ID no. 13608028
  misc_feature (208)..(308): Pfam Name: 2OG-Fe(II) oxygenase superfamily Pfam Description: 2OG-Fe(II) oxygenase superfamily
  misc_feature (1)..(357): Homolog of NCBI NO: 22331716 NR Description: oxidoreductase (din11), putative [Arabidopsis >gi|24030245|gb|AAN41298.1| unknown protein [Arabidopsis
  misc_feature (3)..(357): Homolog of NCBI NO: 19423910 NR Description: unknown protein [Arabidopsis thaliana]
  misc_feature (26)..(357): Homolog of NCBI NO: 11255891 NR Description: hypothetical protein T9C5.210 - Arabidopsis >gi|6561962|emb|CAB62466.1| putative protein [Arabidopsis
  misc_feature (22)..(357): Homolog of NCBI NO: 15229181 NR Description: oxidoreductase (din11), putative [Arabidopsis
  misc_feature (26)..(351): Homolog of NCBI NO: 18409039 NR Description: oxidoreductase (din11), putative [Arabidopsis
  misc_feature (26)..(351): Homolog of NCBI NO: 21554579 NR Description: flavonol synthase-like protein [Arabidopsis
  misc_feature (26)..(351): Homolog of NCBI NO: 11255902 NR Description: flavonol synthase-like protein - Arabidopsis
  misc_feature (26)..(350): Homolog of NCBI NO: 6984228 NR Description: putative flavonol synthase-like protein
  misc_feature (1)..(148): Homolog of NCBI NO: 10834554 NR Description: 2-oxoacid-dependent oxidase [Arabidopsis thaliana]
  misc_feature (23)..(319): Homolog of NCBI NO: 23130050 NR Description: hypothetical protein [Nostoc punctiforme]
MVIYHRKVVFTYVRAKRFYHFLNIEMVTDFKSLLPVIDISPLLAKCDDFDMAEDAGVVEVVGKLDRACRDVGFFYVIGHGISDDLINKVKEMTHQFFELPYEEKLKIKITPTAGYRGYQRIGVNFTSGKQDMHEAIDCYREFKQGKHGDIGKVLEGPNQWPGNPQEYKDLMEKYIKLCTDLSRNILRGISLALGGSPYEFEGKMLRDPFWVMRIIGYPGVNQENVIGCGAHTDYGLLTLINQDDDKTALQVKNVDGDWIPAIPIPGSFICNIGDMLTILSNGVYQSTLHKVINNSPKYRVCVAFFYETNFEAEVEPLDIFKEKHPRKETSQVAKRVVYGQHLINKVLTTFANLVENS

SEQ ID NO: 101500 - protein, 332 aa, Arabidopsis thaliana; identical to SEQ ID NO: 86804
  peptide (1)..(332): Ceres Seq. ID no. 13608029
  misc_feature (183)..(283): Pfam Name: 2OG-Fe(II) oxygenase superfamily Pfam Description: 2OG-Fe(II) oxygenase superfamily
  misc_feature (1)..(332): Homolog of NCBI NO: 22331716 NR Description: oxidoreductase (din11), putative [Arabidopsis >gi|24030245|gb|AAN41298.1| unknown protein [Arabidopsis
  misc_feature (1)..(332): Homolog of NCBI NO: 19423910 NR Description: unknown protein [Arabidopsis thaliana]
  misc_feature (1)..(332): Homolog of NCBI NO: 11255891 NR Description: hypothetical protein T9C5.210 - Arabidopsis >gi|6561962|emb|CAB62466.1| putative protein [Arabidopsis
  misc_feature (1)..(332): Homolog of NCBI NO: 15229181 NR Description: oxidoreductase (din11), putative [Arabidopsis
  misc_feature (1)..(326): Homolog of NCBI NO: 18409039 NR Description: oxidoreductase (din11), putative [Arabidopsis
  misc_feature (1)..(326): Homolog of NCBI NO: 21554579 NR Description: flavonol synthase-like protein [Arabidopsis
  misc_feature (1)..(326): Homolog of NCBI NO: 11255902 NR Description: flavonol synthase-like protein - Arabidopsis
  misc_feature (1)..(325): Homolog of NCBI NO: 6984228 NR Description: putative flavonol synthase-like protein
  misc_feature (1)..(123): Homolog of NCBI NO: 10834554 NR Description: 2-oxoacid-dependent oxidase [Arabidopsis thaliana]
  misc_feature (1)..(294): Homolog of NCBI NO: 23130050 NR Description: hypothetical protein [Nostoc punctiforme]

SEQ ID NO: 101501 - protein, 307 aa, Arabidopsis thaliana; identical to SEQ ID NO: 86805
  peptide (1)..(307): Ceres Seq. ID no. 13608030
  misc_feature (158)..(258): Pfam Name: 2OG-Fe(II) oxygenase superfamily Pfam Description: 2OG-Fe(II) oxygenase superfamily
  misc_feature (1)..(307): Homolog of NCBI NO: 22331716 NR Description: oxidoreductase (din11), putative [Arabidopsis >gi|24030245|gb|AAN41298.1| unknown protein [Arabidopsis
  misc_feature (1)..(307): Homolog of NCBI NO: 19423910 NR Description: unknown protein [Arabidopsis thaliana]
  misc_feature (1)..(307): Homolog of NCBI NO: 11255891 NR Description: hypothetical protein T9C5.210 - Arabidopsis >gi|6561962|emb|CAB62466.1| putative protein [Arabidopsis
  misc_feature (1)..(307): Homolog of NCBI NO: 15229181 NR Description: oxidoreductase (din11), putative [Arabidopsis
  misc_feature (1)..(301): Homolog of NCBI NO: 18409039 NR Description: oxidoreductase (din11), putative [Arabidopsis
  misc_feature (1)..(301): Homolog of NCBI NO: 21554579 NR Description: flavonol synthase-like protein [Arabidopsis
  misc_feature (1)..(301): Homolog of NCBI NO: 11255902 NR Description: flavonol synthase-like protein - Arabidopsis
  misc_feature (1)..(300): Homolog of NCBI NO: 6984228 NR Description: putative flavonol synthase-like protein
  misc_feature (1)..(98): Homolog of NCBI NO: 10834554 NR Description: 2-oxoacid-dependent oxidase [Arabidopsis thaliana]
  misc_feature (1)..(269): Homolog of NCBI NO: 23130050 NR Description: hypothetical protein [Nostoc punctiforme]

SEQ ID NO: 101502 - DNA, 1385 bp, Arabidopsis thaliana
  misc_feature (1)..(1385): Ceres Seq. ID no. 13608035
  misc_feature: MA Experiment ID: 108576 Result: Up-regulated in Transcription
  misc_feature: MA Experiment 108576 PARAMETER Experiment Name: At_42deg_Heat_cDNA_P Parameter: Temperature (deg C) Value: 42 vs. 22
  misc_feature: MA Experiment 108576 PARAMETER Experiment Name: At_42deg_Heat_cDNA_P Parameter: Timepoint (hr) Value: 1
  misc_feature: MA Experiment 108576 PARAMETER Experiment Name: At_42deg_Heat_cDNA_P Parameter: Tissue Value: Aerial
  misc_feature: MA Experiment ID: 108595 Result: Up-regulated in Transcription
  misc_feature: MA Experiment 108595 PARAMETER Experiment Name: At_Ler-pi_Ovule_cDNA_P Parameter: Plant Line Value: null
  misc_feature: MA Experiment ID: 20000180 Result: Up-regulated in Transcription
  misc_feature: MA Experiment 20000180 PARAMETER Experiment Name: At_Germinating_Seeds_P Parameter: Age (hr) Value: 24 vs. 0
  misc_feature: MA Experiment 20000180 PARAMETER Experiment Name: At_Germinating_Seeds_P Parameter: Tissue Value: Germinating Seeds
  misc_feature: MA Experiment ID: 20001248 Result: Down-regulated in Transcription
  misc_feature: MA Experiment 20001248 PARAMETER Experiment Name: At_Far-red-induction_P Parameter: Age (day) Value: 7
  misc_feature: MA Experiment 20001248 PARAMETER Experiment Name: At_Far-red-induction_P Parameter: Light Value: Far-red vs. White
  misc_feature: MA Experiment 20001248 PARAMETER Experiment Name: At_Far-red-induction_P Parameter: Organism Value: A. thaliana
  misc_feature: MA Experiment 20001248 PARAMETER Experiment Name: At_Far-red-induction_P Parameter: Plant Line Value: Columbia
  misc_feature: MA Experiment 20001248 PARAMETER Experiment Name: At_Far-red-induction_P Parameter: Timepoint (hr) Value: 4
  misc_feature: MA Experiment 20001248 PARAMETER Experiment Name: At_Far-red-induction_P Parameter: Tissue Value: Whole Plant
  misc_feature: MA Experiment ID: 20001911 Result: Down-regulated in Transcription
  misc_feature: MA Experiment 20001911 PARAMETER Experiment Name: At_Drought_Reproduction_P Parameter: Age (day) Value: 40
  misc_feature: MA Experiment 20001911 PARAMETER Experiment Name: At_Drought_Reproduction_P Parameter: Organism Value: A. thaliana
  misc_feature: MA Experiment 20001911 PARAMETER Experiment Name: At_Drought_Reproduction_P Parameter: Plant Line Value: WS
  misc_feature: MA Experiment 20001911 PARAMETER Experiment Name: At_Drought_Reproduction_P Parameter: Timepoint (day) Value: 10
  misc_feature: MA Experiment 20001911 PARAMETER Experiment Name: At_Drought_Reproduction_P Parameter: Tissue Value: Flowers
  misc_feature: MA Experiment 20001911 PARAMETER Experiment Name: At_Drought_Reproduction_P Parameter: Treatment Value: Drought vs. No Drought
acttcttttatctctctttctatctcacacagagtgaagaatccagagagtctctaatggcagaatgaacaaaggaattagcaatcatcttcttctcggaagagaaaaatcatggctttagaagaggaggaagagagtcaaaacgcaccgttttgtgttcttgatggtcttttctgtgaggaagagagtgagtttcacgaacaagtagatttgtgcgacgagagtgttgaaaagtttccttttttaaatctgggtttgtctgatcatgatatgttgtgggatgatgatgagttatcaactttgatttcgaaacaagaaccgtgtctttatgacgaaatcttagatgatgagtttctggttttgtgtcgtgaaaaggctcttgattggatttttaaagtgaaatctcattatgggtttaattcattgacggctcttttagctgttaattacttcgataggtttattacaagcaggaagtttcagacagataagccatggatgtctcagcttactgctttggcttgtctgtctttagctgctaaggttgaagagatccgtgttccttttctcttagattttcaagtggaagaagcaagatatgtctttgaagctaagactatacagagaatggagcttcttgttctgtctactcttgactggaggatgcatcctgtgactccaatctcgtttttcgatcacattattcgacgatacagctttaaatctcatcatcaattggagttcttgagtagatgtgaatctttattactctccattattcctgattcgagatttctgagttttagtccttctgtgttagccactgcaataatggtctctgttattagagatttgaagatgtgtgacgaagctgtataccaatctcagctcatgactctactcaaagttgattcggagaaggtaaataaatgctatgagttagtgttagaccacagtccaagcaagaaaaggatgatgaattggatgcaacaacccgctagtccgatcggtgtgtttgatgcgtcattcagttctgatagctcgaatgagtcgtgggttgtgtctgcttctgcttcagtgtcgtcttcaccatcttcagagcctttgctcaagaggagaagagtgcaagagcagcagatgaggctatcttcaataaaccgaatgtttttcgatgtgcttagtagtagtcctcgctaataatgtcaacaacccatcaaaatgtgtcggtttagttacctaaaatctgtttccatgttttacatattatcggctatatggttctcggttcttgtgtttatggacggttgcaaatggtgtacgtttcgttatttgatattctaaaaacaaagttcttttacattaaaagtttccgctggatcttacct

SEQ ID NO: 101503 - protein, 361 aa, Arabidopsis thaliana; identical to SEQ ID NO: 23301
  peptide (1)..(361): Ceres Seq. ID no. 13608036
  misc_feature (59)..(186): Pfam Name: Cyclin, N-terminal domain Pfam Description: Cyclin, N-terminal domain
  misc_feature (1)..(361): Homolog of NCBI NO: 15229665 NR Description: cyclin family [Arabidopsis thaliana]
  misc_feature (1)..(361): Homolog of NCBI NO: 15240257 NR Description: cyclin family [Arabidopsis thaliana]
  misc_feature (3)..(358): Homolog of NCBI NO: 29374148 NR Description: cyclin D [Populus alba]
  misc_feature (16)..(358): Homolog of NCBI NO: 33517432 NR Description: cyclin D3-2 [Euphorbia esula]
  misc_feature (5)..(361): Homolog of NCBI NO: 4586801 NR Description: NtcycD3-1 [Nicotiana tabacum]
  misc_feature (1)..(358): Homolog of NCBI NO: 4160300 NR Description: cyclin D3.1 protein [Nicotiana tabacum]
  misc_feature (16)..(361): Homolog of NCBI NO: 4160302 NR Description: cyclin D3.2 protein [Nicotiana tabacum]
  misc_feature (1)..(358): Homolog of NCBI NO: 6434199 NR Description: CycD3;2 [Lycopersicon esculentum]
  misc_feature (1)..(348): Homolog of NCBI NO: 5679622 NR Description: cyclin D3.1 [Lycopersicon esculentum]
  misc_feature (43)..(337): Homolog of NCBI NO: 6448484 NR Description: cyclin D3b [Antirrhinum majus]

SEQ ID NO: 101504 - protein, 308 aa, Arabidopsis thaliana; identical to SEQ ID NO: 23302
  peptide (1)..(308): Ceres Seq. ID no. 13608037
  misc_feature (6)..(133): Pfam Name: Cyclin, N-terminal domain Pfam Description: Cyclin, N-terminal domain
  misc_feature (1)..(308): Homolog of NCBI NO: 15229665 NR Description: cyclin family [Arabidopsis thaliana]
  misc_feature (1)..(308): Homolog of NCBI NO: 15240257 NR Description: cyclin family [Arabidopsis thaliana]
  misc_feature (1)..(305): Homolog of NCBI NO: 29374148 NR Description: cyclin D [Populus alba]
  misc_feature (1)..(305): Homolog of NCBI NO: 33517432 NR Description: cyclin D3-2 [Euphorbia esula]
  misc_feature (1)..(308): Homolog of NCBI NO: 4586801 NR Description: NtcycD3-1 [Nicotiana tabacum]
  misc_feature (1)..(305): Homolog of NCBI NO: 4160300 NR Description: cyclin D3.1 protein [Nicotiana tabacum]
  misc_feature (1)..(308): Homolog of NCBI NO: 4160302 NR Description: cyclin D3.2 protein [Nicotiana tabacum]
  misc_feature (1)..(305): Homolog of NCBI NO: 6434199 NR Description: CycD3;2 [Lycopersicon esculentum]
  misc_feature (1)..(295): Homolog of NCBI NO: 5679622 NR Description: cyclin D3.1 [Lycopersicon esculentum]
  misc_feature (1)..(284): Homolog of NCBI NO: 6448484 NR Description: cyclin D3b [Antirrhinum majus]

SEQ ID NO: 101505 - protein, 232 aa, Arabidopsis thaliana; identical to SEQ ID NO: 23303
  peptide (1)..(232): Ceres Seq. ID no. 13608038
  misc_feature (1)..(57): Pfam Name: Cyclin, N-terminal domain Pfam Description: Cyclin, N-terminal domain
  misc_feature (1)..(232): Homolog of NCBI NO: 15229665 NR Description: cyclin family [Arabidopsis thaliana]
  misc_feature (1)..(232): Homolog of NCBI NO: 15240257 NR Description: cyclin family [Arabidopsis thaliana]
  misc_feature (1)..(229): Homolog of NCBI NO: 29374148 NR Description: cyclin D [Populus alba]
  misc_feature (1)..(229): Homolog of NCBI NO: 33517432 NR Description: cyclin D3-2 [Euphorbia esula]
  misc_feature (1)..(232): Homolog of NCBI NO: 4586801 NR Description: NtcycD3-1 [Nicotiana tabacum]
  misc_feature (1)..(229): Homolog of NCBI NO: 4160300 NR Description: cyclin D3.1 protein [Nicotiana tabacum]
  misc_feature (1)..(232): Homolog of NCBI NO: 4160302 NR Description: cyclin D3.2 protein [Nicotiana tabacum]
  misc_feature (1)..(229): Homolog of NCBI NO: 6434199 NR Description: CycD3;2 [Lycopersicon esculentum]
  misc_feature (1)..(219): Homolog of NCBI NO: 5679622 NR Description: cyclin D3.1 [Lycopersicon esculentum]
  misc_feature (1)..(208): Homolog of NCBI NO: 6448484 NR Description: cyclin D3b [Antirrhinum majus]

SEQ ID NO: 101506 - DNA, 1158 bp, Arabidopsis thaliana
  misc_feature (1)..(1158): Ceres Seq. ID no. 13608043
  misc_feature: MA Experiment ID: 108434 Result: Down-regulated in Transcription
  misc_feature: MA Experiment 108434 PARAMETER Experiment Name: At_Root_Tips_cDNA_P Parameter: Tissue Value: Root Tips
  misc_feature: MA Experiment ID: 108435 Result: Down-regulated in Transcription
  misc_feature: MA Experiment 108435 PARAMETER Experiment Name: At_stm_Mutants_cDNA_P Parameter: Plant Line Value: wt Landsburg vs stm
  misc_feature: MA Experiment 108435 PARAMETER Experiment Name: At_stm_Mutants_cDNA_P Parameter: Tissue Value: Shoot Apical Meristem Region
  misc_feature: MA Experiment ID: 108461 Result: Up-regulated in Transcription
  misc_feature: MA Experiment 108461 PARAMETER Experiment Name: At_Germinating_Seeds_cDNA_P Parameter: Age (day) Value: 1 vs. 0
  misc_feature: MA Experiment 108461 PARAMETER Experiment Name: At_Germinating_Seeds_cDNA_P Parameter: Tissue Value: Germinating Seeds
  misc_feature: MA Experiment ID: 108462 Result: Up-regulated in Transcription
  misc_feature: MA Experiment 108462 PARAMETER Experiment Name: At_Germinating_Seeds_cDNA_P Parameter: Age (day) Value: 2 vs. 0
  misc_feature: MA Experiment 108462 PARAMETER Experiment Name: At_Germinating_Seeds_cDNA_P Parameter: Tissue Value: Germinating Seeds
  misc_feature: MA Experiment ID: 108464 Result: Up-regulated in Transcription
  misc_feature: MA Experiment 108464 PARAMETER Experiment Name: At_Germinating_Seeds_cDNA_P Parameter: Age (day) Value: 4 vs. 0
  misc_feature: MA Experiment 108464 PARAMETER Experiment Name: At_Germinating_Seeds_cDNA_P Parameter: Tissue Value: Germinating Seeds
  misc_feature: MA Experiment ID: 108488 Result: Up-regulated in Transcription
  misc_feature: MA Experiment ID: 108595 Result: Down-regulated in Transcription
  misc_feature: MA Experiment 108595 PARAMETER Experiment Name: At_Ler-pi_Ovule_cDNA_P Parameter: Plant Line Value: null
  misc_feature: MA Experiment ID: 20000180 Result: Up-regulated in Transcription
  misc_feature: MA Experiment 20000180 PARAMETER Experiment Name: At_Germinating_Seeds_P Parameter: Age (hr) Value: 24 vs. 0
  misc_feature: MA Experiment 20000180 PARAMETER Experiment Name: At_Germinating_Seeds_P Parameter: Tissue Value: Germinating Seeds
  misc_feature: MA Experiment ID: 20000184 Result: Up-regulated in Transcription
  misc_feature: MA Experiment 20000184 PARAMETER Experiment Name: At_Shoots__P Parameter: Age (day) Value: 7
  misc_feature: MA Experiment 20000184 PARAMETER Experiment Name: At_Shoots__P Parameter: Tissue Value: Shoots vs. Whole Plant
  misc_feature: MA Experiment ID: 20000185 Result: Down-regulated in Transcription
  misc_feature: MA Experiment 20000185 PARAMETER Experiment Name: At_Roots__P Parameter: Age (day) Value: 7 vs. 21
  misc_feature: MA Experiment 20000185 PARAMETER Experiment Name: At_Roots__P Parameter: Organism Value: A. thaliana
  misc_feature: MA Experiment 20000185 PARAMETER Experiment Name: At_Roots__P Parameter: Tissue Value: Roots vs. Whole Plant
  misc_feature: MA Experiment ID: 20000227 Result: Down-regulated in Transcription
  misc_feature: MA Experiment 20000227 PARAMETER Experiment Name: At_Root-Tips-vs-Tops_P Parameter: Tissue Value: Root Tips vs. Root Tops
  misc_feature: MA Experiment ID: 20000264 Result: Down-regulated in Transcription
  misc_feature: MA Experiment 20000264 PARAMETER Experiment Name: At_Open_Flower_P Parameter: Age (day) Value: 21
  misc_feature: MA Experiment 20000264 PARAMETER Experiment Name: At_Open_Flower_P Parameter: Plant Line Value: WS
  misc_feature: MA Experiment 20000264 PARAMETER Experiment Name: At_Open_Flower_P Parameter: Tissue Value: Open Flower vs. Whole Plant
  misc_feature: MA Experiment ID: 20000265 Result: Down-regulated in Transcription
  misc_feature: MA Experiment 20000265 PARAMETER Experiment Name: At_Open_Flower_P Parameter: Age (day) Value: 21
  misc_feature: MA Experiment 20000265 PARAMETER Experiment Name: At_Open_Flower_P Parameter: Plant Line Value: WS
  misc_feature: MA Experiment 20000265 PARAMETER Experiment Name: At_Open_Flower_P Parameter: Tissue Value: Closed Flower vs. Whole Plant
  misc_feature: MA Experiment ID: 20000286 Result: Down-regulated in Transcription
  misc_feature: MA Experiment 20000286 PARAMETER Experiment Name: At_Open_Flower_P Parameter: Age (day) Value: 21
  misc_feature: MA Experiment 20000286 PARAMETER Experiment Name: At_Open_Flower_P Parameter: Plant Line Value: WS
  misc_feature: MA Experiment 20000286 PARAMETER Experiment Name: At_Open_Flower_P Parameter: Tissue Value: Half Open vs. Whole Plant
  misc_feature: MA Experiment ID: 20000438 Result: Up-regulated in Transcription
  misc_feature: MA Experiment 20000438 PARAMETER Experiment Name: At_Shoots__P Parameter: Age (day) Value: 14
  misc_feature: MA Experiment 20000438 PARAMETER Experiment Name: At_Shoots__P Parameter: Tissue Value: Shoots vs. Whole Plant
  misc_feature: MA Experiment ID: 20000439 Result: Down-regulated in Transcription
  misc_feature: MA Experiment 20000439 PARAMETER Experiment Name: At_Roots__P Parameter: Age (day) Value: 14 vs. 21
  misc_feature: MA Experiment 20000439 PARAMETER Experiment Name: At_Roots__P Parameter: Organism Value: A. thaliana
  misc_feature: MA Experiment 20000439 PARAMETER Experiment Name: At_Roots__P Parameter: Tissue Value: Roots vs. Whole Plant
  misc_feature: MA Experiment ID: 20000495 Result: Down-regulated in Transcription
  misc_feature: MA Experiment 20000495 PARAMETER Experiment Name: At_Guard_Cells_P Parameter: Harvest Date Value: 8/2/2002
  misc_feature: MA Experiment 20000495 PARAMETER Experiment Name: At_Guard_Cells_P Parameter: Organism Value: A. thaliana
  misc_feature: MA Experiment 20000495 PARAMETER Experiment Name: At_Guard_Cells_P Parameter: Tissue Value: Guard Cells vs. Leaves
  misc_feature: MA Experiment ID: 20000496 Result: Down-regulated in Transcription
  misc_feature: MA Experiment 20000496 PARAMETER Experiment Name: At_Guard_Cells_P Parameter: Harvest Date Value: 7/19/2002
  misc_feature: MA Experiment 20000496 PARAMETER Experiment Name: At_Guard_Cells_P Parameter: Organism Value: Canola
  misc_feature: MA Experiment 20000496 PARAMETER Experiment Name: At_Guard_Cells_P Parameter: Tissue Value: Guard Cells vs. Leaves
  misc_feature: MA Experiment ID: 20000794 Result: Down-regulated in Transcription
  misc_feature: MA Experiment 20000794 PARAMETER Experiment Name: At_Petals_P Parameter: Age (day) Value: 23-25 days
  misc_feature: MA Experiment 20000794 PARAMETER Experiment Name: At_Petals_P Parameter: Plant Line Value: WS
  misc_feature: MA Experiment 20000794 PARAMETER Experiment Name: At_Petals_P Parameter: Tissue Value: Petals vs. Whole plant
  misc_feature: MA Experiment ID: 20001451 Result: Down-regulated in Transcription
  misc_feature: MA Experiment 20001451 PARAMETER Experiment Name: At_Far-red-induction_P Parameter: Age (day) Value: 7
  misc_feature: MA Experiment 20001451 PARAMETER Experiment Name: At_Far-red-induction_P Parameter: Light Value: Far-red vs. White
  misc_feature: MA Experiment 20001451 PARAMETER Experiment Name: At_Far-red-induction_P Parameter: Organism Value: A. thaliana
  misc_feature: MA Experiment 20001451 PARAMETER Experiment Name: At_Far-red-induction_P Parameter: Plant Line Value: Columbia
  misc_feature: MA Experiment 20001451 PARAMETER Experiment Name: At_Far-red-induction_P Parameter: Timepoint (hr) Value: 24
  misc_feature: MA Experiment 20001451 PARAMETER Experiment Name: At_Far-red-induction_P Parameter: Tissue Value: Whole Plant
  misc_feature: MA Experiment ID: 20001557 Result: Down-regulated in Transcription
  misc_feature: MA Experiment 20001557 PARAMETER Experiment Name: At_Drought_Soil_Dry_P Parameter: Age (day) Value: 27
  misc_feature: MA Experiment 20001557 PARAMETER Experiment Name: At_Drought_Soil_Dry_P Parameter: Organism Value: A. thaliana
  misc_feature: MA Experiment 20001557 PARAMETER Experiment Name: At_Drought_Soil_Dry_P Parameter: Plant Line Value: WS
  misc_feature: MA Experiment 20001557 PARAMETER Experiment Name: At_Drought_Soil_Dry_P Parameter: Post Timepoint (hr) Value: 3
  misc_feature: MA Experiment 20001557 PARAMETER Experiment Name: At_Drought_Soil_Dry_P Parameter: Post-Treatment Value: Re-Water vs. No Drought
  misc_feature: MA Experiment 20001557 PARAMETER Experiment Name: At_Drought_Soil_Dry_P Parameter: Timepoint (day) Value: 13
  misc_feature: MA Experiment 20001557 PARAMETER Experiment Name: At_Drought_Soil_Dry_P Parameter: Treatment Value: Drought vs. No Drought
  misc_feature: MA Experiment ID: 20001560 Result: Down-regulated in Transcription
  misc_feature: MA Experiment 20001560 PARAMETER Experiment Name: At_Drought_Soil_Dry_P Parameter: Age (day) Value: 28
  misc_feature: MA Experiment 20001560 PARAMETER Experiment Name: At_Drought_Soil_Dry_P Parameter: Organism Value: A. thaliana
  misc_feature: MA Experiment 20001560 PARAMETER Experiment Name: At_Drought_Soil_Dry_P Parameter: Plant Line Value: WS
  misc_feature: MA Experiment 20001560 PARAMETER Experiment Name: At_Drought_Soil_Dry_P Parameter: Post Timepoint (hr) Value: None
  misc_feature: MA Experiment 20001560 PARAMETER Experiment Name: At_Drought_Soil_Dry_P Parameter: Post-Treatment Value: None
  misc_feature: MA Experiment 20001560 PARAMETER Experiment Name: At_Drought_Soil_Dry_P Parameter: Timepoint (day) Value: 14
  misc_feature: MA Experiment 20001560 PARAMETER Experiment Name: At_Drought_Soil_Dry_P Parameter: Treatment Value: Drought vs. No Drought
  misc_feature: MA Experiment ID: 20001757 Result: Up-regulated in Transcription
  misc_feature: MA Experiment 20001757 PARAMETER Experiment Name: At_50mM_NH4NO3_L-to-H_P Parameter: Timepoint (hr) Value: 6
  misc_feature: MA Experiment 20001757 PARAMETER Experiment Name: At_50mM_NH4NO3_L-to-H_P Parameter: Tissue Value: Leaf
  misc_feature: MA Experiment 20001757 PARAMETER Experiment Name: At_50mM_NH4NO3_L-to-H_P Parameter: Treatment Value: 50mM NH4NO3 vs 100mM Mannitol
  misc_feature: MA Experiment ID: 20001904 Result: Down-regulated in Transcription
  misc_feature: MA Experiment 20001904 PARAMETER Experiment Name: At_Drought_Reproduction_P Parameter: Age (day) Value: 37
  misc_feature: MA Experiment 20001904 PARAMETER Experiment Name: At_Drought_Reproduction_P Parameter: Organism Value: A. thaliana
  misc_feature: MA Experiment 20001904 PARAMETER Experiment Name: At_Drought_Reproduction_P Parameter: Plant Line Value: WS
  misc_feature: MA Experiment 20001904 PARAMETER Experiment Name: At_Drought_Reproduction_P Parameter: Timepoint (day) Value: 7
  misc_feature: MA Experiment 20001904 PARAMETER Experiment Name: At_Drought_Reproduction_P Parameter: Tissue Value: Rosettes
  misc_feature: MA Experiment 20001904 PARAMETER Experiment Name: At_Drought_Reproduction_P Parameter: Treatment Value: Drought vs. No Drought
  misc_feature: MA Experiment ID: 20001905 Result: Down-regulated in Transcription
  misc_feature: MA Experiment 20001905 PARAMETER Experiment Name: At_Drought_Reproduction_P Parameter: Age (day) Value: 40
  misc_feature: MA Experiment 20001905 PARAMETER Experiment Name: At_Drought_Reproduction_P Parameter: Organism Value: A. thaliana
  misc_feature: MA Experiment 20001905 PARAMETER Experiment Name: At_Drought_Reproduction_P Parameter: Plant Line Value: WS
  misc_feature: MA Experiment 20001905 PARAMETER Experiment Name: At_Drought_Reproduction_P Parameter: Timepoint (day) Value: 10
  misc_feature: MA Experiment 20001905 PARAMETER Experiment Name: At_Drought_Reproduction_P Parameter: Tissue Value: Rosettes
  misc_feature: MA Experiment 20001905 PARAMETER Experiment Name: At_Drought_Reproduction_P Parameter: Treatment Value: Drought vs. No Drought
  misc_feature: MA Experiment ID: 20001906 Result: Down-regulated in Transcription
  misc_feature: MA Experiment 20001906 PARAMETER Experiment Name: At_Drought_Reproduction_P Parameter: Age (day) Value: 35
  misc_feature: MA Experiment 20001906 PARAMETER Experiment Name: At_Drought_Reproduction_P Parameter: Organism Value: A. thaliana
  misc_feature: MA Experiment 20001906 PARAMETER Experiment Name: At_Drought_Reproduction_P Parameter: Plant Line Value: WS
  misc_feature: MA Experiment 20001906 PARAMETER Experiment Name: At_Drought_Reproduction_P Parameter: Timepoint (day) Value: 5
  misc_feature: MA Experiment 20001906 PARAMETER Experiment Name: At_Drought_Reproduction_P Parameter: Tissue Value: Siliques
  misc_feature: MA Experiment 20001906 PARAMETER Experiment Name: At_Drought_Reproduction_P Parameter: Treatment Value: Drought vs. No Drought
  misc_feature: MA Experiment ID: 20001908 Result: Down-regulated in Transcription
  misc_feature: MA Experiment 20001908 PARAMETER Experiment Name: At_Drought_Reproduction_P Parameter: Age (day) Value: 40
  misc_feature: MA Experiment 20001908 PARAMETER Experiment Name: At_Drought_Reproduction_P Parameter: Organism Value: A. thaliana
  misc_feature: MA Experiment 20001908 PARAMETER Experiment Name: At_Drought_Reproduction_P Parameter: Plant Line Value: WS
  misc_feature: MA Experiment 20001908 PARAMETER Experiment Name: At_Drought_Reproduction_P Parameter: Timepoint (day) Value: 10
  misc_feature: MA Experiment 20001908 PARAMETER Experiment Name: At_Drought_Reproduction_P Parameter: Tissue Value: Siliques
  misc_feature: MA Experiment 20001908 PARAMETER Experiment Name: At_Drought_Reproduction_P Parameter: Treatment Value: Drought vs. No Drought
actactcaacttcgcattatcactcaaacaaacatattgacatctgagtcttgtcatcatggcaacttctctccaagccgccgcaacttttcttcaaccggcgaagattgccgcttctccttctcgtaatgtccatctccgatcaaaccaaaccgtgggcaagtcctttgggttagactcttcacaagctaggctcacgtgctctctccactctgacctcaaagacttcgctggaaaatgctccgacgccgccaagatcgccggttttgctctagccacctctgctctcgttgtctcgggggccggtgcggagggagcaccaaagaggctaacgtacgacgagatacagagcaagacttacatggaggtaaagggtaccggtacggcaaaccagtgtccaactatcgatggtggctctgagacattctcgttcaaagctggtaagtacacaggcaagaagttctgcttcgagcccacttccttcaccgtcaaggcagatagcgtcagcaagaatgcaccgccggatttccaaaacaccaagctcatgacccgtctcacttacacactcgatgagatcgaaggacccttcgaggttggttcagacggaagcgtgaagttcaaggaagaagatggtatcgattacgcagcagtcacagtccagcttccgggaggagaacgcgtgccgttcctcttcacggttaagcagctcgaggcttcagggaaacccgaaagcttcagtggcaagttcttagttccatcgtaccgtggctcgtcctttttggacccaaagggtcgtggtggatccactgggtacgataatgcagtggctttgcctgccggaggcagaggagacgaggaagagctatccaaggaaaacgtcaagaacacggcggcttccgtcggagagatcactttgaagatcacaaagagcaaaccggagacaggtgaagtgatcggagtgttcgagagtcttcagccatcggatactgacttgggtgctaaggtaccaaaagatgtgaagatccaaggggtttggtacggtcagattgagtgattcatataatttgttacttttgtaaaattgtattgaaacaacttctttctatcaatatatatatatatatattaacgctcgataaataaatatttatatcagtg

SEQ ID NO: 101507 - protein, 331 aa, Arabidopsis thaliana; identical to SEQ ID NO: 38250
  peptide (1)..(331): Ceres Seq. ID no. 13608044
  misc_feature (95)..(331): Pfam Name: Manganese-stabilising protein / photosystem II Pfam Description: Manganese-stabilising protein / photosystem II
  misc_feature (1)..(331): Homolog of NCBI NO: 15230324 NR Description: photosystem II oxygen-evolving complex 33 (OEC33)
  misc_feature (1)..(331): Homolog of NCBI NO: 21593220 NR Description: 33 kDa polypeptide of oxygen-evolving complex
  misc_feature (1)..(331): Homolog of NCBI NO: 15240013 NR Description: photosystem II oxygen-evolving complex 33 (OEC33)
  misc_feature (1)..(331): Homolog of NCBI NO: 13926291 NR Description: AT5g66570/K1F13_25 [Arabidopsis thaliana]
  misc_feature (1)..(331): Homolog of NCBI NO: 15912247 NR Description: AT5g66570/K1F13_25 [Arabidopsis thaliana]
  misc_feature (1)..(331): Homolog of NCBI NO: 22530906 NR Description: 33 kDa polypeptide of oxygen-evolving complex in photosystem II [Arabidopsis thaliana]
  misc_feature (1)..(331): Homolog of NCBI NO: 15451006 NR Description: 33 kDa polypeptide of oxygen-evolving complex
  misc_feature (1)..(331): Homolog of NCBI NO: 99745 NR Description: photosystem II oxygen-evolving complex protein 1
  misc_feature (1)..(331): Homolog of NCBI NO: 30013657 NR Description: oxygen evolving complex 33 kDa photosystem II
  misc_feature (1)..(331): Homolog of NCBI NO: 11134054 NR Description: Oxygen-evolving enhancer protein 1, chloroplast (OEE1) (33 kDa subunit of oxygen evolving system of photosystem

SEQ ID NO: 101508 - protein, 230 aa, Arabidopsis thaliana; identical to SEQ ID NO: 38251
  peptide (1)..(230): Ceres Seq. ID no. 13608045
  misc_feature (1)..(230): Pfam Name: Manganese-stabilising protein / photosystem II Pfam Description: Manganese-stabilising protein / photosystem II
  misc_feature (1)..(230): Homolog of NCBI NO: 15230324 NR Description: photosystem II oxygen-evolving complex 33 (OEC33)
  misc_feature (1)..(230): Homolog of NCBI NO: 21593220 NR Description: 33 kDa polypeptide of oxygen-evolving complex
  misc_feature (1)..(230): Homolog of NCBI NO: 15240013 NR Description: photosystem II oxygen-evolving complex 33 (OEC33)
  misc_feature (1)..(230): Homolog of NCBI NO: 13926291 NR Description: AT5g66570/K1F13_25 [Arabidopsis thaliana]
  misc_feature (1)..(230): Homolog of NCBI NO: 15912247 NR Description: AT5g66570/K1F13_25 [Arabidopsis thaliana]
  misc_feature (1)..(230): Homolog of NCBI NO: 22530906 NR Description: 33 kDa polypeptide of oxygen-evolving complex in photosystem II [Arabidopsis thaliana]
  misc_feature (1)..(230): Homolog of NCBI NO: 15451006 NR Description: 33 kDa polypeptide of oxygen-evolving complex
  misc_feature (1)..(230): Homolog of NCBI NO: 99745 NR Description: photosystem II oxygen-evolving complex protein 1
  misc_feature (1)..(230): Homolog of NCBI NO: 30013657 NR Description: oxygen evolving complex 33 kDa photosystem II
  misc_feature (1)..(230): Homolog of NCBI NO: 11134054 NR Description: Oxygen-evolving enhancer protein 1, chloroplast (OEE1) (33 kDa subunit of oxygen evolving system of photosystem

SEQ ID NO: 101509 - protein, 169 aa, Arabidopsis thaliana; identical to SEQ ID NO: 38252
  peptide (1)..(169): Ceres Seq. ID no. 13608046
  misc_feature (1)..(169): Pfam Name: Manganese-stabilising protein / photosystem II Pfam Description: Manganese-stabilising protein / photosystem II
  misc_feature (1)..(169): Homolog of NCBI NO: 15230324 NR Description: photosystem II oxygen-evolving complex 33 (OEC33)
  misc_feature (1)..(169): Homolog of NCBI NO: 21593220 NR Description: 33 kDa polypeptide of oxygen-evolving complex
  misc_feature (1)..(169): Homolog of NCBI NO: 15240013 NR Description: photosystem II oxygen-evolving complex 33 (OEC33)
  misc_feature (1)..(169): Homolog of NCBI NO: 13926291 NR Description: AT5g66570/K1F13_25 [Arabidopsis thaliana]
  misc_feature (1)..(169): Homolog of NCBI NO: 15912247 NR Description: AT5g66570/K1F13_25 [Arabidopsis thaliana]
  misc_feature (1)..(169): Homolog of NCBI NO: 22530906 NR Description: 33 kDa polypeptide of oxygen-evolving complex in photosystem II [Arabidopsis thaliana]
  misc_feature (1)..(169): Homolog of NCBI NO: 15451006 NR Description: 33 kDa polypeptide of oxygen-evolving complex
  misc_feature (1)..(169): Homolog of NCBI NO: 99745 NR Description: photosystem II oxygen-evolving complex protein 1
  misc_feature (1)..(169): Homolog of NCBI NO: 30013657 NR Description: oxygen evolving complex 33 kDa photosystem II
  misc_feature (1)..(169): Homolog of NCBI NO: 11134054 NR Description: Oxygen-evolving enhancer protein 1, chloroplast (OEE1) (33 kDa subunit of oxygen evolving system of photosystem

SEQ ID NO: 101510 - DNA, 1189 bp, Arabidopsis thaliana
  misc_feature (1)..(1189): Ceres Seq. ID no. 13608047
  misc_feature: MA Experiment ID: 108463 Result: Down-regulated in Transcription
  misc_feature: MA Experiment 108463 PARAMETER Experiment Name: At_Germinating_Seeds_cDNA_P Parameter: Age (day) Value: 3 vs. 0
  misc_feature: MA Experiment 108463 PARAMETER Experiment Name: At_Germinating_Seeds_cDNA_P Parameter: Tissue Value: Germinating Seeds
  misc_feature: MA Experiment ID: 108595 Result: Down-regulated in Transcription
  misc_feature: MA Experiment 108595 PARAMETER Experiment Name: At_Ler-pi_Ovule_cDNA_P Parameter: Plant Line Value: null
  misc_feature: MA Experiment ID: 20000227 Result: Up-regulated in Transcription
  misc_feature: MA Experiment 20000227 PARAMETER Experiment Name: At_Root-Tips-vs-Tops_P Parameter: Tissue Value: Root Tips vs. Root Tops
  misc_feature: MA Experiment ID: 20000495 Result: Up-regulated in Transcription
  misc_feature: MA Experiment 20000495 PARAMETER Experiment Name: At_Guard_Cells_P Parameter: Harvest Date Value: 8/2/2002
  misc_feature: MA Experiment 20000495 PARAMETER Experiment Name: At_Guard_Cells_P Parameter: Organism Value: A. thaliana
  misc_feature: MA Experiment 20000495 PARAMETER Experiment Name: At_Guard_Cells_P Parameter: Tissue Value: Guard Cells vs. Leaves
  misc_feature: MA Experiment ID: 20001560 Result: Up-regulated in Transcription
  misc_feature: MA Experiment 20001560 PARAMETER Experiment Name: At_Drought_Soil_Dry_P Parameter: Age (day) Value: 28
  misc_feature: MA Experiment 20001560 PARAMETER Experiment Name: At_Drought_Soil_Dry_P Parameter: Organism Value: A. thaliana
  misc_feature: MA Experiment 20001560 PARAMETER Experiment Name: At_Drought_Soil_Dry_P Parameter: Plant Line Value: WS
  misc_feature: MA Experiment 20001560 PARAMETER Experiment Name: At_Drought_Soil_Dry_P Parameter: Post Timepoint (hr) Value: None
  misc_feature: MA Experiment 20001560 PARAMETER Experiment Name: At_Drought_Soil_Dry_P Parameter: Post-Treatment Value: None
  misc_feature: MA Experiment 20001560 PARAMETER Experiment Name: At_Drought_Soil_Dry_P Parameter: Timepoint (day) Value: 14
  misc_feature: MA Experiment 20001560 PARAMETER Experiment Name: At_Drought_Soil_Dry_P Parameter: Treatment Value: Drought vs. No Drought
ctttcgtgtatggttccgggaaggaaaaggggaagtggattgttttcatcggcgataagtctcttctcctctgggattgaggttggtggtgtgaggtaaagcttcggtagttagagatgaatgcgtccggcttaactgttactccgcccagatttcactttcgatggcgttctgatcgttttggtacatctcagagaagctctcaagcttttactgttcttagcaaattgaataatcgaaattccgcttggcctgttcttaaaagttctcgtttggcgcttcctacacaaagaagaaatgctatgatcactcgtgccatgagtgcttcctttggtgatatggcagacgattcagctgctatcttccctcggatcaatgtcaaagacccatataaacggcttgggataagccggatggcctcagaggatgagattcaaggagcgaggaactttctcattcagcaatacgcagggcacaaacccagtgttgatgcaatcgaatcagctcatgacaagattatcatgcagaagtttcatgagaggaaaaaccccaagattgacatatcgaaaaaggttcgccaagtgaggcagtccaaagttgtcaactttgttttcgagagattccaaactcctcccaatgcagtccttgtcaaaacagcagtcacgtttgcagttcttggcgttctaaccgttctgttcccgacagaagaaggaccgaccttgcaggttttgttatcactaatagctaccttttacttcatccaccaaaggctccagaagaagctctggactttcctttacggagcgggagctttcatcttctcgtggctggttgggactttcttgatggtatctgtgatcccaccgttcatcaaaggaccaagaggttttgaagtcatgtcttcgctcctaagctatgttttgctttgggtcgcttcgagttacctccggtagcgtgctagcttttttcttttccccgtcttttgggccagaaattcaagtgttatctcggatatatgaaaacacacgaacagagaaaaaatgcatcattttcatgtgacagagagagagagagagagagagatatgatttgtggtcttggagttgttatttcacggagacctcattaactttcaaagctcagtttccaagttgtggctacaaacaaagaatagtaagagttgattacg

SEQ ID NO: 101511 - protein, 278 aa, Arabidopsis thaliana; identical to SEQ ID NO: 37129
  peptide (1)..(278): Ceres Seq. ID no. 13608048
  misc_feature (1)..(278): Homolog of NCBI NO: 18409276 NR Description: expressed protein [Arabidopsis thaliana] unknown protein [Arabidopsis thaliana] unknown protein [Arabidopsis thaliana]
  misc_feature (47)..(278): Homolog of NCBI NO: 11357625 NR Description: hypothetical protein F24M12.180 - Arabidopsis >gi|6562266|emb|CAB62636.1| putative protein [Arabidopsis
  misc_feature (47)..(278): Homolog of NCBI NO: 15237199 NR Description: expressed protein [Arabidopsis thaliana] emb|CAB62636.1~gene_id:MYJ24.3~similar to unknown protein thaliana] >gi|21928168|gb|AAM78111.1| AT5g23040/MYJ24_3
  misc_feature (89)..(278): Homolog of NCBI NO: 17230751 NR Description: hypothetical protein [Nostoc sp. PCC 7120]
  misc_feature (89)..(278): Homolog of NCBI NO: 23129945 NR Description: hypothetical protein [Nostoc punctiforme]
  misc_feature (83)..(278): Homolog of NCBI NO: 16329734 NR Description: unknown protein [Synechocystis sp. PCC 6803]
  misc_feature (169)..(278): Homolog of NCBI NO: 37573058 NR Description: unknown protein [Oryza sativa (japonica
  misc_feature (92)..(278): Homolog of NCBI NO: 23039527 NR Description: hypothetical protein [Trichodesmium erythraeum

SEQ ID NO: 101512 - protein, 216 aa, Arabidopsis thaliana; identical to SEQ ID NO: 37130
  peptide (1)..(216): Ceres Seq. ID no. 13608049
  misc_feature (1)..(216): Homolog of NCBI NO: 18409276 NR Description: expressed protein [Arabidopsis thaliana] unknown protein [Arabidopsis thaliana] unknown protein [Arabidopsis thaliana]
  misc_feature (1)..(216): Homolog of NCBI NO: 11357625 NR Description: hypothetical protein F24M12.180 - Arabidopsis >gi|6562266|emb|CAB62636.1| putative protein [Arabidopsis
  misc_feature (1)..(216): Homolog of NCBI NO: 15237199 NR Description: expressed protein [Arabidopsis thaliana] emb|CAB62636.1~gene_id:MYJ24.3~similar to unknown protein thaliana] >gi|21928168|gb|AAM78111.1| AT5g23040/MYJ24_3
  misc_feature (27)..(216): Homolog of NCBI NO: 17230751 NR Description: hypothetical protein [Nostoc sp. PCC 7120]
  misc_feature (27)..(216): Homolog of NCBI NO: 23129945 NR Description: hypothetical protein [Nostoc punctiforme]
  misc_feature (21)..(216): Homolog of NCBI NO: 16329734 NR Description: unknown protein [Synechocystis sp. PCC 6803]
  misc_feature (107)..(216): Homolog of NCBI NO: 37573058 NR Description: unknown protein [Oryza sativa (japonica
  misc_feature (30)..(216): Homolog of NCBI NO: 23039527 NR Description: hypothetical protein [Trichodesmium erythraeum

SEQ ID NO: 101513 - protein, 211 aa, Arabidopsis thaliana; identical to SEQ ID NO: 37131
  peptide (1)..(211): Ceres Seq. ID no. 13608050
  misc_feature (1)..(211): Homolog of NCBI NO: 18409276 NR Description: expressed protein [Arabidopsis thaliana] unknown protein [Arabidopsis thaliana] unknown protein [Arabidopsis thaliana]
  misc_feature (1)..(211): Homolog of NCBI NO: 11357625 NR Description: hypothetical protein F24M12.180 - Arabidopsis >gi|6562266|emb|CAB62636.1| putative protein [Arabidopsis
  misc_feature (1)..(211): Homolog of NCBI NO: 15237199 NR Description: expressed protein [Arabidopsis thaliana] emb|CAB62636.1~gene_id:MYJ24.3~similar to unknown protein thaliana] >gi|21928168|gb|AAM78111.1| AT5g23040/MYJ24_3
  misc_feature (22)..(211): Homolog of NCBI NO: 17230751 NR Description: hypothetical protein [Nostoc sp. PCC 7120]
  misc_feature (22)..(211): Homolog of NCBI NO: 23129945 NR Description: hypothetical protein [Nostoc punctiforme]
  misc_feature (16)..(211): Homolog of NCBI NO: 16329734 NR Description: unknown protein [Synechocystis sp. PCC 6803]
  misc_feature (102)..(211): Homolog of NCBI NO: 37573058 NR Description: unknown protein [Oryza sativa (japonica
  misc_feature (25)..(211): Homolog of NCBI NO: 23039527 NR Description: hypothetical protein [Trichodesmium erythraeum

SEQ ID NO: 101514 - DNA, 563 bp, Arabidopsis thaliana
  misc_feature (1)..(563): Ceres Seq. ID no. 13608051
  misc_feature: MA Experiment ID: 20000234 Result: Up-regulated in Transcription
  misc_feature: MA Experiment 20000234 PARAMETER Experiment Name: At_Siliques_P Parameter: Age (day) Value: 21
  misc_feature: MA Experiment 20000234 PARAMETER Experiment Name: At_Siliques_P Parameter: Organism Value: A. thaliana
  misc_feature: MA Experiment 20000234 PARAMETER Experiment Name: At_Siliques_P Parameter: Plant Line Value: WS
  misc_feature: MA Experiment 20000234 PARAMETER Experiment Name: At_Siliques_P Parameter: Tissue Value: Less Than 5mm Siliques vs. Whole Plant
  misc_feature: MA Experiment ID: 20000235 Result: Up-regulated in Transcription
  misc_feature: MA Experiment 20000235 PARAMETER Experiment Name: At_Siliques_P Parameter: Age (day) Value: 21
  misc_feature: MA Experiment 20000235 PARAMETER Experiment Name: At_Siliques_P Parameter: Organism Value: A. thaliana
  misc_feature: MA Experiment 20000235 PARAMETER Experiment Name: At_Siliques_P Parameter: Plant Line Value: WS
  misc_feature: MA Experiment 20000235 PARAMETER Experiment Name: At_Siliques_P Parameter: Tissue Value: 5-10mm Siliques vs. Whole Plant
  misc_feature: MA Experiment ID: 20001556 Result: Down-regulated in Transcription
  misc_feature: MA Experiment 20001556 PARAMETER Experiment Name: At_Drought_Soil_Dry_P Parameter: Age (day) Value: 26
  misc_feature: MA Experiment 20001556 PARAMETER Experiment Name: At_Drought_Soil_Dry_P Parameter: Organism Value: A. thaliana
  misc_feature: MA Experiment 20001556 PARAMETER Experiment Name: At_Drought_Soil_Dry_P Parameter: Plant Line Value: WS
  misc_feature: MA Experiment 20001556 PARAMETER Experiment Name: At_Drought_Soil_Dry_P Parameter: Post Timepoint (hr) Value: None
  misc_feature: MA Experiment 20001556 PARAMETER Experiment Name: At_Drought_Soil_Dry_P Parameter: Post-Treatment Value: None
  misc_feature: MA Experiment 20001556 PARAMETER Experiment Name: At_Drought_Soil_Dry_P Parameter: Timepoint (day) Value: 12
  misc_feature: MA Experiment 20001556 PARAMETER Experiment Name: At_Drought_Soil_Dry_P Parameter: Treatment Value: Drought vs. No Drought
aaaattgggattggtaggtgacgcgcatgctaagtaattgaaaaaaaaaaaacacaagaggagaagaaacagaacagagaagaaaaagagagaagatggcttcggaagaaggacaagtgatcgcctgccacaccgttgagacatggaacgagcagcttcagaaggctaatgaatccaaaactcttgtggtggttgatttcacggcttcttggtgtggaccatgtcgtttcatcgctccattctttgctgatttggctaagaaacttcctaacgtgcttttcctcaaggttgatactgatgaattgaagtcggtggcaagtgattgggcgatacaggcgatgccaaccttcatgtttttgaaggaagggaagattttggacaaagttgttggagccaagaaagatgagcttcagtctaccattgccaaacacttggcttaagctttccactcttatatatctcttaagatgttggattaattgttctattactcttgacatgttataacttgttcccctttgttatggttccggtctataatctcatctgactatttgaagctg

SEQ ID NO: 101515 - protein, 114 aa, Arabidopsis thaliana; identical to SEQ ID NO: 21573
  peptide (1)..(114): Ceres Seq. ID no. 13608052
  misc_feature (1)..(114): Homolog of NCBI NO: 15230385 NR Description: thioredoxin H-type 1 (TRX-H-1) [Arabidopsis
  misc_feature (1)..(114): Homolog of NCBI NO: 11135282 NR Description: Thioredoxin H-type (TRX-H) >gi|7430846|pir||T10170
  misc_feature (3)..(114): Homolog of NCBI NO: 586099 NR Description: Thioredoxin H-type 2 (TRX-H2)
  misc_feature (2)..(114): Homolog of NCBI NO: 13624884 NR Description: thioredoxin h [Pisum sativum]
  misc_feature (3)..(114): Homolog of NCBI NO: 16588843 NR Description: thioredoxin H [Prunus persica]
  misc_feature (2)..(114): Homolog of NCBI NO: 267124 NR Description: Thioredoxin H-type 1 (TRX-H1)
  misc_feature (3)..(114): Homolog of NCBI NO: 27466894 NR Description: thioredoxin h [Pisum sativum]
  misc_feature (3)..(112): Homolog of NCBI NO: 30575686 NR Description: thioredoxin H [Citrus x paradisi]
  misc_feature (3)..(112): Homolog of NCBI NO: 19851972 NR Description: thioredoxin H [Populus tremula x Populus
  misc_feature (2)..(113): Homolog of NCBI NO: 40287476 NR Description: thioredoxin [Capsicum annuum]

SEQ ID NO: 101516 - DNA, 1271 bp, Arabidopsis thaliana
  misc_feature (1)..(1271): Ceres Seq. ID no. 13608053
  misc_feature: MA Experiment ID: 108434 Result: Down-regulated in Transcription
  misc_feature: MA Experiment 108434 PARAMETER Experiment Name: At_Root_Tips_cDNA_P Parameter: Tissue Value: Root Tips
  misc_feature: MA Experiment ID: 108569 Result: Up-regulated in Transcription
  misc_feature: MA Experiment 108569 PARAMETER Experiment Name: At_0.001%_MeJA__cDNA_P Parameter: Timepoint (hr) Value: 6
  misc_feature: MA Experiment 108569 PARAMETER Experiment Name: At_0.001%_MeJA__cDNA_P Parameter: Tissue Value: Aerial
  misc_feature: MA Experiment 108569 PARAMETER Experiment Name: At_0.001%_MeJA__cDNA_P Parameter: Treatment Value: 0.001% MeJA vs. No Treatment
  misc_feature: MA Experiment ID: 108573 Result: Up-regulated in Transcription
  misc_feature: MA Experiment 108573 PARAMETER Experiment Name: At_Drought_cDNA_P Parameter: Timepoint (hr) Value: 6
  misc_feature: MA Experiment 108573 PARAMETER Experiment Name: At_Drought_cDNA_P Parameter: Tissue Value: Aerial
  misc_feature: MA Experiment 108573 PARAMETER Experiment Name: At_Drought_cDNA_P Parameter: Treatment Value: Drought vs. No Drought
  misc_feature: MA Experiment ID: 108574 Result: Up-regulated in Transcription
  misc_feature: MA Experiment 108574 PARAMETER Experiment Name: At_Wounding__cDNA_P Parameter: Timepoint (hr) Value: 1
  misc_feature: MA Experiment 108574 PARAMETER Experiment Name: At_Wounding__cDNA_P Parameter: Tissue Value: Aerial
  misc_feature: MA Experiment 108574 PARAMETER Experiment Name: At_Wounding__cDNA_P Parameter: Treatment Value: Wounding vs. No Wounding
  misc_feature: MA Experiment ID: 108585 Result: Up-regulated in Transcription
  misc_feature: MA Experiment 108585 PARAMETER Experiment Name: At_5mM_NaNP_cDNA_P Parameter: Timepoint (hr) Value: 6
  misc_feature: MA Experiment 108585 PARAMETER Experiment Name: At_5mM_NaNP_cDNA_P Parameter: Tissue Value: Aerial
  misc_feature: MA Experiment 108585 PARAMETER Experiment Name: At_5mM_NaNP_cDNA_P Parameter: Treatment Value: null
  misc_feature: MA Experiment ID: 108667 Result: Up-regulated in Transcription
  misc_feature: MA Experiment 108667 PARAMETER Experiment Name: At_2mM_SA_cDNA_P Parameter: Plant Line Value: WS
  misc_feature: MA Experiment 108667 PARAMETER Experiment Name: At_2mM_SA_cDNA_P Parameter: Timepoint (hr) Value: 1
  misc_feature: MA Experiment 108667 PARAMETER Experiment Name: At_2mM_SA_cDNA_P Parameter: Treatment Value: 2mM SA vs. No Treatment
  misc_feature: MA Experiment ID: 108668 Result: Up-regulated in Transcription
  misc_feature: MA Experiment 108668 PARAMETER Experiment Name: At_2mM_SA_cDNA_P Parameter: Plant Line Value: WS
  misc_feature: MA Experiment 108668 PARAMETER Experiment Name: At_2mM_SA_cDNA_P Parameter: Timepoint (hr) Value: 6
  misc_feature: MA Experiment 108668 PARAMETER Experiment Name: At_2mM_SA_cDNA_P Parameter: Treatment Value: 2mM SA vs. No Treatment
  misc_feature: MA Experiment ID: 20000088 Result: Up-regulated in Transcription
  misc_feature: MA Experiment 20000088 PARAMETER Experiment Name: At_100uM_ABA_Mutants_cDNA_P Parameter: Plant Line Value: Landsberg
  misc_feature: MA Experiment 20000088 PARAMETER Experiment Name: At_100uM_ABA_Mutants_cDNA_P Parameter: Timepoint (hr) Value: 6
  misc_feature: MA Experiment 20000088 PARAMETER Experiment Name: At_100uM_ABA_Mutants_cDNA_P Parameter: Tissue Value: Aerial
  misc_feature: MA Experiment 20000088 PARAMETER Experiment Name: At_100uM_ABA_Mutants_cDNA_P Parameter: Treatment Value: 100uM ABA vs. No Treatment
  misc_feature: MA Experiment ID: 20000117 Result: Up-regulated in Transcription
  misc_feature: MA Experiment 20000117 PARAMETER Experiment Name: At_100uM_ABA_Mutants_cDNA_P Parameter: Plant Line Value: Columbia
  misc_feature: MA Experiment 20000117 PARAMETER Experiment Name: At_100uM_ABA_Mutants_cDNA_P Parameter: Timepoint (hr) Value: 6
  misc_feature: MA Experiment 20000117 PARAMETER Experiment Name: At_100uM_ABA_Mutants_cDNA_P Parameter: Tissue Value: Aerial
  misc_feature: MA Experiment 20000117 PARAMETER Experiment Name: At_100uM_ABA_Mutants_cDNA_P Parameter: Treatment Value: 100uM ABA vs. No Treatment
  misc_feature: MA Experiment ID: 20000144 Result: Down-regulated in Transcription
  misc_feature: MA Experiment 20000144 PARAMETER Experiment Name: At_42deg_Heat_cDNA_P Parameter: Temperature (deg C) Value: 42 vs. 22
  misc_feature: MA Experiment 20000144 PARAMETER Experiment Name: At_42deg_Heat_cDNA_P Parameter: Timepoint (hr) Value: 1
  misc_feature: MA Experiment 20000144 PARAMETER Experiment Name: At_42deg_Heat_cDNA_P Parameter: Tissue Value: Aerial
  misc_feature: MA Experiment ID: 20000171 Result: Down-regulated in Transcription
  misc_feature: MA Experiment 20000171 PARAMETER Experiment Name: At_42deg_Heat_P Parameter: Age (day) Value: 14
  misc_feature: MA Experiment 20000171 PARAMETER Experiment Name: At_42deg_Heat_P Parameter: Organism Value: A. thaliana
  misc_feature: MA Experiment 20000171 PARAMETER Experiment Name: At_42deg_Heat_P Parameter: Plant Line Value: WS
  misc_feature: MA Experiment 20000171 PARAMETER Experiment Name: At_42deg_Heat_P Parameter: Temperature (deg C) Value: 42 vs. 22
  misc_feature: MA Experiment 20000171 PARAMETER Experiment Name: At_42deg_Heat_P Parameter: Timepoint (hr) Value: 1
  misc_feature: MA Experiment 20000171 PARAMETER Experiment Name: At_42deg_Heat_P Parameter: Tissue Value: Aerial
  misc_feature: MA Experiment ID: 20000173 Result: Down-regulated in Transcription
  misc_feature: MA Experiment 20000173 PARAMETER Experiment Name: At_42deg_Heat_P Parameter: Age (day) Value: 14
  misc_feature: MA Experiment 20000173 PARAMETER Experiment Name: At_42deg_Heat_P Parameter: Organism Value: A. thaliana
  misc_feature: MA Experiment 20000173 PARAMETER Experiment Name: At_42deg_Heat_P Parameter: Plant Line Value: WS
  misc_feature: MA Experiment 20000173 PARAMETER Experiment Name: At_42deg_Heat_P Parameter: Temperature (deg C) Value: 42 vs. 22
  misc_feature: MA Experiment 20000173 PARAMETER Experiment Name: At_42deg_Heat_P Parameter: Timepoint (hr) Value: 6
  misc_feature: MA Experiment 20000173 PARAMETER Experiment Name: At_42deg_Heat_P Parameter: Tissue Value: Aerial
  misc_feature: MA Experiment ID: 20000182 Result: Up-regulated in Transcription
  misc_feature: MA Experiment 20000182 PARAMETER Experiment Name: At_2mM_SA_P Parameter: Age (day) Value: 14
  misc_feature: MA Experiment 20000182 PARAMETER Experiment Name: At_2mM_SA_P Parameter: Organism Value: A. thaliana
  misc_feature: MA Experiment 20000182 PARAMETER Experiment Name: At_2mM_SA_P Parameter: Plant Line Value: WS
  misc_feature: MA Experiment 20000182 PARAMETER Experiment Name: At_2mM_SA_P Parameter: Timepoint (hr) Value: 6
  misc_feature: MA Experiment 20000182 PARAMETER Experiment Name: At_2mM_SA_P Parameter: Tissue Value: Aerial
  misc_feature: MA Experiment 20000182 PARAMETER Experiment Name: At_2mM_SA_P Parameter: Treatment Value: 2mM SA vs. No Treatment
  misc_feature: MA Experiment ID: 20000184 Result: Down-regulated in Transcription
  misc_feature: MA Experiment 20000184 PARAMETER Experiment Name: At_Shoots__P Parameter: Age (day) Value: 7
  misc_feature: MA Experiment 20000184 PARAMETER Experiment Name: At_Shoots__P Parameter: Tissue Value: Shoots vs. Whole Plant
  misc_feature: MA Experiment ID: 20000185 Result: Down-regulated in Transcription
  misc_feature: MA Experiment 20000185 PARAMETER Experiment Name: At_Roots__P Parameter: Age (day) Value: 7 vs. 21
  misc_feature: MA Experiment 20000185 PARAMETER Experiment Name: At_Roots__P Parameter: Organism Value: A. thaliana
  misc_feature: MA Experiment 20000185 PARAMETER Experiment Name: At_Roots__P Parameter: Tissue Value: Roots vs. Whole Plant
  misc_feature: MA Experiment ID: 20000224 Result: Up-regulated in Transcription
  misc_feature: MA Experiment ID: 20000234 Result: Down-regulated in Transcription
  misc_feature: MA Experiment 20000234 PARAMETER Experiment Name: At_Siliques_P Parameter: Age (day) Value: 21
  misc_feature: MA Experiment 20000234 PARAMETER Experiment Name: At_Siliques_P Parameter: Organism Value: A. thaliana
  misc_feature: MA Experiment 20000234 PARAMETER Experiment Name: At_Siliques_P Parameter: Plant Line Value: WS
  misc_feature: MA Experiment 20000234 PARAMETER Experiment Name: At_Siliques_P Parameter: Tissue Value: Less Than 5mm Siliques vs. Whole Plant
  misc_feature: MA Experiment ID: 20000235 Result: Down-regulated in Transcription
  misc_feature: MA Experiment 20000235 PARAMETER Experiment Name: At_Siliques_P Parameter: Age (day) Value: 21
  misc_feature: MA Experiment 20000235 PARAMETER Experiment Name: At_Siliques_P Parameter: Organism Value: A. thaliana
  misc_feature: MA Experiment 20000235 PARAMETER Experiment Name: At_Siliques_P Parameter: Plant Line Value: WS
  misc_feature: MA Experiment 20000235 PARAMETER Experiment Name: At_Siliques_P Parameter: Tissue Value: 5-10mm Siliques vs. Whole Plant
  misc_feature: MA Experiment ID: 20000264 Result: Down-regulated in Transcription
  misc_feature: MA Experiment 20000264 PARAMETER Experiment Name: At_Open_Flower_P Parameter: Age (day) Value: 21
  misc_feature: MA Experiment 20000264 PARAMETER Experiment Name: At_Open_Flower_P Parameter: Plant Line Value: WS
  misc_feature: MA Experiment 20000264 PARAMETER Experiment Name: At_Open_Flower_P Parameter: Tissue Value: Open Flower vs. Whole Plant
  misc_feature: MA Experiment ID: 20000438 Result: Down-regulated in Transcription
  misc_feature: MA Experiment 20000438 PARAMETER Experiment Name: At_Shoots__P Parameter: Age (day) Value: 14
  misc_feature: MA Experiment 20000438 PARAMETER Experiment Name: At_Shoots__P Parameter: Tissue Value: Shoots vs. Whole Plant
  misc_feature: MA Experiment ID: 20000439 Result: Down-regulated in Transcription
  misc_feature: MA Experiment 20000439 PARAMETER Experiment Name: At_Roots__P Parameter: Age (day) Value: 14 vs. 21
  misc_feature: MA Experiment 20000439 PARAMETER Experiment Name: At_Roots__P Parameter: Organism Value: A. thaliana
  misc_feature: MA Experiment 20000439 PARAMETER Experiment Name: At_Roots__P Parameter: Tissue Value: Roots vs. Whole Plant
  misc_feature: MA Experiment ID: 20000527 Result: Down-regulated in Transcription
  misc_feature: MA Experiment 20000527 PARAMETER Experiment Name: At_10percent_PEG_P Parameter: Age (day) Value: 20
  misc_feature: MA Experiment 20000527 PARAMETER Experiment Name: At_10percent_PEG_P Parameter: Organism Value: A. thaliana
  misc_feature: MA Experiment 20000527 PARAMETER Experiment Name: At_10percent_PEG_P Parameter: Plant Line Value: WS
  misc_feature: MA Experiment 20000527 PARAMETER Experiment Name: At_10percent_PEG_P Parameter: Timepoint (day) Value: 20
  misc_feature: MA Experiment 20000527 PARAMETER Experiment Name: At_10percent_PEG_P Parameter: Tissue Value: Whole Plant
  misc_feature: MA Experiment 20000527 PARAMETER Experiment Name: At_10percent_PEG_P Parameter: Treatment Value: 10percent PEG vs. No Treatment
  misc_feature: MA Experiment ID: 20000573 Result: Up-regulated in Transcription
  misc_feature: MA Experiment 20000573 PARAMETER Experiment Name: At_100uM_ABA_Mutants__P Parameter: Organism Value: A. thaliana
  misc_feature: MA Experiment 20000573 PARAMETER Experiment Name: At_100uM_ABA_Mutants__P Parameter: Plant Line Value: CS22 vs. Ler wt
  misc_feature: MA Experiment 20000573 PARAMETER Experiment Name: At_100uM_ABA_Mutants__P Parameter: Timepoint (hr) Value: N/A
  misc_feature: MA Experiment 20000573 PARAMETER Experiment Name: At_100uM_ABA_Mutants__P Parameter: Tissue Value: Whole Plant
  misc_feature: MA Experiment 20000573 PARAMETER Experiment Name: At_100uM_ABA_Mutants__P Parameter: Treatment Value: None
  misc_feature: MA Experiment ID: 20000574 Result: Up-regulated in Transcription
  misc_feature: MA Experiment 20000574 PARAMETER Experiment Name: At_100uM_ABA_Mutants__P Parameter: Organism Value: A. thaliana
  misc_feature: MA Experiment 20000574 PARAMETER Experiment Name: At_100uM_ABA_Mutants__P Parameter: Plant Line Value: CS23 vs. Ler wt
  misc_feature: MA Experiment 20000574 PARAMETER Experiment Name: At_100uM_ABA_Mutants__P Parameter: Timepoint (hr) Value: N/A
  misc_feature: MA Experiment 20000574 PARAMETER Experiment Name: At_100uM_ABA_Mutants__P Parameter: Tissue Value: Whole Plant
  misc_feature: MA Experiment 20000574 PARAMETER Experiment Name: At_100uM_ABA_Mutants__P Parameter: Treatment Value: None
  misc_feature: MA Experiment ID: 20000709 Result: Up-regulated in Transcription
  misc_feature: MA Experiment 20000709 PARAMETER Experiment Name: At_15mM_NH4NO3_L-to-H_P Parameter: Age (hr) Value: 14
  misc_feature: MA Experiment 20000709 PARAMETER Experiment Name: At_15mM_NH4NO3_L-to-H_P Parameter: Organism Value: A. thaliana
  misc_feature: MA Experiment 20000709 PARAMETER Experiment Name: At_15mM_NH4NO3_L-to-H_P Parameter: Plant Line Value: WS
  misc_feature: MA Experiment 20000709 PARAMETER Experiment Name: At_15mM_NH4NO3_L-to-H_P Parameter: Timepoint (hr) Value: 4
  misc_feature: MA Experiment 20000709 PARAMETER Experiment Name: At_15mM_NH4NO3_L-to-H_P Parameter: Tissue Value: Aerial
  misc_feature: MA Experiment 20000709 PARAMETER Experiment Name: At_15mM_NH4NO3_L-to-H_P Parameter: Treatment Value: 15mM NH4NO3 vs. 30mM Mannitol
  misc_feature: MA Experiment ID: 20000794 Result: Down-regulated in Transcription
  misc_feature: MA Experiment 20000794 PARAMETER Experiment Name: At_Petals_P Parameter: Age (day) Value: 23-25 days
  misc_feature: MA Experiment 20000794 PARAMETER Experiment Name: At_Petals_P Parameter: Plant Line Value: WS
  misc_feature: MA Experiment 20000794 PARAMETER Experiment Name: At_Petals_P Parameter: Tissue Value: Petals vs. Whole plant
  misc_feature: MA Experiment ID: 20001248 Result: Down-regulated in Transcription
  misc_feature: MA Experiment 20001248 PARAMETER Experiment Name: At_Far-red-induction_P Parameter: Age (day) Value: 7
  misc_feature: MA Experiment 20001248 PARAMETER Experiment Name: At_Far-red-induction_P Parameter: Light Value: Far-red vs. White
  misc_feature: MA Experiment 20001248 PARAMETER Experiment Name: At_Far-red-induction_P Parameter: Organism Value: A. thaliana
  misc_feature: MA Experiment 20001248 PARAMETER Experiment Name: At_Far-red-induction_P Parameter: Plant Line Value: Columbia
  misc_feature: MA Experiment 20001248 PARAMETER Experiment Name: At_Far-red-induction_P Parameter: Timepoint (hr) Value: 4
  misc_feature: MA Experiment 20001248 PARAMETER Experiment Name: At_Far-red-induction_P Parameter: Tissue Value: Whole Plant
  misc_feature: MA Experiment ID: 20001450 Result: Down-regulated in Transcription
  misc_feature: MA Experiment 20001450 PARAMETER Experiment Name: At_Far-red-induction_P Parameter: Age (day) Value: 7
  misc_feature: MA Experiment 20001450 PARAMETER Experiment Name: At_Far-red-induction_P Parameter: Light Value: Far-red vs. White
  misc_feature: MA Experiment 20001450 PARAMETER Experiment Name: At_Far-red-induction_P Parameter: Organism Value: A. thaliana
  misc_feature: MA Experiment 20001450 PARAMETER Experiment Name: At_Far-red-induction_P Parameter: Plant Line Value: Columbia
  misc_feature: MA Experiment 20001450 PARAMETER Experiment Name: At_Far-red-induction_P Parameter: Timepoint (hr) Value: 8
  misc_feature: MA Experiment 20001450 PARAMETER Experiment Name: At_Far-red-induction_P Parameter: Tissue Value: Whole Plant
  misc_feature: MA Experiment ID: 20001451 Result: Down-regulated in Transcription
  misc_feature: MA Experiment 20001451 PARAMETER Experiment Name: At_Far-red-induction_P Parameter: Age (day) Value: 7
  misc_feature: MA Experiment 20001451 PARAMETER Experiment Name: At_Far-red-induction_P Parameter: Light Value: Far-red vs. White
  misc_feature: MA Experiment 20001451 PARAMETER Experiment Name: At_Far-red-induction_P Parameter: Organism Value: A. thaliana
  misc_feature: MA Experiment 20001451 PARAMETER Experiment Name: At_Far-red-induction_P Parameter: Plant Line Value: Columbia
  misc_feature: MA Experiment 20001451 PARAMETER Experiment Name: At_Far-red-induction_P Parameter: Timepoint (hr) Value: 24
  misc_feature: MA Experiment 20001451 PARAMETER Experiment Name: At_Far-red-induction_P Parameter: Tissue Value: Whole Plant
  misc_feature: MA Experiment ID: 20001558 Result: Down-regulated in Transcription
  misc_feature: MA Experiment 20001558 PARAMETER Experiment Name: At_Drought_Soil_Dry_P Parameter: Age (day) Value: 27
  misc_feature: MA Experiment 20001558 PARAMETER Experiment Name: At_Drought_Soil_Dry_P Parameter: Organism Value: A. thaliana
  misc_feature: MA Experiment 20001558 PARAMETER Experiment Name: At_Drought_Soil_Dry_P Parameter: Plant Line Value: WS
  misc_feature: MA Experiment 20001558 PARAMETER Experiment Name: At_Drought_Soil_Dry_P Parameter: Post Timepoint (hr) Value: 6
  misc_feature: MA Experiment 20001558 PARAMETER Experiment Name: At_Drought_Soil_Dry_P Parameter: Post-Treatment Value: Re-Water vs. No Drought
  misc_feature: MA Experiment 20001558 PARAMETER Experiment Name: At_Drought_Soil_Dry_P Parameter: Timepoint (day) Value: 13
  misc_feature: MA Experiment 20001558 PARAMETER Experiment Name: At_Drought_Soil_Dry_P Parameter: Treatment Value: Drought vs. No Drought
  misc_feature: MA Experiment ID: 20001904 Result: Down-regulated in Transcription
  misc_feature: MA Experiment 20001904 PARAMETER Experiment Name: At_Drought_Reproduction_P Parameter: Age (day) Value: 37
  misc_feature: MA Experiment 20001904 PARAMETER Experiment Name: At_Drought_Reproduction_P Parameter: Organism Value: A. thaliana
  misc_feature: MA Experiment 20001904 PARAMETER Experiment Name: At_Drought_Reproduction_P Parameter: Plant Line Value: WS
  misc_feature: MA Experiment 20001904 PARAMETER Experiment Name: At_Drought_Reproduction_P Parameter: Timepoint (day) Value: 7
  misc_feature: MA Experiment 20001904 PARAMETER Experiment Name: At_Drought_Reproduction_P Parameter: Tissue Value: Rosettes
  misc_feature: MA Experiment 20001904 PARAMETER Experiment Name: At_Drought_Reproduction_P Parameter: Treatment Value: Drought vs. No Drought
  misc_feature: MA Experiment ID: 20001905 Result: Down-regulated in Transcription
  misc_feature: MA Experiment 20001905 PARAMETER Experiment Name: At_Drought_Reproduction_P Parameter: Age (day) Value: 40
  misc_feature: MA Experiment 20001905 PARAMETER Experiment Name: At_Drought_Reproduction_P Parameter: Organism Value: A. thaliana
  misc_feature: MA Experiment 20001905 PARAMETER Experiment Name: At_Drought_Reproduction_P Parameter: Plant Line Value: WS
  misc_feature: MA Experiment 20001905 PARAMETER Experiment Name: At_Drought_Reproduction_P Parameter: Timepoint (day) Value: 10
  misc_feature: MA Experiment 20001905 PARAMETER Experiment Name: At_Drought_Reproduction_P Parameter: Tissue Value: Rosettes
  misc_feature: MA Experiment 20001905 PARAMETER Experiment Name: At_Drought_Reproduction_P Parameter: Treatment Value: Drought vs. No Drought
aaattggcatgttcaccatttttccacaaactcaaatttgctccaatgcctgtacttttctcctctcgttctctcatactctccattattgtccccttacttatatctatcgctctctacaaactcgacacattcgaccccgctattgttccttccgatgcattcacatcctctgctacttcactcccgccgcttataaacgacgaatttctcaccggagctgagtttatcggtgtcggtcttctcaatatacccgaagatatcgcctaccataaggaatctaatctcatctacactggttgtgttgatggatgggtgaaacgagtcaaggtcgccgactcggttaatgactcagtcgttgaggattgggtcaatactggtggtagaccgctcggaatcgcgttcggaatccacggcgaagtcattgtcgcagacgtacacaagggactgttgaatataagcggtgacggaaagaagacggaattgttgacggacgaagcggacggtgtgaagtttaagctgacggatgcagttaccgttgcagataacggcgttttgtatttcacagatgcttcttacaagtacactctcaatcaattgagtttagacatgttagaagggaaaccttttggacgactcttgagctttgatcccaccacacgtgttacaaaagtacttctcaaagacctctacttcgctaatggcatcaccatctctcctgatcaaactcatctcatcttctgtgaaactccaatgaaaaggtgcagcaagtattacatcagtgaggagcgtgtggaggtattcactcaaagcttaccaggttatccagataacattcgttacgatggagatggacattactggattgcattgccttcgggagtcacgacattgtggaatatctcgttgaaataccctttcttgaggaaactcacagcaatggtggctaagtacggcgtggatcttatgtttatggagaatgcaggcgttttacaggtggatttggatggaaatcccatcgcgtactaccatgatccaaaactctctcacatagccacatgtgacaagattgggaaatatctctattgtggaagtctctcgcaatcacatatcctccgacttgatctcctgaaatatcctgcacagaacaagaaactttgaaatattatgttttcacaaataaggaaagtttccattttaggaaggagcattcactgtcacaaaaaatgtaaactcatttcctgagaatgaatgatgattgtatctctttt

SEQ ID NO: 101517 - protein, 386 aa, Arabidopsis thaliana; identical to SEQ ID NO: 24767
  peptide (1)..(386): Ceres Seq. ID no. 13608054
  misc_feature (23)..(371): Pfam Name: Strictosidine synthase Pfam Description: Strictosidine synthase
  misc_feature (16)..(386): Homolog of NCBI NO: 15230490 NR Description: strictosidine synthase-related [Arabidopsis
  misc_feature (16)..(386): Homolog of NCBI NO: 18409339 NR Description: strictosidine synthase-related [Arabidopsis
  misc_feature (16)..(386): Homolog of NCBI NO: 15230488 NR Description: strictosidine synthase-related [Arabidopsis
  misc_feature (16)..(386): Homolog of NCBI NO: 11358518 NR Description: mucin-like protein - Arabidopsis thaliana
  misc_feature (16)..(384): Homolog of NCBI NO: 15230477 NR Description: strictosidine synthase-related [Arabidopsis
  misc_feature (21)..(382): Homolog of NCBI NO: 37536558 NR Description: mucin-like protein [Oryza sativa (japonica
  misc_feature (29)..(374): Homolog of NCBI NO: 15596490 NR Description: hypothetical protein [Pseudomonas aeruginosa PA01]
  misc_feature (25)..(378): Homolog of NCBI NO: 23237921 NR Description: contains ESTs
  misc_feature (85)..(380): Homolog of NCBI NO: 40063117 NR Description: strictosidine synthase family protein [uncultured
  misc_feature (23)..(376): Homolog of NCBI NO: 23059369 NR Description: hypothetical protein [Pseudomonas fluorescens

SEQ ID NO: 101518 - protein, 371 aa, Arabidopsis thaliana; identical to SEQ ID NO: 24768
  peptide (1)..(371): Ceres Seq. ID no. 13608055
  misc_feature (8)..(356): Pfam Name: Strictosidine synthase Pfam Description: Strictosidine synthase
  misc_feature (1)..(371): Homolog of NCBI NO: 15230490 NR Description: strictosidine synthase-related [Arabidopsis
  misc_feature (1)..(371): Homolog of NCBI NO: 18409339 NR Description: strictosidine synthase-related [Arabidopsis
  misc_feature (1)..(371): Homolog of NCBI NO: 15230488 NR Description: strictosidine synthase-related [Arabidopsis
  misc_feature (1)..(371): Homolog of NCBI NO: 11358518 NR Description: mucin-like protein - Arabidopsis thaliana
  misc_feature (1)..(369): Homolog of NCBI NO: 15230477 NR Description: strictosidine synthase-related [Arabidopsis
  misc_feature (6)..(367): Homolog of NCBI NO: 37536558 NR Description: mucin-like protein [Oryza sativa (japonica
  misc_feature (14)..(359): Homolog of NCBI NO: 15596490 NR Description: hypothetical protein [Pseudomonas aeruginosa PA01]
  misc_feature (10)..(363): Homolog of NCBI NO: 23237921 NR Description: contains ESTs
  misc_feature (70)..(365): Homolog of NCBI NO: 40063117 NR Description: strictosidine synthase family protein [uncultured
  misc_feature (8)..(361): Homolog of NCBI NO: 23059369 NR Description: hypothetical protein [Pseudomonas fluorescens

SEQ ID NO: 101519 - DNA, 987 bp, Arabidopsis thaliana
  misc_feature (1)..(987): Ceres Seq. ID no. 13608068
  misc_feature: MA Experiment ID: 108434 Result: Down-regulated in Transcription
  misc_feature: MA Experiment 108434 PARAMETER Experiment Name: At_Root_Tips_cDNA_P Parameter: Tissue Value: Root Tips
  misc_feature: MA Experiment ID: 108488 Result: Down-regulated in Transcription
  misc_feature: MA Experiment ID: 108585 Result: Up-regulated in Transcription
  misc_feature: MA Experiment 108585 PARAMETER Experiment Name: At_5mM_NaNP_cDNA_P Parameter: Timepoint (hr) Value: 6
  misc_feature: MA Experiment 108585 PARAMETER Experiment Name: At_5mM_NaNP_cDNA_P Parameter: Tissue Value: Aerial
  misc_feature: MA Experiment 108585 PARAMETER Experiment Name: At_5mM_NaNP_cDNA_P Parameter: Treatment Value: null
  misc_feature: MA Experiment ID: 108607 Result: Up-regulated in Transcription
  misc_feature: MA Experiment 108607 PARAMETER Experiment Name: At_100uM_ABA_cDNA_P Parameter: Timepoint (hr) Value: 4
  misc_feature: MA Experiment 108607 PARAMETER Experiment Name: At_100uM_ABA_cDNA_P Parameter: Tissue Value: Aerial
  misc_feature: MA Experiment 108607 PARAMETER Experiment Name: At_100uM_ABA_cDNA_P Parameter: Treatment Value: 100uM ABA vs. No Treatment
  misc_feature: MA Experiment ID: 108668 Result: Up-regulated in Transcription
  misc_feature: MA Experiment 108668 PARAMETER Experiment Name: At_2mM_SA_cDNA_P Parameter: Plant Line Value: WS
  misc_feature: MA Experiment 108668 PARAMETER Experiment Name: At_2mM_SA_cDNA_P Parameter: Timepoint (hr) Value: 6
  misc_feature: MA Experiment 108668 PARAMETER Experiment Name: At_2mM_SA_cDNA_P Parameter: Treatment Value: 2mM SA vs. No Treatment
  misc_feature: MA Experiment ID: 20000069 Result: Up-regulated in Transcription
  misc_feature: MA Experiment 20000069 PARAMETER Experiment Name: At_100uM_ABA_Mutants_cDNA_P Parameter: Plant Line Value: CS23
  misc_feature: MA Experiment 20000069 PARAMETER Experiment Name: At_100uM_ABA_Mutants_cDNA_P Parameter: Timepoint (hr) Value: 6
  misc_feature: MA Experiment 20000069 PARAMETER Experiment Name: At_100uM_ABA_Mutants_cDNA_P Parameter: Tissue Value: Aerial
  misc_feature: MA Experiment 20000069 PARAMETER Experiment Name: At_100uM_ABA_Mutants_cDNA_P Parameter: Treatment Value: 100uM ABA vs. No Treatment
  misc_feature: MA Experiment ID: 20000070 Result: Up-regulated in Transcription
  misc_feature: MA Experiment 20000070 PARAMETER Experiment Name: At_100uM_ABA_Mutants_cDNA_P Parameter: Plant Line Value: CS24
  misc_feature: MA Experiment 20000070 PARAMETER Experiment Name: At_100uM_ABA_Mutants_cDNA_P Parameter: Timepoint (hr) Value: 6
  misc_feature: MA Experiment 20000070 PARAMETER Experiment Name: At_100uM_ABA_Mutants_cDNA_P Parameter: Tissue Value: Aerial
  misc_feature: MA Experiment 20000070 PARAMETER Experiment Name: At_100uM_ABA_Mutants_cDNA_P Parameter: Treatment Value: 100uM ABA vs. No Treatment
  misc_feature: MA Experiment ID: 20000090 Result: Up-regulated in Transcription
  misc_feature: MA Experiment ID: 20000113 Result: Down-regulated in Transcription
  misc_feature: MA Experiment 20000113 PARAMETER Experiment Name: At_42deg_Heat_cDNA_P Parameter: Temperature (deg C) Value: 42 vs. 22
  misc_feature: MA Experiment 20000113 PARAMETER Experiment Name: At_42deg_Heat_cDNA_P Parameter: Timepoint (hr) Value: 8
  misc_feature: MA Experiment 20000113 PARAMETER Experiment Name: At_42deg_Heat_cDNA_P Parameter: Tissue Value: Aerial
  misc_feature: MA Experiment ID: 20000117 Result: Up-regulated in Transcription
  misc_feature: MA Experiment 20000117 PARAMETER Experiment Name: At_100uM_ABA_Mutants_cDNA_P Parameter: Plant Line Value: Columbia
  misc_feature: MA Experiment 20000117 PARAMETER Experiment Name: At_100uM_ABA_Mutants_cDNA_P Parameter: Timepoint (hr) Value: 6
  misc_feature: MA Experiment 20000117 PARAMETER Experiment Name: At_100uM_ABA_Mutants_cDNA_P Parameter: Tissue Value: Aerial
  misc_feature: MA Experiment 20000117 PARAMETER Experiment Name: At_100uM_ABA_Mutants_cDNA_P Parameter: Treatment Value: 100uM ABA vs. No Treatment
  misc_feature: MA Experiment ID: 20000180 Result: Down-regulated in Transcription
  misc_feature: MA Experiment 20000180 PARAMETER Experiment Name: At_Germinating_Seeds_P Parameter: Age (hr) Value: 24 vs. 0
  misc_feature: MA Experiment 20000180 PARAMETER Experiment Name: At_Germinating_Seeds_P Parameter: Tissue Value: Germinating Seeds
  misc_feature: MA Experiment ID: 20000182 Result: Up-regulated in Transcription
  misc_feature: MA Experiment 20000182 PARAMETER Experiment Name: At_2mM_SA_P Parameter: Age (day) Value: 14
  misc_feature: MA Experiment 20000182 PARAMETER Experiment Name: At_2mM_SA_P Parameter: Organism Value: A. thaliana
  misc_feature: MA Experiment 20000182 PARAMETER Experiment Name: At_2mM_SA_P Parameter: Plant Line Value: WS
  misc_feature: MA Experiment 20000182 PARAMETER Experiment Name: At_2mM_SA_P Parameter: Timepoint (hr) Value: 6
  misc_feature: MA Experiment 20000182 PARAMETER Experiment Name: At_2mM_SA_P Parameter: Tissue Value: Aerial
  misc_feature: MA Experiment 20000182 PARAMETER Experiment Name: At_2mM_SA_P Parameter: Treatment Value: 2mM SA vs. No Treatment
  misc_feature: MA Experiment ID: 20000184 Result: Down-regulated in Transcription
  misc_feature: MA Experiment 20000184 PARAMETER Experiment Name: At_Shoots__P Parameter: Age (day) Value: 7
  misc_feature: MA Experiment 20000184 PARAMETER Experiment Name: At_Shoots__P Parameter: Tissue Value: Shoots vs. Whole Plant
  misc_feature: MA Experiment ID: 20000227 Result: Down-regulated in Transcription
  misc_feature: MA Experiment 20000227 PARAMETER Experiment Name: At_Root-Tips-vs-Tops_P Parameter: Tissue Value: Root Tips vs. Root Tops
  misc_feature: MA Experiment ID: 20000234 Result: Down-regulated in Transcription
  misc_feature: MA Experiment 20000234 PARAMETER Experiment Name: At_Siliques_P Parameter: Age (day) Value: 21
  misc_feature: MA Experiment 20000234 PARAMETER Experiment Name: At_Siliques_P Parameter: Organism Value: A. thaliana
  misc_feature: MA Experiment 20000234 PARAMETER Experiment Name: At_Siliques_P Parameter: Plant Line Value: WS
  misc_feature: MA Experiment 20000234 PARAMETER Experiment Name: At_Siliques_P Parameter: Tissue Value: Less Than 5mm Siliques vs. Whole Plant
  misc_feature: MA Experiment ID: 20000265 Result: Down-regulated in Transcription
  misc_feature: MA Experiment 20000265 PARAMETER Experiment Name: At_Open_Flower_P Parameter: Age (day) Value: 21
  misc_feature: MA Experiment 20000265 PARAMETER Experiment Name: At_Open_Flower_P Parameter: Plant Line Value: WS
  misc_feature: MA Experiment 20000265 PARAMETER Experiment Name: At_Open_Flower_P Parameter: Tissue Value: Closed Flower vs. Whole Plant
  misc_feature: MA Experiment ID: 20000286 Result: Down-regulated in Transcription
  misc_feature: MA Experiment 20000286 PARAMETER Experiment Name: At_Open_Flower_P Parameter: Age (day) Value: 21
  misc_feature: MA Experiment 20000286 PARAMETER Experiment Name: At_Open_Flower_P Parameter: Plant Line Value: WS
  misc_feature: MA Experiment 20000286 PARAMETER Experiment Name: At_Open_Flower_P Parameter: Tissue Value: Half Open vs. Whole Plant
  misc_feature: MA Experiment ID: 20000438 Result: Down-regulated in Transcription
  misc_feature: MA Experiment 20000438 PARAMETER Experiment Name: At_Shoots__P Parameter: Age (day) Value: 14
  misc_feature: MA Experiment 20000438 PARAMETER Experiment Name: At_Shoots__P Parameter: Tissue Value: Shoots vs. Whole Plant
  misc_feature: MA Experiment ID: 20001911 Result: Up-regulated in Transcription
  misc_feature: MA Experiment 20001911 PARAMETER Experiment Name: At_Drought_Reproduction_P Parameter: Age (day) Value: 40
  misc_feature: MA Experiment 20001911 PARAMETER Experiment Name: At_Drought_Reproduction_P Parameter: Organism Value: A. thaliana
  misc_feature: MA Experiment 20001911 PARAMETER Experiment Name: At_Drought_Reproduction_P Parameter: Plant Line Value: WS
  misc_feature: MA Experiment 20001911 PARAMETER Experiment Name: At_Drought_Reproduction_P Parameter: Timepoint (day) Value: 10
  misc_feature: MA Experiment 20001911 PARAMETER Experiment Name: At_Drought_Reproduction_P Parameter: Tissue Value: Flowers
  misc_feature: MA Experiment 20001911 PARAMETER Experiment Name: At_Drought_Reproduction_P Parameter: Treatment Value: Drought vs. No Drought
aaagaagacttttgtaagaaaataaacacacaactaaagagatgtcgtcaaccttgagcaacgaagagtcaggactcggtgattcaaatcgttcgacggaagtagatggcggcgacggaggaaacttcacggcttacgagtctcggattccagtcgcagcggtttgactcttccttctctaattttgactcccaaccggagaaagagtcagacttaccatgcggcgattcatctcctcgacccgaaactcaatctccgccgtcgataaatagtttcgatgatacaaacgattcgatcttgccgccaccatcggccatggagaaagaggaaggtttcgctcttagagagtggcgaaggctaaatgctctgagattggaagagaaagaaaaggaagagaaagaaatggttcaacaaattctagaagcagcagagcaatataaggctgagttctatagcaagcgtaacgttactattgaaaacaacaagaaactaaaccgcgagaaagagaagttttttttggagaatcaagaaaagttttacgctgaagctgacaaaaacaattggaaggcgattgcagaactcattcctcgtgaagtgccagttatagagaatagagggaacaagaagaaaacagcaaccataactgtaatccagggaccaaagccagggaagcccactgatctgtctcgtatgcgtcaagtgctcacgaaactcaagcacaatccgccaactcatatgaagccaaaactgccctcaccatctggagctgacccgaatgtgagtgtgagtgaacaggtcacagttacagagaagttgtagttgtgtatgtgacaagttaacttcttcttgattgatgttaaaccgtctttactttgttagcttccctcatgttcagtctcgactattgtttgttttgatttcgtctttggtcttaccattgttggtttcccacacagttttctactttgatgtatatataatatattc

SEQ ID NO: 101520 - protein, 237 aa, Arabidopsis thaliana
  peptide (1)..(237): Ceres Seq. ID no. 13608069
  misc_feature (74)..(207): Pfam Name: Clathrin light chain Pfam Description: Clathrin light chain
  misc_feature (1)..(237): Homolog of NCBI NO: 18409442 NR Description: expressed protein [Arabidopsis thaliana]
  misc_feature (1)..(237): Homolog of NCBI NO: 11291712 NR Description: hypothetical protein [imported] - Arabidopsis
  misc_feature (71)..(237): Homolog of NCBI NO: 21617999 NR Description: unknown [Arabidopsis thaliana]
  misc_feature (17)..(229): Homolog of NCBI NO: 18405251 NR Description: expressed protein [Arabidopsis thaliana]
  misc_feature (17)..(229): Homolog of NCBI NO: 21593842 NR Description: unknown [Arabidopsis thaliana]
  misc_feature (17)..(222): Homolog of NCBI NO: 18399468 NR Description: expressed protein [Arabidopsis thaliana]
  misc_feature (17)..(222): Homolog of NCBI NO: 21536711 NR Description: unknown [Arabidopsis thaliana]
  misc_feature (40)..(222): Homolog of NCBI NO: 32487391 NR Description: OSJNBb0017I01.5 [Oryza sativa (japonica
MAATEETSRLTSLGFQSQRFDSSFSNFDSQPEKESDLPCGDSSPRPETQSPPSINSFDDTNDSILPPPSAMEKEEGFALREWRRLNALRLEEKEKEEKEMVQQILEAAEQYKAEFYSKRNVTIENNKKLNREKEKFFLENQEKFYAEADKNNWKAIAELIPREVPVIENRGNKKKTATITVIQGPKPGKPTDLSRMRQVLTKLKHNPPTHMKPKLPSPSGADPNVSVSEQVTVTEKL

SEQ ID NO: 101521 - protein, 167 aa, Arabidopsis thaliana; identical to SEQ ID NO: 38029
  peptide (1)..(167): Ceres Seq. ID no. 13608070
  misc_feature (4)..(137): Pfam Name: Clathrin light chain Pfam Description: Clathrin light chain
  misc_feature (1)..(167): Homolog of NCBI NO: 18409442 NR Description: expressed protein [Arabidopsis thaliana]
  misc_feature (1)..(167): Homolog of NCBI NO: 11291712 NR Description: hypothetical protein [imported] - Arabidopsis
  misc_feature (1)..(167): Homolog of NCBI NO: 21617999 NR Description: unknown [Arabidopsis thaliana]
  misc_feature (1)..(159): Homolog of NCBI NO: 18405251 NR Description: expressed protein [Arabidopsis thaliana]
  misc_feature (1)..(159): Homolog of NCBI NO: 21593842 NR Description: unknown [Arabidopsis thaliana]
  misc_feature (1)..(152): Homolog of NCBI NO: 18399468 NR Description: expressed protein [Arabidopsis thaliana]
  misc_feature (1)..(152): Homolog of NCBI NO: 21536711 NR Description: unknown [Arabidopsis thaliana]
  misc_feature (1)..(152): Homolog of NCBI NO: 32487391 NR Description: OSJNBb0017I01.5 [Oryza sativa (japonica

SEQ ID NO: 101522 - protein, 138 aa, Arabidopsis thaliana; identical to SEQ ID NO: 38030
  peptide (1)..(138): Ceres Seq. ID no. 13608071
  misc_feature (1)..(108): Pfam Name: Clathrin light chain Pfam Description: Clathrin light chain
  misc_feature (1)..(138): Homolog of NCBI NO: 18409442 NR Description: expressed protein [Arabidopsis thaliana]
  misc_feature (1)..(138): Homolog of NCBI NO: 11291712 NR Description: hypothetical protein [imported] - Arabidopsis
  misc_feature (1)..(138): Homolog of NCBI NO: 21617999 NR Description: unknown [Arabidopsis thaliana]
  misc_feature (1)..(130): Homolog of NCBI NO: 18405251 NR Description: expressed protein [Arabidopsis thaliana]
  misc_feature (1)..(130): Homolog of NCBI NO: 21593842 NR Description: unknown [Arabidopsis thaliana]
  misc_feature (1)..(123): Homolog of NCBI NO: 18399468 NR Description: expressed protein [Arabidopsis thaliana]
  misc_feature (1)..(123): Homolog of NCBI NO: 21536711 NR Description: unknown [Arabidopsis thaliana]
  misc_feature (1)..(123): Homolog of NCBI NO: 32487391 NR Description: OSJNBb0017I01.5 [Oryza sativa (japonica

SEQ ID NO: 101523 - DNA, 1679 bp, Arabidopsis thaliana
  misc_feature (1)..(1679): Ceres Seq. ID no. 13608072
  misc_feature: MA Experiment ID: 20000173 Result: Down-regulated in Transcription
  misc_feature: MA Experiment 20000173 PARAMETER Experiment Name: At_42deg_Heat_P Parameter: Age (day) Value: 14
  misc_feature: MA Experiment 20000173 PARAMETER Experiment Name: At_42deg_Heat_P Parameter: Organism Value: A. thaliana
  misc_feature: MA Experiment 20000173 PARAMETER Experiment Name: At_42deg_Heat_P Parameter: Plant Line Value: WS
  misc_feature: MA Experiment 20000173 PARAMETER Experiment Name: At_42deg_Heat_P Parameter: Temperature (deg C) Value: 42 vs. 22
  misc_feature: MA Experiment 20000173 PARAMETER Experiment Name: At_42deg_Heat_P Parameter: Timepoint (hr) Value: 6
  misc_feature: MA Experiment 20000173 PARAMETER Experiment Name: At_42deg_Heat_P Parameter: Tissue Value: Aerial
  misc_feature: MA Experiment ID: 20000180 Result: Down-regulated in Transcription
  misc_feature: MA Experiment 20000180 PARAMETER Experiment Name: At_Germinating_Seeds_P Parameter: Age (hr) Value: 24 vs. 0
  misc_feature: MA Experiment 20000180 PARAMETER Experiment Name: At_Germinating_Seeds_P Parameter: Tissue Value: Germinating Seeds
  misc_feature: MA Experiment ID: 20000184 Result: Down-regulated in Transcription
  misc_feature: MA Experiment 20000184 PARAMETER Experiment Name: At_Shoots__P Parameter: Age (day) Value: 7
  misc_feature: MA Experiment 20000184 PARAMETER Experiment Name: At_Shoots__P Parameter: Tissue Value: Shoots vs. Whole Plant
  misc_feature: MA Experiment ID: 20000185 Result: Down-regulated in Transcription
  misc_feature: MA Experiment 20000185 PARAMETER Experiment Name: At_Roots__P Parameter: Age (day) Value: 7 vs. 21
  misc_feature: MA Experiment 20000185 PARAMETER Experiment Name: At_Roots__P Parameter: Organism Value: A. thaliana
  misc_feature: MA Experiment 20000185 PARAMETER Experiment Name: At_Roots__P Parameter: Tissue Value: Roots vs. Whole Plant
  misc_feature: MA Experiment ID: 20000213 Result: Up-regulated in Transcription
  misc_feature: MA Experiment 20000213 PARAMETER Experiment Name: At_4deg_Cold_P Parameter: Timepoint (hr) Value: 2
  misc_feature: MA Experiment ID: 20000437 Result: Up-regulated in Transcription
  misc_feature: MA Experiment 20000437 PARAMETER Experiment Name: At_Drought_P Parameter: Age (day) Value: 8
  misc_feature: MA Experiment 20000437 PARAMETER Experiment Name: At_Drought_P Parameter: Organism Value: A. thaliana
  misc_feature: MA Experiment 20000437 PARAMETER Experiment Name: At_Drought_P Parameter: Plant Line Value: WS
  misc_feature: MA Experiment 20000437 PARAMETER Experiment Name: At_Drought_P Parameter: Timepoint (hr) Value: 24
  misc_feature: MA Experiment 20000437 PARAMETER Experiment Name: At_Drought_P Parameter: Tissue Value: Whole Plant
  misc_feature: MA Experiment 20000437 PARAMETER Experiment Name: At_Drought_P Parameter: Treatment Value: Drought vs. No Drought
  misc_feature: MA Experiment ID: 20000438 Result: Down-regulated in Transcription
  misc_feature: MA Experiment 20000438 PARAMETER Experiment Name: At_Shoots__P Parameter: Age (day) Value: 14
  misc_feature: MA Experiment 20000438 PARAMETER Experiment Name: At_Shoots__P Parameter: Tissue Value: Shoots vs. Whole Plant
  misc_feature: MA Experiment ID: 20000495 Result: Up-regulated in Transcription
  misc_feature: MA Experiment 20000495 PARAMETER Experiment Name: At_Guard_Cells_P Parameter: Harvest Date Value: 8/2/2002
  misc_feature: MA Experiment 20000495 PARAMETER Experiment Name: At_Guard_Cells_P Parameter: Organism Value: A. thaliana
  misc_feature: MA Experiment 20000495 PARAMETER Experiment Name: At_Guard_Cells_P Parameter: Tissue Value: Guard Cells vs. Leaves
  misc_feature: MA Experiment ID: 20000794 Result: Up-regulated in Transcription
  misc_feature: MA Experiment 20000794 PARAMETER Experiment Name: At_Petals_P Parameter: Age (day) Value: 23-25 days
  misc_feature: MA Experiment 20000794 PARAMETER Experiment Name: At_Petals_P Parameter: Plant Line Value: WS
  misc_feature: MA Experiment 20000794 PARAMETER Experiment Name: At_Petals_P Parameter: Tissue Value: Petals vs. Whole plant
  misc_feature: MA Experiment ID: 20001247 Result: Down-regulated in Transcription
  misc_feature: MA Experiment 20001247 PARAMETER Experiment Name: At_Far-red-induction_P Parameter: Age (day) Value: 7
  misc_feature: MA Experiment 20001247 PARAMETER Experiment Name: At_Far-red-induction_P Parameter: Light Value: Far-red vs. White
  misc_feature: MA Experiment 20001247 PARAMETER Experiment Name: At_Far-red-induction_P Parameter: Organism Value: A. thaliana
  misc_feature: MA Experiment 20001247 PARAMETER Experiment Name: At_Far-red-induction_P Parameter: Plant Line Value: Columbia
  misc_feature: MA Experiment 20001247 PARAMETER Experiment Name: At_Far-red-induction_P Parameter: Timepoint (hr) Value: 1
  misc_feature: MA Experiment 20001247 PARAMETER Experiment Name: At_Far-red-induction_P Parameter: Tissue Value: Whole Plant
  misc_feature: MA Experiment ID: 20001248 Result: Up-regulated in Transcription
  misc_feature: MA Experiment 20001248 PARAMETER Experiment Name: At_Far-red-induction_P Parameter: Age (day) Value: 7
  misc_feature: MA Experiment 20001248 PARAMETER Experiment Name: At_Far-red-induction_P Parameter: Light Value: Far-red vs. White
  misc_feature: MA Experiment 20001248 PARAMETER Experiment Name: At_Far-red-induction_P Parameter: Organism Value: A. thaliana
  misc_feature: MA Experiment 20001248 PARAMETER Experiment Name: At_Far-red-induction_P Parameter: Plant Line Value: Columbia
  misc_feature: MA Experiment 20001248 PARAMETER Experiment Name: At_Far-red-induction_P Parameter: Timepoint (hr) Value: 4
  misc_feature: MA Experiment 20001248 PARAMETER Experiment Name: At_Far-red-induction_P Parameter: Tissue Value: Whole Plant
  misc_feature: MA Experiment ID: 20001558 Result: Down-regulated in Transcription
  misc_feature: MA Experiment 20001558 PARAMETER Experiment Name: At_Drought_Soil_Dry_P Parameter: Age (day) Value: 27
  misc_feature: MA Experiment 20001558 PARAMETER Experiment Name: At_Drought_Soil_Dry_P Parameter: Organism Value: A. thaliana
  misc_feature: MA Experiment 20001558 PARAMETER Experiment Name: At_Drought_Soil_Dry_P Parameter: Plant Line Value: WS
  misc_feature: MA Experiment 20001558 PARAMETER Experiment Name: At_Drought_Soil_Dry_P Parameter: Post Timepoint (hr) Value: 6
  misc_feature: MA Experiment 20001558 PARAMETER Experiment Name: At_Drought_Soil_Dry_P Parameter: Post-Treatment Value: Re-Water vs. No Drought
  misc_feature: MA Experiment 20001558 PARAMETER Experiment Name: At_Drought_Soil_Dry_P Parameter: Timepoint (day) Value: 13
  misc_feature: MA Experiment 20001558 PARAMETER Experiment Name: At_Drought_Soil_Dry_P Parameter: Treatment Value: Drought vs. No Drought
  misc_feature: MA Experiment ID: 20001560 Result: Down-regulated in Transcription
  misc_feature: MA Experiment 20001560 PARAMETER Experiment Name: At_Drought_Soil_Dry_P Parameter: Age (day) Value: 28
  misc_feature: MA Experiment 20001560 PARAMETER Experiment Name: At_Drought_Soil_Dry_P Parameter: Organism Value: A. thaliana
  misc_feature: MA Experiment 20001560 PARAMETER Experiment Name: At_Drought_Soil_Dry_P Parameter: Plant Line Value: WS
  misc_feature: MA Experiment 20001560 PARAMETER Experiment Name: At_Drought_Soil_Dry_P Parameter: Post Timepoint (hr) Value: None
  misc_feature: MA Experiment 20001560 PARAMETER Experiment Name: At_Drought_Soil_Dry_P Parameter: Post-Treatment Value: None
  misc_feature: MA Experiment 20001560 PARAMETER Experiment Name: At_Drought_Soil_Dry_P Parameter: Timepoint (day) Value: 14
  misc_feature: MA Experiment 20001560 PARAMETER Experiment Name: At_Drought_Soil_Dry_P Parameter: Treatment Value: Drought vs. No Drought
  misc_feature: MA Experiment ID: 20001905 Result: Down-regulated in Transcription
  misc_feature: MA Experiment 20001905 PARAMETER Experiment Name: At_Drought_Reproduction_P Parameter: Age (day) Value: 40
  misc_feature: MA Experiment 20001905 PARAMETER Experiment Name: At_Drought_Reproduction_P Parameter: Organism Value: A. thaliana
  misc_feature: MA Experiment 20001905 PARAMETER Experiment Name: At_Drought_Reproduction_P Parameter: Plant Line Value: WS
  misc_feature: MA Experiment 20001905 PARAMETER Experiment Name: At_Drought_Reproduction_P Parameter: Timepoint (day) Value: 10
  misc_feature: MA Experiment 20001905 PARAMETER Experiment Name: At_Drought_Reproduction_P Parameter: Tissue Value: Rosettes
  misc_feature: MA Experiment 20001905 PARAMETER Experiment Name: At_Drought_Reproduction_P Parameter: Treatment Value: Drought vs. No Drought
atggcagttcgtgtcgaagctactacaaacacacttgtcgtctcttctctctctcgcagctcttctctattttcagcaatcgcctataatattagttttgacatttatatgaacgttcctgccttttgcttttggtcttctttgcttgctcttatgcaagtaaagctaaaagggtctgattcgtttgttttttcactgaagaatttggaaggaagtgattccgttgtgaaacagaaaagaagtatgggtactcacattgatatcaacaacttaggcggcgatacttctagagggaatgagtcaaagccattggcgaggcagtcttcgttatattccttaacgtttgatgagcttcagagcacattaggtgagccggggaaagattttgggtctatgaatatggatgagttactcaagaacatatggactgctgaggatactcaagcctttatgactactacatcttcggttgcagccccgggacctagtggttttgttccgggaggaaatggtttacagaggcaaggctccttgaccttgcctagaacgcttagtcagaagactgtcgatgaagtctggaaatacctgaattcgaaagaaggtagtaatgggaatactggaacggatgcgcttgagaggcaacagactttaggggaaatgactctggaagatttcttactccgtgctggcgttgttaaagaagataatactcagcagaacgaaaacagtagtagcgggttttatgctaacaacggtgctgctggtttggagtttggatttggtcagccgaatcaaaacagcatatcgttcaacgggaacaatagttctatgatcatgaatcaagcacctggtttaggcctcaaagttggtggaaccatgcagcagcagcagcagccacatcagcagcagttgcagcagccacatcagagactgcctccaactatctttccaaaacaagcgaatgtaacatttgcggcgcctgtaaatatggtcaacaggggtttatttgagactagcgcagatggtccagccaacagtaatatgggaggagcagggggtactgttacagctacttctcctgggacgagcagtgcagaaaacaatacttggtcatcaccagttccttacgtgtttggtcggggaagaagaagcaatacgggcctggagaaggttgttgagagaaggcaaaagagaatgatcaagaatcgggaatccgctgctagatcaagggctcgaaaacaggcttataccttggaactggaagctgagattgaaagtctcaagctagtgaatcaagatttgcagaagaaacaggctgaaataatgaaaacccataatagtgagctaaaggaattttcgaagcagcctccattgctggccaaaagacaatgcttgagaagaacccttaccggtccgtggtaagaaggtgaagtcaaagcaagaagaacctgctaatgtaatacaggaccactcaaaaggaagacactgggagagtaatatgtaatagaagatagtgctactgtacaggagaaattacagagacgcttacaatgtagaaatcttttgagctgaatttaactaagagtgcagtctgtgtagagtatgagagctttcaatatgaattcataattttcataaacatatgtaaaactttcagatttagctatagagaagatgtg

SEQ ID NO: 101524 - protein, 473 aa, Arabidopsis thaliana
  peptide (1)..(473): Ceres Seq. ID no. 13608073
  misc_feature (390)..(448): Pfam Name: bZIP transcription factor Pfam Description: bZIP transcription factor
  misc_feature (82)..(473): Homolog of NCBI NO: 18402757 NR Description: abscisic acid responsive elements-binding factor
  misc_feature (82)..(414): Homolog of NCBI NO: 25373979 NR Description: hypothetical protein F14J22.7 [imported] - thaliana >gi|10120429|gb|AAG13054.1|AC011807_13 Unknown protein
  misc_feature (82)..(330): Homolog of NCBI NO: 7406677 NR Description: putative ripening-related bZIP protein [Vitis
  misc_feature (331)..(473): Homolog of NCBI NO: 7406677 NR Description: putative ripening-related bZIP protein [Vitis
  misc_feature (202)..(473): Homolog of NCBI NO: 18402186 NR Description: abscisic acid responsive elements-binding factor
  misc_feature (156)..(333): Homolog of NCBI NO: 18418350 NR Description: abscisic acid responsive elements-binding [Arabidopsis thaliana] >gi|6739280|gb|AAF27181.1|AF093546_1
  misc_feature (343)..(473): Homolog of NCBI NO: 18418350 NR Description: abscisic acid responsive elements-binding [Arabidopsis thaliana] >gi|6739280|gb|AAF27181.1|AF093546_1
  misc_feature (101)..(171): Homolog of NCBI NO: 18418350 NR Description: abscisic acid responsive elements-binding [Arabidopsis thaliana] >gi|6739280|gb|AAF27181.1|AF093546_1
  misc_feature (82)..(473): Homolog of NCBI NO: 18402186 NR Description: abscisic acid responsive elements-binding factor
  misc_feature (82)..(451): Homolog of NCBI NO: 11994451 NR Description: abscisic acid responsive elements-binding factor
MAVRVEATTNTLVVSSLSRSSSLFSAIAYNISFDIYMNVPAFCFWSSLLALMQVKLKGSDSFVFSLKNLEGSDSVVKQKRSMGTHIDINNLGGDTSRGNESKPLARQSSLYSLTFDELQSTLGEPGKDFGSMNMDELLKNIWTAEDTQAFMTTTSSVAAPGPSGFVPGGNGLQRQGSLTLPRTLSQKTVDEVWKYLNSKEGSNGNTGTDALERQQTLGEMTLEDFLLRAGVVKEDNTQQNENSSSGFYANNGAAGLEFGFGQPNQNSISFNGNNSSMIMNQAPGLGLKVGGTMQQQQQPHQQQLQQPHQRLPPTIFPKQANVTFAAPVNMVNRGLFETSADGPANSNMGGAGGTVTATSPGTSSAENNTWSSPVPYVFGRGRRSNTGLEKVVERRQKRMIKNRESAARSRARKQAYTLELEAEIESLKLVNQDLQKKQAEIMKTHNSELKEFSKQPPLLAKRQCLRRTLTGPW

SEQ ID NO: 101525 - protein, 437 aa, Arabidopsis thaliana
  peptide (1)..(437): Ceres Seq. ID no. 13608074
  misc_feature (354)..(412): Pfam Name: bZIP transcription factor Pfam Description: bZIP transcription factor
  misc_feature (46)..(437): Homolog of NCBI NO: 18402757 NR Description: abscisic acid responsive elements-binding factor
  misc_feature (46)..(378): Homolog of NCBI NO: 25373979 NR Description: hypothetical protein F14J22.7 [imported] - thaliana >gi|10120429|gb|AAG13054.1|AC011807_13 Unknown protein
  misc_feature (46)..(294): Homolog of NCBI NO: 7406677 NR Description: putative ripening-related bZIP protein [Vitis
  misc_feature (295)..(437): Homolog of NCBI NO: 7406677 NR Description: putative ripening-related bZIP protein [Vitis
  misc_feature (166)..(437): Homolog of NCBI NO: 18402186 NR Description: abscisic acid responsive elements-binding factor
  misc_feature (120)..(297): Homolog of NCBI NO: 18418350 NR Description: abscisic acid responsive elements-binding [Arabidopsis thaliana] >gi|6739280|gb|AAF27181.1|AF093546_1
  misc_feature (307)..(437): Homolog of NCBI NO: 18418350 NR Description: abscisic acid responsive elements-binding [Arabidopsis thaliana] >gi|6739280|gb|AAF27181.1|AF093546_1
  misc_feature (65)..(135): Homolog of NCBI NO: 18418350 NR Description: abscisic acid responsive elements-binding [Arabidopsis thaliana] >gi|6739280|gb|AAF27181.1|AF093546_1
  misc_feature (46)..(437): Homolog of NCBI NO: 18402186 NR Description: abscisic acid responsive elements-binding factor
  misc_feature (46)..(415): Homolog of NCBI NO: 11994451 NR Description: abscisic acid responsive elements-binding factor
MNVPAFCFWSSLLALMQVKLKGSDSFVFSLKNLEGSDSVVKQKRSMGTHIDINNLGGDTSRGNESKPLARQSSLYSLTFDELQSTLGEPGKDFGSMNMDELLKNIWTAEDTQAFMTTTSSVAAPGPSGFVPGGNGLQRQGSLTLPRTLSQKTVDEVWKYLNSKEGSNGNTGTDALERQQTLGEMTLEDFLLRAGVVKEDNTQQNENSSSGFYANNGAAGLEFGFGQPNQNSISFNGNNSSMIMNQAPGLGLKVGGTMQQQQQPHQQQLQQPHQRLPPTIFPKQANVTFAAPVNMVNRGLFETSADGPANSNMGGAGGTVTATSPGTSSAENNTWSSPVPYVFGRGRRSNTGLEKVVERRQKRMIKNRESAARSRARKQAYTLELEAEIESLKLVNQDLQKKQAEIMKTHNSELKEFSKQPPLLAKRQCLRRTLTGPW

SEQ ID NO: 101526 - protein, 422 aa, Arabidopsis thaliana
  peptide (1)..(422): Ceres Seq. ID no. 13608075
  misc_feature (339)..(397): Pfam Name: bZIP transcription factor Pfam Description: bZIP transcription factor
  misc_feature (31)..(422): Homolog of NCBI NO: 18402757 NR Description: abscisic acid responsive elements-binding factor
  misc_feature (31)..(363): Homolog of NCBI NO: 25373979 NR Description: hypothetical protein F14J22.7 [imported] - thaliana >gi|10120429|gb|AAG13054.1|AC011807_13 Unknown protein
  misc_feature (31)..(279): Homolog of NCBI NO: 7406677 NR Description: putative ripening-related bZIP protein [Vitis
  misc_feature (280)..(422): Homolog of NCBI NO: 7406677 NR Description: putative ripening-related bZIP protein [Vitis
  misc_feature (151)..(422): Homolog of NCBI NO: 18402186 NR Description: abscisic acid responsive elements-binding factor
  misc_feature (105)..(282): Homolog of NCBI NO: 18418350 NR Description: abscisic acid responsive elements-binding [Arabidopsis thaliana] >gi|6739280|gb|AAF27181.1|AF093546_1
  misc_feature (292)..(422): Homolog of NCBI NO: 18418350 NR Description: abscisic acid responsive elements-binding [Arabidopsis thaliana] >gi|6739280|gb|AAF27181.1|AF093546_1
  misc_feature (50)..(120): Homolog of NCBI NO: 18418350 NR Description: abscisic acid responsive elements-binding [Arabidopsis thaliana] >gi|6739280|gb|AAF27181.1|AF093546_1
  misc_feature (31)..(422): Homolog of NCBI NO: 18402186 NR Description: abscisic acid responsive elements-binding factor
  misc_feature (31)..(400): Homolog of NCBI NO: 11994451 NR Description: abscisic acid responsive elements-binding factor
MQVKLKGSDSFVFSLKNLEGSDSVVKQKRSMGTHIDINNLGGDTSRGNESKPLARQSSLYSLTFDELQSTLGEPGKDFGSMNMDELLKNIWTAEDTQAFMTTTSSVAAPGPSGFVPGGNGLQRQGSLTLPRTLSQKTVDEVWKYLNSKEGSNGNTGTDALERQQTLGEMTLEDFLLRAGVVKEDNTQQNENSSSGFYANNGAAGLEFGFGQPNQNSISFNGNNSSMIMNQAPGLGLKVGGTMQQQQQPHQQQLQQPHQRLPPTIFPKQANVTFAAPVNMVNRGLFETSADGPANSNMGGAGGTVTATSPGTSSAENNTWSSPVPYVFGRGRRSNTGLEKVVERRQKRMIKNRESAARSRARKQAYTLELEAEIESLKLVNQDLQKKQAEIMKTHNSELKEFSKQPPLLAKRQCLRRTLTGPW

SEQ ID NO: 101527 - DNA, 1410 bp, Arabidopsis thaliana
  misc_feature (1)..(1410): Ceres Seq. ID no. 13608076
  misc_feature: MA Experiment ID: 108434 Result: Up-regulated in Transcription
  misc_feature: MA Experiment 108434 PARAMETER Experiment Name: At_Root_Tips_cDNA_P Parameter: Tissue Value: Root Tips
  misc_feature: MA Experiment ID: 20000179 Result: Up-regulated in Transcription
  misc_feature: MA Experiment 20000179 PARAMETER Experiment Name: At_Germinating_Seeds_P Parameter: Age (hr) Value: 6 vs. 0
  misc_feature: MA Experiment 20000179 PARAMETER Experiment Name: At_Germinating_Seeds_P Parameter: Tissue Value: Germinating Seeds
aaaaatatttatgttgggtcaggcttaaaccagagagagagtgtgtgtggtcgagccatttgaccaaaagcaaaaacttaaaactggtttcagatctgaagtaaaagggttttgcttcggattctccggcgtcgtttaaatgatctctgacccatcttccttggcttaataattctggtccctccttttatctctttttactgttgatttatctgaatatgccacgctctttcttccacatgtttattctctcttcctttcttcaacacaagcgtctggactaaggaaagccaacaacaaaatctggtttcaagacggttggcaggagtttgtcaaccgtttctccattcggattggtttcagatacaaagttacagtctacattttcaatttatcctccacactctgagatcaaccaccattctagtagtgaagctcttatgcaaatggattccgcacagaatcagttcaacaaacgtgctcgattgtttgaagatcctgaactcaaagatgctaaggtcatttatccatcgaaccctgaatctactgaaccagtgaataaaggttatggcggttctacagccatccaaagctttttcaaagaatctaaagctgaagaaacgcccaaggtacttaagaagagaggaaggaagaagaagaatcctaatcccgaggaagtaaactcttcaactcccggtggagatgactcagagaaccgctcaaagttctacgagagtgcttctgctagaaagagaactgtaactgcagaggaaagagagagagccgtcaatgcagccaaaacattcgaaccaacaaatccttactttagagttgttctgcgaccatcatatctatacagaggttgcatcatgtacttgccatctgggtttgctgagaaatacctaagtgggatatctggtttcatcaagctccagctcggtgagaaacaatggccagtgaggtgcctctacaaagcagggagagctaagtttagccaaggatggtatgagttcacactcgagaacaatataggcgaaggagatgtatgtgtgtttgagctactcagaactcgggatttcgttctcgaagtcaccgcctttcgtgtcaatgagtatgtgtgaccaaaaaagatttccctttcatcagcgatcttgcaggtagctttccaaagttaaaattttatgtaggggtctcttaaccattctctctcttgcattggttgtctctgttctagtagtgttttgagtgaaatttcaggttcctatgtttggatgtggataagtatttgacgattataataacctctgagtgggaaactctttgtttgagtggtagctaggttcaaaagtagagttgtatatacttttatcttcatcaggataattatgtttatttgaattgttgattatt

SEQ ID NO: 101528 - protein, 226 aa, Arabidopsis thaliana; identical to SEQ ID NO: 39670
  peptide (1)..(226): Ceres Seq. ID no. 13608077
  misc_feature (128)..(225): Pfam Name: B3 DNA binding domain Pfam Description: B3 DNA binding domain
  misc_feature (1)..(226): Homolog of NCBI NO: 18402653 NR Description: transcriptional factor B3 family [Arabidopsis
  misc_feature (1)..(226): Homolog of NCBI NO: 14596161 NR Description: Unknown protein [Arabidopsis thaliana]
  misc_feature (1)..(226): Homolog of NCBI NO: 30685150 NR Description: transcriptional factor B3 family [Arabidopsis >gi|21734794|gb|AAM76972.1|AF289051_1 reduced vernalization
  misc_feature (1)..(226): Homolog of NCBI NO: 40806799 NR Description: reduced vernalization response 1 [Brassica rapa]
  misc_feature (1)..(226): Homolog of NCBI NO: 33943517 NR Description: reduced vernalization response 1 [Brassica rapa]
  misc_feature (3)..(226): Homolog of NCBI NO: 9280316 NR Description: gb|AAD43153.1~gene_id:K13E13.10~similar to
  misc_feature (97)..(224): Homolog of NCBI NO: 34910734 NR Description: P0022F10.13 [Oryza sativa (japonica

SEQ ID NO: 101529 - protein, 224 aa, Arabidopsis thaliana; identical to SEQ ID NO: 39671
  peptide (1)..(224): Ceres Seq. ID no. 13608078
  misc_feature (126)..(223): Pfam Name: B3 DNA binding domain Pfam Description: B3 DNA binding domain
  misc_feature (1)..(224): Homolog of NCBI NO: 18402653 NR Description: transcriptional factor B3 family [Arabidopsis
  misc_feature (1)..(224): Homolog of NCBI NO: 14596161 NR Description: Unknown protein [Arabidopsis thaliana]
  misc_feature (1)..(224): Homolog of NCBI NO: 30685150 NR Description: transcriptional factor B3 family [Arabidopsis >gi|21734794|gb|AAM76972.1|AF289051_1 reduced vernalization
  misc_feature (1)..(224): Homolog of NCBI NO: 40806799 NR Description: reduced vernalization response 1 [Brassica rapa]
  misc_feature (1)..(224): Homolog of NCBI NO: 33943517 NR Description: reduced vernalization response 1 [Brassica rapa]
  misc_feature (1)..(224): Homolog of NCBI NO: 9280316 NR Description: gb|AAD43153.1~gene_id:K13E13.10~similar to
  misc_feature (95)..(222): Homolog of NCBI NO: 34910734 NR Description: P0022F10.13 [Oryza sativa (japonica

SEQ ID NO: 101530 - DNA, 844 bp, Arabidopsis thaliana
  misc_feature (1)..(844): Ceres Seq. ID no. 13608079
  misc_feature: MA Experiment ID: 20000180 Result: Up-regulated in Transcription
  misc_feature: MA Experiment 20000180 PARAMETER Experiment Name: At_Germinating_Seeds_P Parameter: Age (hr) Value: 24 vs. 0
  misc_feature: MA Experiment 20000180 PARAMETER Experiment Name: At_Germinating_Seeds_P Parameter: Tissue Value: Germinating Seeds
  misc_feature: MA Experiment ID: 20000184 Result: Down-regulated in Transcription
  misc_feature: MA Experiment 20000184 PARAMETER Experiment Name: At_Shoots__P Parameter: Age (day) Value: 7
  misc_feature: MA Experiment 20000184 PARAMETER Experiment Name: At_Shoots__P Parameter: Tissue Value: Shoots vs. Whole Plant
aaatggcgatcatgcgataatcgtgtagccgaagaagaagaagaagaagaagaaagaagatggtgttttgggagataactctaggaacagcttacttcttgggactgagacggacttataggctcgctctgaagatccagcgtcggcttgttactccgaaacatcccaaaatccgtcaatttcttcatcggaggactcgtaaaatcttcgatgtggcgatttcggttcacaagaacatacaagaaagagacatagaagttggtaggaatctcggaaattggattcttcgttggctcgataagatgaaaccagcagctcagatccgtactcggccagaactaccacacaacagcaattccaacatggacaaggcaaagagactaacggaattgtcccgtcccaaatcgcacacgaacacgacgcagactccacaaaaccgtgaatccgataggcatttgtttacctcgttgaaacacttccggcacaagccattcccgtctgtctctatgatgatccaaccgccgagacccaatggaactacgactcagtacagacattactacagtggcggtctagcagcaagtctgattcaaccgagctatgttacaggtggcgggttcaatggtgtagtcaggaaagacattttgcagtggatggcacaaagatgaaagatgatgcagctaagtcccatctttctctgacataattgagcctctctcttttctttttttaacttttaattgcagaaattaatgtgattgttgatagatcctgaagcaactatgtagtaaacatgacaatgtctttttctttctaacgcttgaataaagtttcatatactttg

SEQ ID NO: 101531 - protein, 202 aa, Arabidopsis thaliana
  peptide (1)..(202): Ceres Seq. ID no. 13608080
  misc_feature (1)..(202): Homolog of NCBI NO: 15222623 NR Description: expressed protein [Arabidopsis thaliana]
  misc_feature (1)..(202): Homolog of NCBI NO: 30686423 NR Description: expressed protein [Arabidopsis thaliana] unknown protein [Arabidopsis thaliana]
  misc_feature (45)..(202): Homolog of NCBI NO: 25370789 NR Description: hypothetical protein At2g35480 [imported] - thaliana >gi|3608140|gb|AAC36173.1| unknown protein [Arabidopsis
MVFWEITLGTAYFLGLRRTYRLALKIQRRLVTPKHPKIRQFLHRRTRKIFDVAISVHKNIQERDIEVGRNLGNWILRWLDKMKPAAQIRTRPELPHNSNSNMDKAKRLTELSRPKSHTNTTQTPQNRESDRHLFTSLKHFRHKPFPSVSMMIQPPRPNGTTTQYRHYYSGGLAASLIQPSYVTGGGFNGVVRKDILQWMAQR

SEQ ID NO: 101532 - protein, 121 aa, Arabidopsis thaliana
  peptide (1)..(121): Ceres Seq. ID no. 13608081
  misc_feature (1)..(121): Homolog of NCBI NO: 15222623 NR Description: expressed protein [Arabidopsis thaliana]
  misc_feature (1)..(121): Homolog of NCBI NO: 30686423 NR Description: expressed protein [Arabidopsis thaliana] unknown protein [Arabidopsis thaliana]
  misc_feature (1)..(121): Homolog of NCBI NO: 25370789 NR Description: hypothetical protein At2g35480 [imported] - thaliana >gi|3608140|gb|AAC36173.1| unknown protein [Arabidopsis
MKPAAQIRTRPELPHNSNSNMDKAKRLTELSRPKSHTNTTQTPQNRESDRHLFTSLKHFRHKPFPSVSMMIQPPRPNGTTTQYRHYYSGGLAASLIQPSYVTGGGFNGVVRKDILQWMAQR

SEQ ID NO: 101533 - protein, 101 aa, Arabidopsis thaliana
  peptide (1)..(101): Ceres Seq. ID no. 13608082
  misc_feature (1)..(101): Homolog of NCBI NO: 15222623 NR Description: expressed protein [Arabidopsis thaliana]
  misc_feature (1)..(101): Homolog of NCBI NO: 30686423 NR Description: expressed protein [Arabidopsis thaliana] unknown protein [Arabidopsis thaliana]
  misc_feature (1)..(101): Homolog of NCBI NO: 25370789 NR Description: hypothetical protein At2g35480 [imported] - thaliana >gi|3608140|gb|AAC36173.1| unknown protein [Arabidopsis
MDKAKRLTELSRPKSHTNTTQTPQNRESDRHLFTSLKHFRHKPFPSVSMMIQPPRPNGTTTQYRHYYSGGLAASLIQPSYVTGGGFNGVVRKDILQWMAQR

SEQ ID NO: 101534 - DNA, 2019 bp, Arabidopsis thaliana
  misc_feature (1)..(2019): Ceres Seq. ID no. 13608087
  misc_feature: MA Experiment ID: 108433 Result: Up-regulated in Transcription
  misc_feature: MA Experiment 108433 PARAMETER Experiment Name: At_rhl_Mutant2_cDNA_P Parameter: Age (day) Value: 7
  misc_feature: MA Experiment 108433 PARAMETER Experiment Name: At_rhl_Mutant2_cDNA_P Parameter: Organism Value: A. thaliana
  misc_feature: MA Experiment 108433 PARAMETER Experiment Name: At_rhl_Mutant2_cDNA_P Parameter: Plant Line Value: rhl Mutant vs. wt landsburg
  misc_feature: MA Experiment 108433 PARAMETER Experiment Name: At_rhl_Mutant2_cDNA_P Parameter: Tissue Value: Roots
  misc_feature: MA Experiment ID: 108434 Result: Down-regulated in Transcription
  misc_feature: MA Experiment 108434 PARAMETER Experiment Name: At_Root_Tips_cDNA_P Parameter: Tissue Value: Root Tips
  misc_feature: MA Experiment ID: 108464 Result: Up-regulated in Transcription
  misc_feature: MA Experiment 108464 PARAMETER Experiment Name: At_Germinating_Seeds_cDNA_P Parameter: Age (day) Value: 4 vs. 0
  misc_feature: MA Experiment 108464 PARAMETER Experiment Name: At_Germinating_Seeds_cDNA_P Parameter: Tissue Value: Germinating Seeds
  misc_feature: MA Experiment ID: 108569 Result: Up-regulated in Transcription
  misc_feature: MA Experiment 108569 PARAMETER Experiment Name: At_0.001%_MeJA__cDNA_P Parameter: Timepoint (hr) Value: 6
  misc_feature: MA Experiment 108569 PARAMETER Experiment Name: At_0.001%_MeJA__cDNA_P Parameter: Tissue Value: Aerial
  misc_feature: MA Experiment 108569 PARAMETER Experiment Name: At_0.001%_MeJA__cDNA_P Parameter: Treatment Value: 0.001% MeJA vs. No Treatment
  misc_feature: MA Experiment ID: 20000030 Result: Down-regulated in Transcription
  misc_feature: MA Experiment 20000030 PARAMETER Experiment Name: At_CS6630_Roots_cDNA_P Parameter: Plant Line Value: CS6630 vs. WS
  misc_feature: MA Experiment 20000030 PARAMETER Experiment Name: At_CS6630_Roots_cDNA_P Parameter: Tissue Value: Roots
atccaaaatctatctaccgccgatcaaaaaaccctagaatttcttccactgttatgtaagtttgatcttgttgtctccactaagaggcgaagagagaaagagggttttaggttgtgtgttctgtttcaaagggtttacttctcgttgaccccgatcgagatggttgattcttctcgtgattcgtgtttcaaagctggtaagtttagtgctccaggttttcgatttcaccctactgatgaagagcttgtggtttattatcttaagaggaagatctgttgtaaaaaacttcgagtcaatgccattggtgtcgttgatgtttacaaagtcgatccttctgaattgcctggtctatcgatgttgaagacgggagatagacagtggttctttttcactccaaggaataggaagtatcctaacgcagctaggtcaagtagaggtactgcaactggttattggaaggcgacaggaaaggatcgagtcattgagtacaattcaagatctgttggactcaagaagactcttgttttctatagaggtcgtgctcctaatggtgagagaactgactgggtgatgcatgagtacactatggatgaagaagagctagggagatgtaagaacgctaaggagtattatgctctttataagctttataagaagagtggggctggtcctaagaatggtgaacagtatggtgctccgttccaagaagaagaatgggttgatagtgatagtgaagatgcagatagtgtcgctgtaccggattatcccgtggtccgttatgagaatggtccttgtgtggatgatactaaattttgcaatcctgtcaaacttcagttagaggatattgagaagcttctcaatgaaatcccagatgcacccggggttaaccaaagacagtttgatgagtttgttggtgttccacagggtaatagtgcagaagtgatacagagcacattgctgaataattcttctggagagtatattgaccctcggacgaatggaatgttcttgccaaatggccagctatacaacagggactcgagttttcagtcccatttgaattcatttgaggctacctctggtatggcacctcttctagataatgagaaggaggagtacattgaaatgaatgatcttctgatccctgagctcggtgcttcttcaacagagaaatccacagagttcttgaaccatggtgaatttggtgatgttaatgaatacgaccaattgttcaatgacatatctgtttttcagggaacttctacagatctgtcttgtctgagtaattttactaataacacatcaggccaaagacagcaattactttatgaacagttccagtaccagacacctgagaaccagcttaataactacatgcatcctagtaccactcttaatcagttcactgacaatatgtggtttaaagatgatcaggctgctctctatgttcaaccaccacaatcttcttctggagcattcacttcacagtcaacaggtgtgatgcctgagtctatgaatcccactatgagtgtaaatccccaatacaaggaaggacaaaatggtggtggaacaaggagccagttctcatcagctctgtgggaattattggaatcaataccatcaacaccagcctctgcctgtgagggtcctcttaaccagacctttgtgcgtatgtctagcttcagccgcatcaggttcaatggaacgtcagtgactagtagaaaagtcactgtagcaaagaagcgtatcagtaacagaggttttcttctgttatcaattatgggtgctttgtgtgctatcttctgggtgttcaaagccaccgttggagttatgggaagacctctcttgtcgtgacctagactcttgaatcttgattcagcataagttagcctgatccacatctttgattatgtatagagtttgaaagagtttaattcttaacaaaagatttcttttttcctggattctctgatggctttgaaattttgcttgcacttatcatattaagcagaatttttg

SEQ ID NO: 101535 - protein, 617 aa, Arabidopsis thaliana
  peptide (1)..(617): Ceres Seq. ID no. 13608088
  misc_feature (69)..(197): Pfam Name: No apical meristem (NAM) protein Pfam Description: No apical meristem (NAM) protein
  misc_feature (54)..(617): Homolog of NCBI NO: 18399166 NR Description: No apical meristem (NAM) protein family
  misc_feature (54)..(617): Homolog of NCBI NO: 21618244 NR Description: NAM-like protein [Arabidopsis thaliana]
  misc_feature (54)..(617): Homolog of NCBI NO: 25518168 NR Description: BTF3b factor protein F23M19.14 - Arabidopsis >gi|5091626|gb|AAD39614.1|AC007454_13 Similar to gb|X92204 NAM
  misc_feature (54)..(616): Homolog of NCBI NO: 18399168 NR Description: NAM(no apical meristem) protein -related
  misc_feature (71)..(412): Homolog of NCBI NO: 21105742 NR Description: nam-like protein 7 [Petunia x hybrida]
  misc_feature (385)..(617): Homolog of NCBI NO: 21105742 NR Description: nam-like protein 7 [Petunia x hybrida]
  misc_feature (71)..(388): Homolog of NCBI NO: 21105740 NR Description: nam-like protein 6 [Petunia x hybrida]
  misc_feature (400)..(617): Homolog of NCBI NO: 21105740 NR Description: nam-like protein 6 [Petunia x hybrida]
  misc_feature (70)..(299): Homolog of NCBI NO: 14334572 NR Description: putative NAM protein [Arabidopsis thaliana]
  misc_feature (70)..(299): Homolog of NCBI NO: 18398627 NR Description: NAM protein -related [Arabidopsis thaliana]
IQNLSTADQKTLEFLPLLCKFDLVVSTKRRREKEGFRLCVLFQRVYFSLTPIEMVDSSRDSCFKAGKFSAPGFRFHPTDEELVVYYLKRKICCKKLRVNAIGVVDVYKVDPSELPGLSMLKTGDRQWFFFTPRNRKYPNAARSSRGTATGYWKATGKDRVIEYNSRSVGLKKTLVFYRGRAPNGERTDWVMHEYTMDEEELGRCKNAKEYYALYKLYKKSGAGPKNGEQYGAPFQEEEWVDSDSEDADSVAVPDYPVVRYENGPCVDDTKFCNPVKLQLEDIEKLLNEIPDAPGVNQRQFDEFVGVPQGNSAEVIQSTLLNNSSGEYIDPRTNGMFLPNGQLYNRDSSFQSHLNSFEATSGMAPLLDNEKEEYIEMNDLLIPELGASSTEKSTEFLNHGEFGDVNEYDQLFNDISVFQGTSTDLSCLSNFTNNTSGQRQQLLYEQFQYQTPENQLNNYMHPSTTLNQFTDNMWFKDDQAALYVQPPQSSSGAFTSQSTGVMPESMNPTMSVNPQYKEGQNGGGTRSQFSSALWELLESIPSTPASACEGPLNQTFVRMSSFSRIRFNGTSVTSRKVTVAKKRISNRGFLLLSIMGALCAIFWVFKATVGVMGRPLLS

SEQ ID NO: 101536 - protein, 564 aa, Arabidopsis thaliana
  peptide (1)..(564): Ceres Seq. ID no. 13608089
  misc_feature (16)..(144): Pfam Name: No apical meristem (NAM) protein Pfam Description: No apical meristem (NAM) protein
  misc_feature (1)..(564): Homolog of NCBI NO: 18399166 NR Description: No apical meristem (NAM) protein family
  misc_feature (1)..(564): Homolog of NCBI NO: 21618244 NR Description: NAM-like protein [Arabidopsis thaliana]
  misc_feature (1)..(564): Homolog of NCBI NO: 25518168 NR Description: BTF3b factor protein F23M19.14 - Arabidopsis >gi|5091626|gb|AAD39614.1|AC007454_13 Similar to gb|X92204 NAM
  misc_feature (1)..(563): Homolog of NCBI NO: 18399168 NR Description: NAM(no apical meristem) protein -related
  misc_feature (18)..(359): Homolog of NCBI NO: 21105742 NR Description: nam-like protein 7 [Petunia x hybrida]
  misc_feature (332)..(564): Homolog of NCBI NO: 21105742 NR Description: nam-like protein 7 [Petunia x hybrida]
  misc_feature (18)..(335): Homolog of NCBI NO: 21105740 NR Description: nam-like protein 6 [Petunia x hybrida]
  misc_feature (347)..(564): Homolog of NCBI NO: 21105740 NR Description: nam-like protein 6 [Petunia x hybrida]
  misc_feature (17)..(246): Homolog of NCBI NO: 14334572 NR Description: putative NAM protein [Arabidopsis thaliana]
  misc_feature (17)..(246): Homolog of NCBI NO: 18398627 NR Description: NAM protein -related [Arabidopsis thaliana]
MVDSSRDSCFKAGKFSAPGFRFHPTDEELVVYYLKRKICCKKLRVNAIGVVDVYKVDPSELPGLSMLKTGDRQWFFFTPRNRKYPNAARSSRGTATGYWKATGKDRVIEYNSRSVGLKKTLVFYRGRAPNGERTDWVMHEYTMDEEELGRCKNAKEYYALYKLYKKSGAGPKNGEQYGAPFQEEEWVDSDSEDADSVAVPDYPVVRYENGPCVDDTKFCNPVKLQLEDIEKLLNEIPDAPGVNQRQFDEFVGVPQGNSAEVIQSTLLNNSSGEYIDPRTNGMFLPNGQLYNRDSSFQSHLNSFEATSGMAPLLDNEKEEYIEMNDLLIPELGASSTEKSTEFLNHGEFGDVNEYDQLFNDISVFQGTSTDLSCLSNFTNNTSGQRQQLLYEQFQYQTPENQLNNYMHPSTTLNQFTDNMWFKDDQAALYVQPPQSSSGAFTSQSTGVMPESMNPTMSVNPQYKEGQNGGGTRSQFSSALWELLESIPSTPASACEGPLNQTFVRMSSFSRIRFNGTSVTSRKVTVAKKRISNRGFLLLSIMGALCAIFWVFKATVGVMGRPLLS

SEQ ID NO: 101537 - protein, 499 aa, Arabidopsis thaliana
  peptide (1)..(499): Ceres Seq. ID no. 13608090
  misc_feature (1)..(79): Pfam Name: No apical meristem (NAM) protein Pfam Description: No apical meristem (NAM) protein
  misc_feature (1)..(499): Homolog of NCBI NO: 18399166 NR Description: No apical meristem (NAM) protein family
  misc_feature (1)..(499): Homolog of NCBI NO: 21618244 NR Description: NAM-like protein [Arabidopsis thaliana]
  misc_feature (1)..(499): Homolog of NCBI NO: 25518168 NR Description: BTF3b factor protein F23M19.14 - Arabidopsis >gi|5091626|gb|AAD39614.1|AC007454_13 Similar to gb|X92204 NAM
  misc_feature (1)..(498): Homolog of NCBI NO: 18399168 NR Description: NAM(no apical meristem) protein -related
  misc_feature (1)..(294): Homolog of NCBI NO: 21105742 NR Description: nam-like protein 7 [Petunia x hybrida]
  misc_feature (267)..(499): Homolog of NCBI NO: 21105742 NR Description: nam-like protein 7 [Petunia x hybrida]
  misc_feature (1)..(270): Homolog of NCBI NO: 21105740 NR Description: nam-like protein 6 [Petunia x hybrida]
  misc_feature (282)..(499): Homolog of NCBI NO: 21105740 NR Description: nam-like protein 6 [Petunia x hybrida]
  misc_feature (1)..(181): Homolog of NCBI NO: 14334572 NR Description: putative NAM protein [Arabidopsis thaliana]
  misc_feature (1)..(181): Homolog of NCBI NO: 18398627 NR Description: NAM protein -related [Arabidopsis thaliana]
MLKTGDRQWFFFTPRNRKYPNAARSSRGTATGYWKATGKDRVIEYNSRSVGLKKTLVFYRGRAPNGERTDWVMHEYTMDEEELGRCKNAKEYYALYKLYKKSGAGPKNGEQYGAPFQEEEWVDSDSEDADSVAVPDYPVVRYENGPCVDDTKFCNPVKLQLEDIEKLLNEIPDAPGVNQRQFDEFVGVPQGNSAEVIQSTLLNNSSGEYIDPRTNGMFLPNGQLYNRDSSFQSHLNSFEATSGMAPLLDNEKEEYIEMNDLLIPELGASSTEKSTEFLNHGEFGDVNEYDQLFNDISVFQGTSTDLSCLSNFTNNTSGQRQQLLYEQFQYQTPENQLNNYMHPSTTLNQFTDNMWFKDDQAALYVQPPQSSSGAFTSQSTGVMPESMNPTMSVNPQYKEGQNGGGTRSQFSSALWELLESIPSTPASACEGPLNQTFVRMSSFSRIRFNGTSVTSRKVTVAKKRISNRGFLLLSIMGALCAIFWVFKATVGVMGRPLLS

SEQ ID NO: 101538 - DNA, 1220 bp, Arabidopsis thaliana
  misc_feature (1)..(1220): Ceres Seq. ID no. 13608091
  misc_feature: MA Experiment ID: 108434 Result: Down-regulated in Transcription
  misc_feature: MA Experiment 108434 PARAMETER Experiment Name: At_Root_Tips_cDNA_P Parameter: Tissue Value: Root Tips
  misc_feature: MA Experiment ID: 108461 Result: Down-regulated in Transcription
  misc_feature: MA Experiment 108461 PARAMETER Experiment Name: At_Germinating_Seeds_cDNA_P Parameter: Age (day) Value: 1 vs. 0
  misc_feature: MA Experiment 108461 PARAMETER Experiment Name: At_Germinating_Seeds_cDNA_P Parameter: Tissue Value: Germinating Seeds
  misc_feature: MA Experiment ID: 108462 Result: Down-regulated in Transcription
  misc_feature: MA Experiment 108462 PARAMETER Experiment Name: At_Germinating_Seeds_cDNA_P Parameter: Age (day) Value: 2 vs. 0
  misc_feature: MA Experiment 108462 PARAMETER Experiment Name: At_Germinating_Seeds_cDNA_P Parameter: Tissue Value: Germinating Seeds
  misc_feature: MA Experiment ID: 108488 Result: Down-regulated in Transcription
  misc_feature: MA Experiment ID: 108577 Result: Down-regulated in Transcription
  misc_feature: MA Experiment 108577 PARAMETER Experiment Name: At_42deg_Heat_cDNA_P Parameter: Temperature (deg C) Value: 42 vs. 22
  misc_feature: MA Experiment 108577 PARAMETER Experiment Name: At_42deg_Heat_cDNA_P Parameter: Timepoint (hr) Value: 6
  misc_feature: MA Experiment 108577 PARAMETER Experiment Name: At_42deg_Heat_cDNA_P Parameter: Tissue Value: Aerial
  misc_feature: MA Experiment ID: 20000069 Result: Up-regulated in Transcription
  misc_feature: MA Experiment 20000069 PARAMETER Experiment Name: At_100uM_ABA_Mutants_cDNA_P Parameter: Plant Line Value: CS23
  misc_feature: MA Experiment 20000069 PARAMETER Experiment Name: At_100uM_ABA_Mutants_cDNA_P Parameter: Timepoint (hr) Value: 6
  misc_feature: MA Experiment 20000069 PARAMETER Experiment Name: At_100uM_ABA_Mutants_cDNA_P Parameter: Tissue Value: Aerial
  misc_feature: MA Experiment 20000069 PARAMETER Experiment Name: At_100uM_ABA_Mutants_cDNA_P Parameter: Treatment Value: 100uM ABA vs. No Treatment
  misc_feature: MA Experiment ID: 20000070 Result: Up-regulated in Transcription
  misc_feature: MA Experiment 20000070 PARAMETER Experiment Name: At_100uM_ABA_Mutants_cDNA_P Parameter: Plant Line Value: CS24
  misc_feature: MA Experiment 20000070 PARAMETER Experiment Name: At_100uM_ABA_Mutants_cDNA_P Parameter: Timepoint (hr) Value: 6
  misc_feature: MA Experiment 20000070 PARAMETER Experiment Name: At_100uM_ABA_Mutants_cDNA_P Parameter: Tissue Value: Aerial
  misc_feature: MA Experiment 20000070 PARAMETER Experiment Name: At_100uM_ABA_Mutants_cDNA_P Parameter: Treatment Value: 100uM ABA vs. No Treatment
  misc_feature: MA Experiment ID: 20000071 Result: Up-regulated in Transcription
  misc_feature: MA Experiment 20000071 PARAMETER Experiment Name: At_100uM_ABA_Mutants_cDNA_P Parameter: Plant Line Value: CS8104
  misc_feature: MA Experiment 20000071 PARAMETER Experiment Name: At_100uM_ABA_Mutants_cDNA_P Parameter: Timepoint (hr) Value: 6
  misc_feature: MA Experiment 20000071 PARAMETER Experiment Name: At_100uM_ABA_Mutants_cDNA_P Parameter: Tissue Value: Aerial
  misc_feature: MA Experiment 20000071 PARAMETER Experiment Name: At_100uM_ABA_Mutants_cDNA_P Parameter: Treatment Value: 100uM ABA vs. No Treatment
  misc_feature: MA Experiment ID: 20000072 Result: Up-regulated in Transcription
  misc_feature: MA Experiment 20000072 PARAMETER Experiment Name: At_100uM_ABA_Mutants_cDNA_P Parameter: Plant Line Value: CS8105
  misc_feature: MA Experiment 20000072 PARAMETER Experiment Name: At_100uM_ABA_Mutants_cDNA_P Parameter: Timepoint (hr) Value: 6
  misc_feature: MA Experiment 20000072 PARAMETER Experiment Name: At_100uM_ABA_Mutants_cDNA_P Parameter: Tissue Value: Aerial
  misc_feature: MA Experiment 20000072 PARAMETER Experiment Name: At_100uM_ABA_Mutants_cDNA_P Parameter: Treatment Value: 100uM ABA vs. No Treatment
  misc_feature: MA Experiment ID: 20000086 Result: Up-regulated in Transcription
  misc_feature: MA Experiment 20000086 PARAMETER Experiment Name: At_100uM_ABA_Mutants_cDNA_P Parameter: Plant Line Value: CS22
  misc_feature: MA Experiment 20000086 PARAMETER Experiment Name: At_100uM_ABA_Mutants_cDNA_P Parameter: Timepoint (hr) Value: 6
  misc_feature: MA Experiment 20000086 PARAMETER Experiment Name: At_100uM_ABA_Mutants_cDNA_P Parameter: Tissue Value: Aerial
  misc_feature: MA Experiment 20000086 PARAMETER Experiment Name: At_100uM_ABA_Mutants_cDNA_P Parameter: Treatment Value: 100uM ABA vs. No Treatment
  misc_feature: MA Experiment ID: 20000088 Result: Up-regulated in Transcription
  misc_feature: MA Experiment 20000088 PARAMETER Experiment Name: At_100uM_ABA_Mutants_cDNA_P Parameter: Plant Line Value: Landsberg
  misc_feature: MA Experiment 20000088 PARAMETER Experiment Name: At_100uM_ABA_Mutants_cDNA_P Parameter: Timepoint (hr) Value: 6
  misc_feature: MA Experiment 20000088 PARAMETER Experiment Name: At_100uM_ABA_Mutants_cDNA_P Parameter: Tissue Value: Aerial
  misc_feature: MA Experiment 20000088 PARAMETER Experiment Name: At_100uM_ABA_Mutants_cDNA_P Parameter: Treatment Value: 100uM ABA vs. No Treatment
  misc_feature: MA Experiment ID: 20000089 Result: Up-regulated in Transcription
  misc_feature: MA Experiment ID: 20000090 Result: Up-regulated in Transcription
  misc_feature: MA Experiment ID: 20000111 Result: Down-regulated in Transcription
  misc_feature: MA Experiment 20000111 PARAMETER Experiment Name: At_42deg_Heat_cDNA_P Parameter: Temperature (deg C) Value: 42 vs. 22
  misc_feature: MA Experiment 20000111 PARAMETER Experiment Name: At_42deg_Heat_cDNA_P Parameter: Timepoint (hr) Value: 6
  misc_feature: MA Experiment 20000111 PARAMETER Experiment Name: At_42deg_Heat_cDNA_P Parameter: Tissue Value: Aerial
  misc_feature: MA Experiment ID: 20000113 Result: Down-regulated in Transcription
  misc_feature: MA Experiment 20000113 PARAMETER Experiment Name: At_42deg_Heat_cDNA_P Parameter: Temperature (deg C) Value: 42 vs. 22
  misc_feature: MA Experiment 20000113 PARAMETER Experiment Name: At_42deg_Heat_cDNA_P Parameter: Timepoint (hr) Value: 8
  misc_feature: MA Experiment 20000113 PARAMETER Experiment Name: At_42deg_Heat_cDNA_P Parameter: Tissue Value: Aerial
  misc_feature: MA Experiment ID: 20000117 Result: Up-regulated in Transcription
  misc_feature: MA Experiment 20000117 PARAMETER Experiment Name: At_100uM_ABA_Mutants_cDNA_P Parameter: Plant Line Value: Columbia
  misc_feature: MA Experiment 20000117 PARAMETER Experiment Name: At_100uM_ABA_Mutants_cDNA_P Parameter: Timepoint (hr) Value: 6
  misc_feature: MA Experiment 20000117 PARAMETER Experiment Name: At_100uM_ABA_Mutants_cDNA_P Parameter: Tissue Value: Aerial
  misc_feature: MA Experiment 20000117 PARAMETER Experiment Name: At_100uM_ABA_Mutants_cDNA_P Parameter: Treatment Value: 100uM ABA vs. No Treatment
  misc_feature: MA Experiment ID: 20000173 Result: Down-regulated in Transcription
  misc_feature: MA Experiment 20000173 PARAMETER Experiment Name: At_42deg_Heat_P Parameter: Age (day) Value: 14
  misc_feature: MA Experiment 20000173 PARAMETER Experiment Name: At_42deg_Heat_P Parameter: Organism Value: A. thaliana
  misc_feature: MA Experiment 20000173 PARAMETER Experiment Name: At_42deg_Heat_P Parameter: Plant Line Value: WS
  misc_feature: MA Experiment 20000173 PARAMETER Experiment Name: At_42deg_Heat_P Parameter: Temperature (deg C) Value: 42 vs. 22
  misc_feature: MA Experiment 20000173 PARAMETER Experiment Name: At_42deg_Heat_P Parameter: Timepoint (hr) Value: 6
  misc_feature: MA Experiment 20000173 PARAMETER Experiment Name: At_42deg_Heat_P Parameter: Tissue Value: Aerial
  misc_feature: MA Experiment ID: 20000179 Result: Down-regulated in Transcription
  misc_feature: MA Experiment 20000179 PARAMETER Experiment Name: At_Germinating_Seeds_P Parameter: Age (hr) Value: 6 vs. 0
  misc_feature: MA Experiment 20000179 PARAMETER Experiment Name: At_Germinating_Seeds_P Parameter: Tissue Value: Germinating Seeds
  misc_feature: MA Experiment ID: 20000180 Result: Down-regulated in Transcription
  misc_feature: MA Experiment 20000180 PARAMETER Experiment Name: At_Germinating_Seeds_P Parameter: Age (hr) Value: 24 vs. 0
  misc_feature: MA Experiment 20000180 PARAMETER Experiment Name: At_Germinating_Seeds_P Parameter: Tissue Value: Germinating Seeds
  misc_feature: MA Experiment ID: 20000184 Result: Down-regulated in Transcription
  misc_feature: MA Experiment 20000184 PARAMETER Experiment Name: At_Shoots__P Parameter: Age (day) Value: 7
  misc_feature: MA Experiment 20000184 PARAMETER Experiment Name: At_Shoots__P Parameter: Tissue Value: Shoots vs. Whole Plant
  misc_feature: MA Experiment ID: 20000227 Result: Down-regulated in Transcription
  misc_feature: MA Experiment 20000227 PARAMETER Experiment Name: At_Root-Tips-vs-Tops_P Parameter: Tissue Value: Root Tips vs. Root Tops
  misc_feature: MA Experiment ID: 20000437 Result: Up-regulated in Transcription
  misc_feature: MA Experiment 20000437 PARAMETER Experiment Name: At_Drought_P Parameter: Age (day) Value: 8
  misc_feature: MA Experiment 20000437 PARAMETER Experiment Name: At_Drought_P Parameter: Organism Value: A. thaliana
  misc_feature: MA Experiment 20000437 PARAMETER Experiment Name: At_Drought_P Parameter: Plant Line Value: WS
  misc_feature: MA Experiment 20000437 PARAMETER Experiment Name: At_Drought_P Parameter: Timepoint (hr) Value: 24
  misc_feature: MA Experiment 20000437 PARAMETER Experiment Name: At_Drought_P Parameter: Tissue Value: Whole Plant
  misc_feature: MA Experiment 20000437 PARAMETER Experiment Name: At_Drought_P Parameter: Treatment Value: Drought vs. No Drought
  misc_feature: MA Experiment ID: 20000438 Result: Down-regulated in Transcription
  misc_feature: MA Experiment 20000438 PARAMETER Experiment Name: At_Shoots__P Parameter: Age (day) Value: 14
  misc_feature: MA Experiment 20000438 PARAMETER Experiment Name: At_Shoots__P Parameter: Tissue Value: Shoots vs. Whole Plant
  misc_feature: MA Experiment ID: 20000794 Result: Up-regulated in Transcription
  misc_feature: MA Experiment 20000794 PARAMETER Experiment Name: At_Petals_P Parameter: Age (day) Value: 23-25 days
  misc_feature: MA Experiment 20000794 PARAMETER Experiment Name: At_Petals_P Parameter: Plant Line Value: WS
  misc_feature: MA Experiment 20000794 PARAMETER Experiment Name: At_Petals_P Parameter: Tissue Value: Petals vs. Whole plant
  misc_feature: MA Experiment ID: 20001557 Result: Down-regulated in Transcription
  misc_feature: MA Experiment 20001557 PARAMETER Experiment Name: At_Drought_Soil_Dry_P Parameter: Age (day) Value: 27
  misc_feature: MA Experiment 20001557 PARAMETER Experiment Name: At_Drought_Soil_Dry_P Parameter: Organism Value: A. thaliana
  misc_feature: MA Experiment 20001557 PARAMETER Experiment Name: At_Drought_Soil_Dry_P Parameter: Plant Line Value: WS
  misc_feature: MA Experiment 20001557 PARAMETER Experiment Name: At_Drought_Soil_Dry_P Parameter: Post Timepoint (hr) Value: 3
  misc_feature: MA Experiment 20001557 PARAMETER Experiment Name: At_Drought_Soil_Dry_P Parameter: Post-Treatment Value: Re-Water vs. No Drought
  misc_feature: MA Experiment 20001557 PARAMETER Experiment Name: At_Drought_Soil_Dry_P Parameter: Timepoint (day) Value: 13
  misc_feature: MA Experiment 20001557 PARAMETER Experiment Name: At_Drought_Soil_Dry_P Parameter: Treatment Value: Drought vs. No Drought
  misc_feature: MA Experiment ID: 20001558 Result: Down-regulated in Transcription
  misc_feature: MA Experiment 20001558 PARAMETER Experiment Name: At_Drought_Soil_Dry_P Parameter: Age (day) Value: 27
  misc_feature: MA Experiment 20001558 PARAMETER Experiment Name: At_Drought_Soil_Dry_P Parameter: Organism Value: A. thaliana
  misc_feature: MA Experiment 20001558 PARAMETER Experiment Name: At_Drought_Soil_Dry_P Parameter: Plant Line Value: WS
  misc_feature: MA Experiment 20001558 PARAMETER Experiment Name: At_Drought_Soil_Dry_P Parameter: Post Timepoint (hr) Value: 6
  misc_feature: MA Experiment 20001558 PARAMETER Experiment Name: At_Drought_Soil_Dry_P Parameter: Post-Treatment Value: Re-Water vs. No Drought
  misc_feature: MA Experiment 20001558 PARAMETER Experiment Name: At_Drought_Soil_Dry_P Parameter: Timepoint (day) Value: 13
  misc_feature: MA Experiment 20001558 PARAMETER Experiment Name: At_Drought_Soil_Dry_P Parameter: Treatment Value: Drought vs. No Drought
  misc_feature: MA Experiment ID: 20001757 Result: Down-regulated in Transcription
  misc_feature: MA Experiment 20001757 PARAMETER Experiment Name: At_50mM_NH4NO3_L-to-H_P Parameter: Timepoint (hr) Value: 6
  misc_feature: MA Experiment 20001757 PARAMETER Experiment Name: At_50mM_NH4NO3_L-to-H_P Parameter: Tissue Value: Leaf
  misc_feature: MA Experiment 20001757 PARAMETER Experiment Name: At_50mM_NH4NO3_L-to-H_P Parameter: Treatment Value: 50mM NH4NO3 vs 100mM Mannitol
aagattgtcgctttagcttctccggtttttaagcaaataagggtatatgagtttgttggacatgggtggagatatgatggaagatgattgggaatttgcgtcatcatcaaaccctaaaagaaccctagttcttgtgggccgtactggaaacggaaagagtgcgacaggtaacagtatccttgggaggaaagcttttaggtcaagagctagaactgtaggagtgacaagcacgtgcgagtcacagagagttgttcaagaagatggtgatatcattaatgttgttgatactcctggtttgtttgatttgtctactgcagctgattttattggtaaagagattgtgaggtgtataagtttggcagaagatgggattcatgcgatcttgttggtattctctgtgaggcggcttgctgaagaggagcaaactgtgcttagtttcttgcaagcgctattcggcagtaagatcgctgactatatgatcgttgtttttaccggtggcgatgagttggaagagaatgaggagacattggaggagtatttggctgactattgccctgagtttcttaaagaaattcttgggatatgtgacaatcggttggtgttgtttaataacaagactactgataaggtgaagaaagctgagcaagttcagaagcttctctcacttgttgaatctgttgttaaacagaacaatggaaaaccgtattcagatgagttgttccatgagctacaggaagaggctatcaagctaagggaccagaaaaaggaggttgagttacttcagggttactctaataatgagatagatgagttcaagaagcaaatcgatatgtcctatgataggcagcttagccgcatcaccgagatggtggagactaagctgagagacactgctaagagactagagcagcaactaggtgaagagcaagctgcaagacttgaagcggagaagagggcaaacgaagttcagaagcggtcgagcgatgagattaagaagctcagagagaatctggagagggcggaaaaagagacgaaggaacttcagaaaaaactgggaaagtgcatcaatctatgatatgttgagatgttgtagctccagtgaaatctgataagatcattcatgtcaagtttttttatgtagtcttttgttttcttttggttttttaacaatatggttttatcattaatggcagtgtgttataagtttgcttaaatcatac

SEQ ID NO: 101539 - protein, 342 aa, Arabidopsis thaliana; identical to SEQ ID NO: 23839
  peptide (1)..(342): Ceres Seq. ID no. 13608092
  misc_feature (25)..(239): Pfam Name: AIG1 family Pfam Description: AIG1 family
  misc_feature (1)..(342): Homolog of NCBI NO: 18399081 NR Description: expressed protein [Arabidopsis thaliana]
  misc_feature (6)..(342): Homolog of NCBI NO: 25373414 NR Description: hypothetical protein F12G12.21 - Arabidopsis >gi|10086478|gb|AAG12538.1|AC015446_19 Similar to AIG1 protein thaliana] >gi|10092443|gb|AAG12846.1|AC079286_3 disease
  misc_feature (6)..(342): Homolog of NCBI NO: 24417378 NR Description: unknown [Arabidopsis thaliana]
  misc_feature (49)..(342): Homolog of NCBI NO: 12324509 NR Description: AIG1-like protein, 5' partial; 1-1205
  misc_feature (6)..(333): Homolog of NCBI NO: 4097585 NR Description: NTGP4 [Nicotiana tabacum]
  misc_feature (3)..(338): Homolog of NCBI NO: 15234871 NR Description: AIG1-related protein [Arabidopsis thaliana]
  misc_feature (8)..(330): Homolog of NCBI NO: 15234855 NR Description: AIG1-related protein [Arabidopsis thaliana]
  misc_feature (16)..(335): Homolog of NCBI NO: 15217731 NR Description: AIG1 [Arabidopsis thaliana]
  misc_feature (16)..(335): Homolog of NCBI NO: 10092442 NR Description: disease resistance protein AIG1; 916-2572
  misc_feature (11)..(314): Homolog of NCBI NO: 15217719 NR Description: AIG1-related protein [Arabidopsis thaliana]

SEQ ID NO: 101540 - protein, 337 aa, Arabidopsis thaliana; identical to SEQ ID NO: 23840
  peptide (1)..(337): Ceres Seq. ID no. 13608093
  misc_feature (20)..(234): Pfam Name: AIG1 family Pfam Description: AIG1 family
  misc_feature (1)..(337): Homolog of NCBI NO: 18399081 NR Description: expressed protein [Arabidopsis thaliana]
  misc_feature (1)..(337): Homolog of NCBI NO: 25373414 NR Description: hypothetical protein F12G12.21 - Arabidopsis >gi|10086478|gb|AAG12538.1|AC015446_19 Similar to AIG1 protein thaliana] >gi|10092443|gb|AAG12846.1|AC079286_3 disease
  misc_feature (1)..(337): Homolog of NCBI NO: 24417378 NR Description: unknown [Arabidopsis thaliana]
  misc_feature (44)..(337): Homolog of NCBI NO: 12324509 NR Description: AIG1-like protein, 5' partial; 1-1205
  misc_feature (1)..(328): Homolog of NCBI NO: 4097585 NR Description: NTGP4 [Nicotiana tabacum]
  misc_feature (1)..(333): Homolog of NCBI NO: 15234871 NR Description: AIG1-related protein [Arabidopsis thaliana]
  misc_feature (3)..(325): Homolog of NCBI NO: 15234855 NR Description: AIG1-related protein [Arabidopsis thaliana]
  misc_feature (11)..(330): Homolog of NCBI NO: 15217731 NR Description: AIG1 [Arabidopsis thaliana]
  misc_feature (11)..(330): Homolog of NCBI NO: 10092442 NR Description: disease resistance protein AIG1; 916-2572
  misc_feature (6)..(309): Homolog of NCBI NO: 15217719 NR Description: AIG1-related protein [Arabidopsis thaliana]

SEQ ID NO: 101541 - protein, 333 aa, Arabidopsis thaliana; identical to SEQ ID NO: 23841
  peptide (1)..(333): Ceres Seq. ID no. 13608094
  misc_feature (16)..(230): Pfam Name: AIG1 family Pfam Description: AIG1 family
  misc_feature (1)..(333): Homolog of NCBI NO: 18399081 NR Description: expressed protein [Arabidopsis thaliana]
  misc_feature (1)..(333): Homolog of NCBI NO: 25373414 NR Description: hypothetical protein F12G12.21 - Arabidopsis >gi|10086478|gb|AAG12538.1|AC015446_19 Similar to AIG1 protein thaliana] >gi|10092443|gb|AAG12846.1|AC079286_3 disease
  misc_feature (1)..(333): Homolog of NCBI NO: 24417378 NR Description: unknown [Arabidopsis thaliana]
  misc_feature (40)..(333): Homolog of NCBI NO: 12324509 NR Description: AIG1-like protein, 5' partial; 1-1205
  misc_feature (1)..(324): Homolog of NCBI NO: 4097585 NR Description: NTGP4 [Nicotiana tabacum]
  misc_feature (1)..(329): Homolog of NCBI NO: 15234871 NR Description: AIG1-related protein [Arabidopsis thaliana]
  misc_feature (1)..(321): Homolog of NCBI NO: 15234855 NR Description: AIG1-related protein [Arabidopsis thaliana]
  misc_feature (7)..(326): Homolog of NCBI NO: 15217731 NR Description: AIG1 [Arabidopsis thaliana]
  misc_feature (7)..(326): Homolog of NCBI NO: 10092442 NR Description: disease resistance protein AIG1; 916-2572
  misc_feature (2)..(305): Homolog of NCBI NO: 15217719 NR Description: AIG1-related protein [Arabidopsis thaliana]

SEQ ID NO: 101542 - DNA, 1287 bp, Arabidopsis thaliana
  misc_feature (1)..(1287): Ceres Seq. ID no. 13608099
  misc_feature: MA Experiment ID: 108434 Result: Down-regulated in Transcription
  misc_feature: MA Experiment 108434 PARAMETER Experiment Name: At_Root_Tips_cDNA_P Parameter: Tissue Value: Root Tips
  misc_feature: MA Experiment ID: 108435 Result: Down-regulated in Transcription
  misc_feature: MA Experiment 108435 PARAMETER Experiment Name: At_stm_Mutants_cDNA_P Parameter: Plant Line Value: wt Landsburg vs stm
  misc_feature: MA Experiment 108435 PARAMETER Experiment Name: At_stm_Mutants_cDNA_P Parameter: Tissue Value: Shoot Apical Meristem Region
  misc_feature: MA Experiment ID: 108462 Result: Up-regulated in Transcription
  misc_feature: MA Experiment 108462 PARAMETER Experiment Name: At_Germinating_Seeds_cDNA_P Parameter: Age (day) Value: 2 vs. 0
  misc_feature: MA Experiment 108462 PARAMETER Experiment Name: At_Germinating_Seeds_cDNA_P Parameter: Tissue Value: Germinating Seeds
  misc_feature: MA Experiment ID: 108464 Result: Up-regulated in Transcription
  misc_feature: MA Experiment 108464 PARAMETER Experiment Name: At_Germinating_Seeds_cDNA_P Parameter: Age (day) Value: 4 vs. 0
  misc_feature: MA Experiment 108464 PARAMETER Experiment Name: At_Germinating_Seeds_cDNA_P Parameter: Tissue Value: Germinating Seeds
  misc_feature: MA Experiment ID: 108488 Result: Up-regulated in Transcription
  misc_feature: MA Experiment ID: 108573 Result: Up-regulated in Transcription
  misc_feature: MA Experiment 108573 PARAMETER Experiment Name: At_Drought_cDNA_P Parameter: Timepoint (hr) Value: 6
  misc_feature: MA Experiment 108573 PARAMETER Experiment Name: At_Drought_cDNA_P Parameter: Tissue Value: Aerial
  misc_feature: MA Experiment 108573 PARAMETER Experiment Name: At_Drought_cDNA_P Parameter: Treatment Value: Drought vs. No Drought
  misc_feature: MA Experiment ID: 108594 Result: Up-regulated in Transcription
  misc_feature: MA Experiment 108594 PARAMETER Experiment Name: At_Ler-rhl_Root_cDNA_P Parameter: Plant Line Value: null
  misc_feature: MA Experiment ID: 108595 Result: Down-regulated in Transcription
  misc_feature: MA Experiment 108595 PARAMETER Experiment Name: At_Ler-pi_Ovule_cDNA_P Parameter: Plant Line Value: null
  misc_feature: MA Experiment ID: 20000069 Result: Down-regulated in Transcription
  misc_feature: MA Experiment 20000069 PARAMETER Experiment Name: At_100uM_ABA_Mutants_cDNA_P Parameter: Plant Line Value: CS23
  misc_feature: MA Experiment 20000069 PARAMETER Experiment Name: At_100uM_ABA_Mutants_cDNA_P Parameter: Timepoint (hr) Value: 6
  misc_feature: MA Experiment 20000069 PARAMETER Experiment Name: At_100uM_ABA_Mutants_cDNA_P Parameter: Tissue Value: Aerial
  misc_feature: MA Experiment 20000069 PARAMETER Experiment Name: At_100uM_ABA_Mutants_cDNA_P Parameter: Treatment Value: 100uM ABA vs. No Treatment
  misc_feature: MA Experiment ID: 20000070 Result: Down-regulated in Transcription
  misc_feature: MA Experiment 20000070 PARAMETER Experiment Name: At_100uM_ABA_Mutants_cDNA_P Parameter: Plant Line Value: CS24
  misc_feature: MA Experiment 20000070 PARAMETER Experiment Name: At_100uM_ABA_Mutants_cDNA_P Parameter: Timepoint (hr) Value: 6
  misc_feature: MA Experiment 20000070 PARAMETER Experiment Name: At_100uM_ABA_Mutants_cDNA_P Parameter: Tissue Value: Aerial
  misc_feature: MA Experiment 20000070 PARAMETER Experiment Name: At_100uM_ABA_Mutants_cDNA_P Parameter: Treatment Value: 100uM ABA vs. No Treatment
  misc_feature: MA Experiment ID: 20000071 Result: Down-regulated in Transcription
  misc_feature: MA Experiment 20000071 PARAMETER Experiment Name: At_100uM_ABA_Mutants_cDNA_P Parameter: Plant Line Value: CS8104
  misc_feature: MA Experiment 20000071 PARAMETER Experiment Name: At_100uM_ABA_Mutants_cDNA_P Parameter: Timepoint (hr) Value: 6
  misc_feature: MA Experiment 20000071 PARAMETER Experiment Name: At_100uM_ABA_Mutants_cDNA_P Parameter: Tissue Value: Aerial
  misc_feature: MA Experiment 20000071 PARAMETER Experiment Name: At_100uM_ABA_Mutants_cDNA_P Parameter: Treatment Value: 100uM ABA vs. No Treatment
  misc_feature: MA Experiment ID: 20000072 Result: Down-regulated in Transcription
  misc_feature: MA Experiment 20000072 PARAMETER Experiment Name: At_100uM_ABA_Mutants_cDNA_P Parameter: Plant Line Value: CS8105
  misc_feature: MA Experiment 20000072 PARAMETER Experiment Name: At_100uM_ABA_Mutants_cDNA_P Parameter: Timepoint (hr) Value: 6
  misc_feature: MA Experiment 20000072 PARAMETER Experiment Name: At_100uM_ABA_Mutants_cDNA_P Parameter: Tissue Value: Aerial
  misc_feature: MA Experiment 20000072 PARAMETER Experiment Name: At_100uM_ABA_Mutants_cDNA_P Parameter: Treatment Value: 100uM ABA vs. No Treatment
  misc_feature: MA Experiment ID: 20000086 Result: Down-regulated in Transcription
  misc_feature: MA Experiment 20000086 PARAMETER Experiment Name: At_100uM_ABA_Mutants_cDNA_P Parameter: Plant Line Value: CS22
  misc_feature: MA Experiment 20000086 PARAMETER Experiment Name: At_100uM_ABA_Mutants_cDNA_P Parameter: Timepoint (hr) Value: 6
  misc_feature: MA Experiment 20000086 PARAMETER Experiment Name: At_100uM_ABA_Mutants_cDNA_P Parameter: Tissue Value: Aerial
  misc_feature: MA Experiment 20000086 PARAMETER Experiment Name: At_100uM_ABA_Mutants_cDNA_P Parameter: Treatment Value: 100uM ABA vs. No Treatment
  misc_feature: MA Experiment ID: 20000087 Result: Down-regulated in Transcription
  misc_feature: MA Experiment 20000087 PARAMETER Experiment Name: At_100uM_ABA_Mutants_cDNA_P Parameter: Plant Line Value: WS
  misc_feature: MA Experiment 20000087 PARAMETER Experiment Name: At_100uM_ABA_Mutants_cDNA_P Parameter: Timepoint (hr) Value: 6
  misc_feature: MA Experiment 20000087 PARAMETER Experiment Name: At_100uM_ABA_Mutants_cDNA_P Parameter: Tissue Value: Aerial
  misc_feature: MA Experiment 20000087 PARAMETER Experiment Name: At_100uM_ABA_Mutants_cDNA_P Parameter: Treatment Value: 100uM ABA vs. No Treatment
  misc_feature: MA Experiment ID: 20000089 Result: Down-regulated in Transcription
  misc_feature: MA Experiment ID: 20000090 Result: Down-regulated in Transcription
  misc_feature: MA Experiment ID: 20000117 Result: Down-regulated in Transcription
  misc_feature: MA Experiment 20000117 PARAMETER Experiment Name: At_100uM_ABA_Mutants_cDNA_P Parameter: Plant Line Value: Columbia
  misc_feature: MA Experiment 20000117 PARAMETER Experiment Name: At_100uM_ABA_Mutants_cDNA_P Parameter: Timepoint (hr) Value: 6
  misc_feature: MA Experiment 20000117 PARAMETER Experiment Name: At_100uM_ABA_Mutants_cDNA_P Parameter: Tissue Value: Aerial
  misc_feature: MA Experiment 20000117 PARAMETER Experiment Name: At_100uM_ABA_Mutants_cDNA_P Parameter: Treatment Value: 100uM ABA vs. No Treatment
  misc_feature: MA Experiment ID: 20000224 Result: Down-regulated in Transcription
  misc_feature: MA Experiment ID: 20000227 Result: Down-regulated in Transcription
  misc_feature: MA Experiment 20000227 PARAMETER Experiment Name: At_Root-Tips-vs-Tops_P Parameter: Tissue Value: Root Tips vs. Root Tops
  misc_feature: MA Experiment ID: 20000451 Result: Down-regulated in Transcription
  misc_feature: MA Experiment 20000451 PARAMETER Experiment Name: At_CS6879_Shoots-Roots_P Parameter: Age (day) Value: 14
  misc_feature: MA Experiment 20000451 PARAMETER Experiment Name: At_CS6879_Shoots-Roots_P Parameter: Organism Value: A. thaliana
  misc_feature: MA Experiment 20000451 PARAMETER Experiment Name: At_CS6879_Shoots-Roots_P Parameter: Plant Line Value: CS6879 vs. WS
  misc_feature: MA Experiment 20000451 PARAMETER Experiment Name: At_CS6879_Shoots-Roots_P Parameter: Tissue Value: Roots
ctcgttgctgatgtgtcgctctgcttgagagagtcagagagtcaagagagaaaaggggtcgagaatggcggtcgcaatatctgggagtagtttgatatcgtcgactcttcagcattataataatcggatttatatccgagattatccgattccgtgtcactcttctaatccaatttgcaattcttttaatttcaaaagacgttcgttctctccttcttcccccaaatttaacgaccatgtcgttaacccttcctcttcttatttatcctccaagctttctccaattcgaacccattcctctttcgctgcgtgtggctgctcctggattcaagacaattcaatggttcatgattatgctacaacaactaatgggacgtccaagcgttgctcggcgttaccaacaacaaacacagtggatgtctcttcggtgtcagatctttttgaattcatatgctcgggtcctctcgtaaacaagattggtatcactcctcaaagagttggccagtctattgacaaatggttactctacggctcacaactttgtagactgtttcagcttaatgagcttaagcttacaattcctcagaaagctaggctataccactactacatacccgtttttatttggtgcgaagatcagattgctttgcataattccaagtttaaagatggagatgatgtacctaggtacaataagtctgcctatagtgggagaggtgacagagccgattcatcaacatggcctgaagttgaaggacctctatcggttattctctttgagggatggatgcttggttttaagcctcttccagctgacgttgttaaagcagttgacccacagctggaggttgtgaataagaaccttgaagcgtattacgacgcatgggacaagtacatcgatgcttgggtcgtcatcaaaatccaggacccaagttatgtataccggtggcgtcttcaggcggaaatcgccatgaggcaggatggccaagctgggatgtcggatgaggaggtgaatgactttgtgtcgcggtatttgccggcgtataaggcctatcttccaactctttacgcggaagggccaagcggctcagacccagaccgtgtccttgcgatagatatcgatgaagaaaggaacccgatactcgcaaactaatgcgatgctgtctccattgcctttatagtatatcatcattgtatgtaaaagagagtaacattacgttcttcttccttctatttgacattctttttcctacactatactttcacataaatacatattcttttctt

SEQ ID NO: 101543 - protein, 362 aa, Arabidopsis thaliana
  peptide (1)..(362): Ceres Seq. ID no. 13608100
  misc_feature (206)..(349): Pfam Name: Phosphoribulokinase / Uridine kinase family Pfam Description: Phosphoribulokinase / Uridine kinase family
  misc_feature (1)..(362): Homolog of NCBI NO: 18412831 NR Description: auxin-regulated protein [Arabidopsis thaliana]
  misc_feature (1)..(207): Homolog of NCBI NO: 16226442 NR Description: At1g80380/F5I6_13 [Arabidopsis thaliana]
  misc_feature (1)..(207): Homolog of NCBI NO: 30699506 NR Description: auxin-regulated protein [Arabidopsis thaliana] unknown protein [Arabidopsis thaliana]
  misc_feature (206)..(362): Homolog of NCBI NO: 16226442 NR Description: At1g80380/F5I6_13 [Arabidopsis thaliana]
  misc_feature (206)..(362): Homolog of NCBI NO: 30699506 NR Description: auxin-regulated protein [Arabidopsis thaliana] unknown protein [Arabidopsis thaliana]
  misc_feature (1)..(362): Homolog of NCBI NO: 21537005 NR Description: unknown [Arabidopsis thaliana]
  misc_feature (206)..(362): Homolog of NCBI NO: 25406658 NR Description: unknown protein F5I6.13 [imported] - Arabidopsis
  misc_feature (93)..(207): Homolog of NCBI NO: 25406658 NR Description: unknown protein F5I6.13 [imported] - Arabidopsis
  misc_feature (59)..(207): Homolog of NCBI NO: 34911206 NR Description: P0019E03.19 [Oryza sativa (japonica
  misc_feature (259)..(359): Homolog of NCBI NO: 34911206 NR Description: P0019E03.19 [Oryza sativa (japonica
MAVAISGSSLISSTLQHYNNRIYIRDYPIPCHSSNPICNSFNFKRRSFSPSSPKFNDHVVNPSSSYLSSKLSPIRTHSSFAACGCSWIQDNSMVHDYATTTNGTSKRCSALPTTNTVDVSSVSDLFEFICSGPLVNKIGITPQRVGQSIDKWLLYGSQLCRLFQLNELKLTIPQKARLYHYYIPVFIWCEDQIALHNSKFKDGDDVPRYNKSAYSGRGDRADSSTWPEVEGPLSVILFEGWMLGFKPLPADVVKAVDPQLEVVNKNLEAYYDAWDKYIDAWVVIKIQDPSYVYRWRLQAEIAMRQDGQAGMSDEEVNDFVSRYLPAYKAYLPTLYAEGPSGSDPDRVLAIDIDEERNPILAN

SEQ ID NO: 101544 - protein, 270 aa, Arabidopsis thaliana
  peptide (1)..(270): Ceres Seq. ID no. 13608101
  misc_feature (114)..(257): Pfam Name: Phosphoribulokinase / Uridine kinase family Pfam Description: Phosphoribulokinase / Uridine kinase family
  misc_feature (1)..(270): Homolog of NCBI NO: 18412831 NR Description: auxin-regulated protein [Arabidopsis thaliana]
  misc_feature (1)..(115): Homolog of NCBI NO: 16226442 NR Description: At1g80380/F5I6_13 [Arabidopsis thaliana]
  misc_feature (1)..(115): Homolog of NCBI NO: 30699506 NR Description: auxin-regulated protein [Arabidopsis thaliana] unknown protein [Arabidopsis thaliana]
  misc_feature (114)..(270): Homolog of NCBI NO: 16226442 NR Description: At1g80380/F5I6_13 [Arabidopsis thaliana]
  misc_feature (114)..(270): Homolog of NCBI NO: 30699506 NR Description: auxin-regulated protein [Arabidopsis thaliana] unknown protein [Arabidopsis thaliana]
  misc_feature (1)..(270): Homolog of NCBI NO: 21537005 NR Description: unknown [Arabidopsis thaliana]
  misc_feature (114)..(270): Homolog of NCBI NO: 25406658 NR Description: unknown protein F5I6.13 [imported] - Arabidopsis
  misc_feature (1)..(115): Homolog of NCBI NO: 25406658 NR Description: unknown protein F5I6.13 [imported] - Arabidopsis
  misc_feature (1)..(115): Homolog of NCBI NO: 34911206 NR Description: P0019E03.19 [Oryza sativa (japonica
  misc_feature (167)..(267): Homolog of NCBI NO: 34911206 NR Description: P0019E03.19 [Oryza sativa (japonica
MVHDYATTTNGTSKRCSALPTTNTVDVSSVSDLFEFICSGPLVNKIGITPQRVGQSIDKWLLYGSQLCRLFQLNELKLTIPQKARLYHYYIPVFIWCEDQIALHNSKFKDGDDVPRYNKSAYSGRGDRADSSTWPEVEGPLSVILFEGWMLGFKPLPADVVKAVDPQLEVVNKNLEAYYDAWDKYIDAWVVIKIQDPSYVYRWRLQAEIAMRQDGQAGMSDEEVNDFVSRYLPAYKAYLPTLYAEGPSGSDPDRVLAIDIDEERNPILAN

SEQ ID NO: 101545 - DNA, 981 bp, Arabidopsis thaliana
  misc_feature (1)..(981): Ceres Seq. ID no. 13608111
  misc_feature: MA Experiment ID: 108435 Result: Up-regulated in Transcription
  misc_feature: MA Experiment 108435 PARAMETER Experiment Name: At_stm_Mutants_cDNA_P Parameter: Plant Line Value: wt Landsburg vs stm
  misc_feature: MA Experiment 108435 PARAMETER Experiment Name: At_stm_Mutants_cDNA_P Parameter: Tissue Value: Shoot Apical Meristem Region
  misc_feature: MA Experiment ID: 108461 Result: Up-regulated in Transcription
  misc_feature: MA Experiment 108461 PARAMETER Experiment Name: At_Germinating_Seeds_cDNA_P Parameter: Age (day) Value: 1 vs. 0
  misc_feature: MA Experiment 108461 PARAMETER Experiment Name: At_Germinating_Seeds_cDNA_P Parameter: Tissue Value: Germinating Seeds
  misc_feature: MA Experiment ID: 108462 Result: Up-regulated in Transcription
  misc_feature: MA Experiment 108462 PARAMETER Experiment Name: At_Germinating_Seeds_cDNA_P Parameter: Age (day) Value: 2 vs. 0
  misc_feature: MA Experiment 108462 PARAMETER Experiment Name: At_Germinating_Seeds_cDNA_P Parameter: Tissue Value: Germinating Seeds
  misc_feature: MA Experiment ID: 108463 Result: Up-regulated in Transcription
  misc_feature: MA Experiment 108463 PARAMETER Experiment Name: At_Germinating_Seeds_cDNA_P Parameter: Age (day) Value: 3 vs. 0
  misc_feature: MA Experiment 108463 PARAMETER Experiment Name: At_Germinating_Seeds_cDNA_P Parameter: Tissue Value: Germinating Seeds
  misc_feature: MA Experiment ID: 108464 Result: Up-regulated in Transcription
  misc_feature: MA Experiment 108464 PARAMETER Experiment Name: At_Germinating_Seeds_cDNA_P Parameter: Age (day) Value: 4 vs. 0
  misc_feature: MA Experiment 108464 PARAMETER Experiment Name: At_Germinating_Seeds_cDNA_P Parameter: Tissue Value: Germinating Seeds
  misc_feature: MA Experiment ID: 108489 Result: Down-regulated in Transcription
  misc_feature: MA Experiment ID: 108573 Result: Down-regulated in Transcription
  misc_feature: MA Experiment 108573 PARAMETER Experiment Name: At_Drought_cDNA_P Parameter: Timepoint (hr) Value: 6
  misc_feature: MA Experiment 108573 PARAMETER Experiment Name: At_Drought_cDNA_P Parameter: Tissue Value: Aerial
  misc_feature: MA Experiment 108573 PARAMETER Experiment Name: At_Drought_cDNA_P Parameter: Treatment Value: Drought vs. No Drought
  misc_feature: MA Experiment ID: 108579 Result: Up-regulated in Transcription
  misc_feature: MA Experiment 108579 PARAMETER Experiment Name: At_4deg_Cold_cDNA_P Parameter: Temperature (deg C) Value: 4 vs. 22
  misc_feature: MA Experiment 108579 PARAMETER Experiment Name: At_4deg_Cold_cDNA_P Parameter: Timepoint (hr) Value: 6
  misc_feature: MA Experiment 108579 PARAMETER Experiment Name: At_4deg_Cold_cDNA_P Parameter: Tissue Value: Aerial
  misc_feature: MA Experiment ID: 108595 Result: Up-regulated in Transcription
  misc_feature: MA Experiment 108595 PARAMETER Experiment Name: At_Ler-pi_Ovule_cDNA_P Parameter: Plant Line Value: null
  misc_feature: MA Experiment ID: 108607 Result: Up-regulated in Transcription
  misc_feature: MA Experiment 108607 PARAMETER Experiment Name: At_100uM_ABA_cDNA_P Parameter: Timepoint (hr) Value: 4
  misc_feature: MA Experiment 108607 PARAMETER Experiment Name: At_100uM_ABA_cDNA_P Parameter: Tissue Value: Aerial
  misc_feature: MA Experiment 108607 PARAMETER Experiment Name: At_100uM_ABA_cDNA_P Parameter: Treatment Value: 100uM ABA vs. No Treatment
  misc_feature: MA Experiment ID: 20000069 Result: Down-regulated in Transcription
  misc_feature: MA Experiment 20000069 PARAMETER Experiment Name: At_100uM_ABA_Mutants_cDNA_P Parameter: Plant Line Value: CS23
  misc_feature: MA Experiment 20000069 PARAMETER Experiment Name: At_100uM_ABA_Mutants_cDNA_P Parameter: Timepoint (hr) Value: 6
  misc_feature: MA Experiment 20000069 PARAMETER Experiment Name: At_100uM_ABA_Mutants_cDNA_P Parameter: Tissue Value: Aerial
  misc_feature: MA Experiment 20000069 PARAMETER Experiment Name: At_100uM_ABA_Mutants_cDNA_P Parameter: Treatment Value: 100uM ABA vs. No Treatment
  misc_feature: MA Experiment ID: 20000070 Result: Down-regulated in Transcription
  misc_feature: MA Experiment 20000070 PARAMETER Experiment Name: At_100uM_ABA_Mutants_cDNA_P Parameter: Plant Line Value: CS24
  misc_feature: MA Experiment 20000070 PARAMETER Experiment Name: At_100uM_ABA_Mutants_cDNA_P Parameter: Timepoint (hr) Value: 6
  misc_feature: MA Experiment 20000070 PARAMETER Experiment Name: At_100uM_ABA_Mutants_cDNA_P Parameter: Tissue Value: Aerial
  misc_feature: MA Experiment 20000070 PARAMETER Experiment Name: At_100uM_ABA_Mutants_cDNA_P Parameter: Treatment Value: 100uM ABA vs. No Treatment
  misc_feature: MA Experiment ID: 20000071 Result: Down-regulated in Transcription
  misc_feature: MA Experiment 20000071 PARAMETER Experiment Name: At_100uM_ABA_Mutants_cDNA_P Parameter: Plant Line Value: CS8104
  misc_feature: MA Experiment 20000071 PARAMETER Experiment Name: At_100uM_ABA_Mutants_cDNA_P Parameter: Timepoint (hr) Value: 6
  misc_feature: MA Experiment 20000071 PARAMETER Experiment Name: At_100uM_ABA_Mutants_cDNA_P Parameter: Tissue Value: Aerial
  misc_feature: MA Experiment 20000071 PARAMETER Experiment Name: At_100uM_ABA_Mutants_cDNA_P Parameter: Treatment Value: 100uM ABA vs. No Treatment
  misc_feature: MA Experiment ID: 20000086 Result: Down-regulated in Transcription
  misc_feature: MA Experiment 20000086 PARAMETER Experiment Name: At_100uM_ABA_Mutants_cDNA_P Parameter: Plant Line Value: CS22
  misc_feature: MA Experiment 20000086 PARAMETER Experiment Name: At_100uM_ABA_Mutants_cDNA_P Parameter: Timepoint (hr) Value: 6
  misc_feature: MA Experiment 20000086 PARAMETER Experiment Name: At_100uM_ABA_Mutants_cDNA_P Parameter: Tissue Value: Aerial
  misc_feature: MA Experiment 20000086 PARAMETER Experiment Name: At_100uM_ABA_Mutants_cDNA_P Parameter: Treatment Value: 100uM ABA vs. No Treatment
  misc_feature: MA Experiment ID: 20000088 Result: Down-regulated in Transcription
  misc_feature: MA Experiment 20000088 PARAMETER Experiment Name: At_100uM_ABA_Mutants_cDNA_P Parameter: Plant Line Value: Landsberg
  misc_feature: MA Experiment 20000088 PARAMETER Experiment Name: At_100uM_ABA_Mutants_cDNA_P Parameter: Timepoint (hr) Value: 6
  misc_feature: MA Experiment 20000088 PARAMETER Experiment Name: At_100uM_ABA_Mutants_cDNA_P Parameter: Tissue Value: Aerial
  misc_feature: MA Experiment 20000088 PARAMETER Experiment Name: At_100uM_ABA_Mutants_cDNA_P Parameter: Treatment Value: 100uM ABA vs. No Treatment
  misc_feature: MA Experiment ID: 20000089 Result: Down-regulated in Transcription
  misc_feature: MA Experiment ID: 20000090 Result: Down-regulated in Transcription
  misc_feature: MA Experiment ID: 20000117 Result: Down-regulated in Transcription
  misc_feature: MA Experiment 20000117 PARAMETER Experiment Name: At_100uM_ABA_Mutants_cDNA_P Parameter: Plant Line Value: Columbia
  misc_feature: MA Experiment 20000117 PARAMETER Experiment Name: At_100uM_ABA_Mutants_cDNA_P Parameter: Timepoint (hr) Value: 6
  misc_feature: MA Experiment 20000117 PARAMETER Experiment Name: At_100uM_ABA_Mutants_cDNA_P Parameter: Tissue Value: Aerial
  misc_feature: MA Experiment 20000117 PARAMETER Experiment Name: At_100uM_ABA_Mutants_cDNA_P Parameter: Treatment Value: 100uM ABA vs. No Treatment
  misc_feature: MA Experiment ID: 20000179 Result: Up-regulated in Transcription
  misc_feature: MA Experiment 20000179 PARAMETER Experiment Name: At_Germinating_Seeds_P Parameter: Age (hr) Value: 6 vs. 0
  misc_feature: MA Experiment 20000179 PARAMETER Experiment Name: At_Germinating_Seeds_P Parameter: Tissue Value: Germinating Seeds
  misc_feature: MA Experiment ID: 20000180 Result: Up-regulated in Transcription
  misc_feature: MA Experiment 20000180 PARAMETER Experiment Name: At_Germinating_Seeds_P Parameter: Age (hr) Value: 24 vs. 0
  misc_feature: MA Experiment 20000180 PARAMETER Experiment Name: At_Germinating_Seeds_P Parameter: Tissue Value: Germinating Seeds
  misc_feature: MA Experiment ID: 20000184 Result: Up-regulated in Transcription
  misc_feature: MA Experiment 20000184 PARAMETER Experiment Name: At_Shoots__P Parameter: Age (day) Value: 7
  misc_feature: MA Experiment 20000184 PARAMETER Experiment Name: At_Shoots__P Parameter: Tissue Value: Shoots vs. Whole Plant
  misc_feature: MA Experiment ID: 20000185 Result: Up-regulated in Transcription
  misc_feature: MA Experiment 20000185 PARAMETER Experiment Name: At_Roots__P Parameter: Age (day) Value: 7 vs. 21
  misc_feature: MA Experiment 20000185 PARAMETER Experiment Name: At_Roots__P Parameter: Organism Value: A. thaliana
  misc_feature: MA Experiment 20000185 PARAMETER Experiment Name: At_Roots__P Parameter: Tissue Value: Roots vs. Whole Plant
  misc_feature: MA Experiment ID: 20000224 Result: Up-regulated in Transcription
  misc_feature: MA Experiment ID: 20000234 Result: Up-regulated in Transcription
  misc_feature: MA Experiment 20000234 PARAMETER Experiment Name: At_Siliques_P Parameter: Age (day) Value: 21
  misc_feature: MA Experiment 20000234 PARAMETER Experiment Name: At_Siliques_P Parameter: Organism Value: A. thaliana
  misc_feature: MA Experiment 20000234 PARAMETER Experiment Name: At_Siliques_P Parameter: Plant Line Value: WS
  misc_feature: MA Experiment 20000234 PARAMETER Experiment Name: At_Siliques_P Parameter: Tissue Value: Less Than 5mm Siliques vs. Whole Plant
  misc_feature: MA Experiment ID: 20000235 Result: Up-regulated in Transcription
  misc_feature: MA Experiment 20000235 PARAMETER Experiment Name: At_Siliques_P Parameter: Age (day) Value: 21
  misc_feature: MA Experiment 20000235 PARAMETER Experiment Name: At_Siliques_P Parameter: Organism Value: A. thaliana
  misc_feature: MA Experiment 20000235 PARAMETER Experiment Name: At_Siliques_P Parameter: Plant Line Value: WS
  misc_feature: MA Experiment 20000235 PARAMETER Experiment Name: At_Siliques_P Parameter: Tissue Value: 5-10mm Siliques vs. Whole Plant
  misc_feature: MA Experiment ID: 20000264 Result: Up-regulated in Transcription
  misc_feature: MA Experiment 20000264 PARAMETER Experiment Name: At_Open_Flower_P Parameter: Age (day) Value: 21
  misc_feature: MA Experiment 20000264 PARAMETER Experiment Name: At_Open_Flower_P Parameter: Plant Line Value: WS
  misc_feature: MA Experiment 20000264 PARAMETER Experiment Name: At_Open_Flower_P Parameter: Tissue Value: Open Flower vs. Whole Plant
  misc_feature: MA Experiment ID: 20000265 Result: Up-regulated in Transcription
  misc_feature: MA Experiment 20000265 PARAMETER Experiment Name: At_Open_Flower_P Parameter: Age (day) Value: 21
  misc_feature: MA Experiment 20000265 PARAMETER Experiment Name: At_Open_Flower_P Parameter: Plant Line Value: WS
  misc_feature: MA Experiment 20000265 PARAMETER Experiment Name: At_Open_Flower_P Parameter: Tissue Value: Closed Flower vs. Whole Plant
  misc_feature: MA Experiment ID: 20000286 Result: Up-regulated in Transcription
  misc_feature: MA Experiment 20000286 PARAMETER Experiment Name: At_Open_Flower_P Parameter: Age (day) Value: 21
  misc_feature: MA Experiment 20000286 PARAMETER Experiment Name: At_Open_Flower_P Parameter: Plant Line Value: WS
  misc_feature: MA Experiment 20000286 PARAMETER Experiment Name: At_Open_Flower_P Parameter: Tissue Value: Half Open vs. Whole Plant
  misc_feature: MA Experiment ID: 20000438 Result: Up-regulated in Transcription
  misc_feature: MA Experiment 20000438 PARAMETER Experiment Name: At_Shoots__P Parameter: Age (day) Value: 14
  misc_feature: MA Experiment 20000438 PARAMETER Experiment Name: At_Shoots__P Parameter: Tissue Value: Shoots vs. Whole Plant
  misc_feature: MA Experiment ID: 20000439 Result: Up-regulated in Transcription
  misc_feature: MA Experiment 20000439 PARAMETER Experiment Name: At_Roots__P Parameter: Age (day) Value: 14 vs. 21
  misc_feature: MA Experiment 20000439 PARAMETER Experiment Name: At_Roots__P Parameter: Organism Value: A. thaliana
  misc_feature: MA Experiment 20000439 PARAMETER Experiment Name: At_Roots__P Parameter: Tissue Value: Roots vs. Whole Plant
  misc_feature: MA Experiment ID: 20000573 Result: Down-regulated in Transcription
  misc_feature: MA Experiment 20000573 PARAMETER Experiment Name: At_100uM_ABA_Mutants__P Parameter: Organism Value: A. thaliana
  misc_feature: MA Experiment 20000573 PARAMETER Experiment Name: At_100uM_ABA_Mutants__P Parameter: Plant Line Value: CS22 vs. Ler wt
  misc_feature: MA Experiment 20000573 PARAMETER Experiment Name: At_100uM_ABA_Mutants__P Parameter: Timepoint (hr) Value: N/A
  misc_feature: MA Experiment 20000573 PARAMETER Experiment Name: At_100uM_ABA_Mutants__P Parameter: Tissue Value: Whole Plant
  misc_feature: MA Experiment 20000573 PARAMETER Experiment Name: At_100uM_ABA_Mutants__P Parameter: Treatment Value: None
  misc_feature: MA Experiment ID: 20001248 Result: Down-regulated in Transcription
  misc_feature: MA Experiment 20001248 PARAMETER Experiment Name: At_Far-red-induction_P Parameter: Age (day) Value: 7
  misc_feature: MA Experiment 20001248 PARAMETER Experiment Name: At_Far-red-induction_P Parameter: Light Value: Far-red vs. White
  misc_feature: MA Experiment 20001248 PARAMETER Experiment Name: At_Far-red-induction_P Parameter: Organism Value: A. thaliana
  misc_feature: MA Experiment 20001248 PARAMETER Experiment Name: At_Far-red-induction_P Parameter: Plant Line Value: Columbia
  misc_feature: MA Experiment 20001248 PARAMETER Experiment Name: At_Far-red-induction_P Parameter: Timepoint (hr) Value: 4
  misc_feature: MA Experiment 20001248 PARAMETER Experiment Name: At_Far-red-induction_P Parameter: Tissue Value: Whole Plant
  misc_feature: MA Experiment ID: 20001450 Result: Down-regulated in Transcription
  misc_feature: MA Experiment 20001450 PARAMETER Experiment Name: At_Far-red-induction_P Parameter: Age (day) Value: 7
  misc_feature: MA Experiment 20001450 PARAMETER Experiment Name: At_Far-red-induction_P Parameter: Light Value: Far-red vs. White
  misc_feature: MA Experiment 20001450 PARAMETER Experiment Name: At_Far-red-induction_P Parameter: Organism Value: A. thaliana
  misc_feature: MA Experiment 20001450 PARAMETER Experiment Name: At_Far-red-induction_P Parameter: Plant Line Value: Columbia
  misc_feature: MA Experiment 20001450 PARAMETER Experiment Name: At_Far-red-induction_P Parameter: Timepoint (hr) Value: 8
  misc_feature: MA Experiment 20001450 PARAMETER Experiment Name: At_Far-red-induction_P Parameter: Tissue Value: Whole Plant
  misc_feature: MA Experiment ID: 20001556 Result: Up-regulated in Transcription
  misc_feature: MA Experiment 20001556 PARAMETER Experiment Name: At_Drought_Soil_Dry_P Parameter: Age (day) Value: 26
  misc_feature: MA Experiment 20001556 PARAMETER Experiment Name: At_Drought_Soil_Dry_P Parameter: Organism Value: A. thaliana
  misc_feature: MA Experiment 20001556 PARAMETER Experiment Name: At_Drought_Soil_Dry_P Parameter: Plant Line Value: WS
  misc_feature: MA Experiment 20001556 PARAMETER Experiment Name: At_Drought_Soil_Dry_P Parameter: Post Timepoint (hr) Value: None
  misc_feature: MA Experiment 20001556 PARAMETER Experiment Name: At_Drought_Soil_Dry_P Parameter: Post-Treatment Value: None
  misc_feature: MA Experiment 20001556 PARAMETER Experiment Name: At_Drought_Soil_Dry_P Parameter: Timepoint (day) Value: 12
  misc_feature: MA Experiment 20001556 PARAMETER Experiment Name: At_Drought_Soil_Dry_P Parameter: Treatment Value: Drought vs. No Drought
  misc_feature: MA Experiment ID: 20001557 Result: Up-regulated in Transcription
  misc_feature: MA Experiment 20001557 PARAMETER Experiment Name: At_Drought_Soil_Dry_P Parameter: Age (day) Value: 27
  misc_feature: MA Experiment 20001557 PARAMETER Experiment Name: At_Drought_Soil_Dry_P Parameter: Organism Value: A. thaliana
  misc_feature: MA Experiment 20001557 PARAMETER Experiment Name: At_Drought_Soil_Dry_P Parameter: Plant Line Value: WS
  misc_feature: MA Experiment 20001557 PARAMETER Experiment Name: At_Drought_Soil_Dry_P Parameter: Post Timepoint (hr) Value: 3
  misc_feature: MA Experiment 20001557 PARAMETER Experiment Name: At_Drought_Soil_Dry_P Parameter: Post-Treatment Value: Re-Water vs. No Drought
  misc_feature: MA Experiment 20001557 PARAMETER Experiment Name: At_Drought_Soil_Dry_P Parameter: Timepoint (day) Value: 13
  misc_feature: MA Experiment 20001557 PARAMETER Experiment Name: At_Drought_Soil_Dry_P Parameter: Treatment Value: Drought vs. No Drought
  misc_feature: MA Experiment ID: 20001757 Result: Down-regulated in Transcription
  misc_feature: MA Experiment 20001757 PARAMETER Experiment Name: At_50mM_NH4NO3_L-to-H_P Parameter: Timepoint (hr) Value: 6
  misc_feature: MA Experiment 20001757 PARAMETER Experiment Name: At_50mM_NH4NO3_L-to-H_P Parameter: Tissue Value: Leaf
  misc_feature: MA Experiment 20001757 PARAMETER Experiment Name: At_50mM_NH4NO3_L-to-H_P Parameter: Treatment Value: 50mM NH4NO3 vs 100mM Mannitol
aagctttgaacgttagcaaaattatgttacctaccaccagtccctggcttattatatagagagagatattcacatttacaatttcgatattgtttctctaagatcgtaaaatagtacaccaagccatttataaatttcttcactctcagattcaaaataatataaattagaaatgggaacagagatggtcatggttcacgaggttccttttcctccacagatcatcacttccaagccactctctcttctgggccaagggatcacagacattgagatccactttcttcaagtgaagttcactgcgatcggagtttacttagatccttcagatgttaaaacacatcttgataactggaaaggcaaaaccggaaaagaactcgccggcgatgatgacttcttcgacgcccttgcctccgcggagatggagaaggttataagagtggtggtgataaaggagataaaaggagctcagtacggagtgcagctagagaatacggtgagagatcgtttggctgaggaggataagtacgaggaagaagaagaaactgagctcgagaaggtcgttggctttttccagtccaagtacttcaaagctaactccgttatcacttaccatttctcagccaaagatggcatttgcgagatcgggtttgagacggaaggtaaagaagaggagaaactgaaggtggagaatgcgaatgtggtgggaatgatgcagagatggtatttgtccggaagtcgtggagtctcaccgtcgactattgtctccatcgctgattcaatctccgcagttttaacctaagaaccatggccccttacataaaaatttgtatgtgtgtgtgttttatgtagtatttttttttttcctcttgtcaagttcctgcttttgtatcatcaaacttttactttggagtttgatatggccgaacaatatggtaattccttaatctcaatttaaatcagctttgctcgtttggattc

SEQ ID NO: 101546 - protein, 209 aa, Arabidopsis thaliana; identical to SEQ ID NO: 25348
  peptide (1)..(209): Ceres Seq. ID no. 13608112
  misc_feature (1)..(209): Pfam Name: Chalcone-flavanone isomerase Pfam Description: Chalcone-flavanone isomerase
  misc_feature (1)..(209): Homolog of NCBI NO: 18414838 NR Description: chalcone-flavanone isomerase family [Arabidopsis
  misc_feature (5)..(209): Homolog of NCBI NO: 10176739 NR Description: contains similarity to chalcone-flavonone
  misc_feature (3)..(208): Homolog of NCBI NO: 4126399 NR Description: chalcone isomerase [Citrus sinensis]
  misc_feature (3)..(208): Homolog of NCBI NO: 5921722 NR Description: Chalcone--flavonone isomerase (Chalcone >gi|3126969|gb|AAC16013.1| chalcone isomerase [Elaeagnus
  misc_feature (6)..(208): Homolog of NCBI NO: 27530601 NR Description: putative chalcone isomerase [Lotus japonicus]
  misc_feature (6)..(205): Homolog of NCBI NO: 1705761 NR Description: CHALCONE--FLAVONONE ISOMERASE (CHALCONE
  misc_feature (11)..(209): Homolog of NCBI NO: 729103 NR Description: CHALCONE--FLAVONONE ISOMERASE (CHALCONE ISOMERASE)
  misc_feature (3)..(208): Homolog of NCBI NO: 68481 NR Description: chalcone isomerase (EC 5.5.1.6) A - garden
  misc_feature (3)..(208): Homolog of NCBI NO: 116136 NR Description: CHALCONE--FLAVONONE ISOMERASE A (CHALCONE
  misc_feature (6)..(194): Homolog of NCBI NO: 28804193 NR Description: chalcone isomerase [Lotus japonicus]

SEQ ID NO: 101547 - protein, 205 aa, Arabidopsis thaliana; identical to SEQ ID NO: 25349
  peptide (1)..(205): Ceres Seq. ID no. 13608113
  misc_feature (1)..(205): Pfam Name: Chalcone-flavanone isomerase Pfam Description: Chalcone-flavanone isomerase
  misc_feature (1)..(205): Homolog of NCBI NO: 18414838 NR Description: chalcone-flavanone isomerase family [Arabidopsis
  misc_feature (1)..(205): Homolog of NCBI NO: 10176739 NR Description: contains similarity to chalcone-flavonone
  misc_feature (1)..(204): Homolog of NCBI NO: 4126399 NR Description: chalcone isomerase [Citrus sinensis]
  misc_feature (1)..(204): Homolog of NCBI NO: 5921722 NR Description: Chalcone--flavonone isomerase (Chalcone >gi|3126969|gb|AAC16013.1| chalcone isomerase [Elaeagnus
  misc_feature (2)..(204): Homolog of NCBI NO: 27530601 NR Description: putative chalcone isomerase [Lotus japonicus]
  misc_feature (2)..(201): Homolog of NCBI NO: 1705761 NR Description: CHALCONE--FLAVONONE ISOMERASE (CHALCONE
  misc_feature (7)..(205): Homolog of NCBI NO: 729103 NR Description: CHALCONE--FLAVONONE ISOMERASE (CHALCONE ISOMERASE)
  misc_feature (1)..(204): Homolog of NCBI NO: 68481 NR Description: chalcone isomerase (EC 5.5.1.6) A - garden
  misc_feature (1)..(204): Homolog of NCBI NO: 116136 NR Description: CHALCONE--FLAVONONE ISOMERASE A (CHALCONE
  misc_feature (2)..(190): Homolog of NCBI NO: 28804193 NR Description: chalcone isomerase [Lotus japonicus]

SEQ ID NO: 101548 - protein, 203 aa, Arabidopsis thaliana; identical to SEQ ID NO: 25350
  peptide (1)..(203): Ceres Seq. ID no. 13608114
  misc_feature (1)..(203): Pfam Name: Chalcone-flavanone isomerase Pfam Description: Chalcone-flavanone isomerase
  misc_feature (1)..(203): Homolog of NCBI NO: 18414838 NR Description: chalcone-flavanone isomerase family [Arabidopsis
  misc_feature (1)..(203): Homolog of NCBI NO: 10176739 NR Description: contains similarity to chalcone-flavonone
  misc_feature (1)..(202): Homolog of NCBI NO: 4126399 NR Description: chalcone isomerase [Citrus sinensis]
  misc_feature (1)..(202): Homolog of NCBI NO: 5921722 NR Description: Chalcone--flavonone isomerase (Chalcone >gi|3126969|gb|AAC16013.1| chalcone isomerase [Elaeagnus
  misc_feature (1)..(202): Homolog of NCBI NO: 27530601 NR Description: putative chalcone isomerase [Lotus japonicus]
  misc_feature (1)..(199): Homolog of NCBI NO: 1705761 NR Description: CHALCONE--FLAVONONE ISOMERASE (CHALCONE
  misc_feature (5)..(203): Homolog of NCBI NO: 729103 NR Description: CHALCONE--FLAVONONE ISOMERASE (CHALCONE ISOMERASE)
  misc_feature (1)..(202): Homolog of NCBI NO: 68481 NR Description: chalcone isomerase (EC 5.5.1.6) A - garden
  misc_feature (1)..(202): Homolog of NCBI NO: 116136 NR Description: CHALCONE--FLAVONONE ISOMERASE A (CHALCONE
  misc_feature (1)..(188): Homolog of NCBI NO: 28804193 NR Description: chalcone isomerase [Lotus japonicus]

SEQ ID NO: 101549 - DNA, 1953 bp, Arabidopsis thaliana
  misc_feature (1)..(1953): Ceres Seq. ID no. 13608127
  misc_feature: MA Experiment ID: 20000315 Result: Down-regulated in Transcription
  misc_feature: MA Experiment 20000315 PARAMETER Experiment Name: At_14day_Shoots-Roots_Sub_P Parameter: Age (day) Value: 14
  misc_feature: MA Experiment 20000315 PARAMETER Experiment Name: At_14day_Shoots-Roots_Sub_P Parameter: Organism Value: A. thaliana
  misc_feature: MA Experiment 20000315 PARAMETER Experiment Name: At_14day_Shoots-Roots_Sub_P Parameter: Plant Line Value: WS
  misc_feature: MA Experiment 20000315 PARAMETER Experiment Name: At_14day_Shoots-Roots_Sub_P Parameter: Tissue Value: Shoots vs. Whole Plant
aaaagagtaaacaaaaagcaaaagaagtgtagcaatgttagtgacaagagaatgtttgcagtttcgatagtacctcgaaccacatcgtgccgtttgagctctgcctttctctgtcaactctcgattcctctcactcttcggctccaccatcactaccaacaccaccagcctcacctaccatctcctctctcttttcagattcattcgttaagaaagcagatcgacatggcagctcaaggaggtgattcatatgaggaagcgttggctgctttgtcgtctttgatcacgaaacgaagtcgtgctgataagagcaataaaggggatcgctttgagttagtctttgattatctcaagctacttgacctggaagaagacattttaaagatgaatgttattcatgtcgctggtaccaaaggcaagggatccacatgtacctttacagagtctattattcgaaactatggctttcgaactggactcttcacttcacctcacctcattgatgtccgggaaagatttcgtttggatggtgtggacataagtgaagagaaatttttgggatatttctggtggtgctataacaggctcaaggagagaactaacgaggagataccaatgcctacatatttccgcttccttgcattgctagcttttaaaatatttgctgcagaagaggtagatgctgctatattggaggttggattaggtggaaagtttgatgccaccaatgcggttcagaaacctgtggtatgtggtatttcttcactcggatatgaccacatggaaattctaggtgatacacttggaaaaattgctggtgagaaggctggaattttcaagcttggagttccagctttcacagtgccccaacctgatgaagccatgcgtgtccttgaagagaaagcttccgaaacagaagtgaatctcgaagtggtgcagccactaaccgcaaggctgttaagtggtcagaaacttgggcttgatggggaacaccaatatgtcaatgctggtctagcagtttcgcttgcctctatctggcttcagcaaattggtaaactagaagttccgagtcggactcagatgagtattctgcctgagaaattcatcaaagggttagctacagcgagtttgcaaggacgagcacaggtcgtccctgatcaatatactgaatctcggacttcaggagatctagtattttatctggatggagctcacagtccagaaagcatggaagcatgcgccaaatggttttcggttgcggttaagggagacaaccagtcagggagttcaggacatttggttaatggctctgcaggatcctctcatgataaatggtcaaatgaaacctgtgaacagatattgttgttcaattgtatgtcagttcgggacccaaatctactgcttccacatctaaagaatatgtgcgcaaaatacggtgtcaatttcaagaaggcattgtttgtaccaaacatgtcggtgtatcataaggttggtacagcagctgatttgccagagaatgatccacaggttgacttgtcatggcagttcacacttcagaaagtgtgggaaagccttgtgcagagtgaaagagatggagaaaaagatggtgaaagtgatggaaacagtgaggtgtttacttcactacccatggcaataaaatgtctaagggacactgtacatgagagtagctcagccacacgtttccaggtccttgtaactggttcgttacatcttgtgggcgatgtactgagattaatcagaaaatgaagagaaacaaacacacttcacttttcaaatttcaatacacgagtcgtcatccaccaatcaccgtacccactgtggaagaggatggcatttcttattaaaagctattttgtattatttcggttttagtttccagcttaagtactaacaaagttgtggtgatctttttcaaattcaagagcaatagtt

SEQ ID NO: 101550 - protein, 588 aa, Arabidopsis thaliana
  peptide (1)..(588): Ceres Seq. ID no. 13608128
  misc_feature (208)..(294): Pfam Name: Mur ligase family, catalytic domain Pfam Description: Mur ligase family, catalytic domain
  misc_feature (18)..(588): Homolog of NCBI NO: 30681208 NR Description: folylpolyglutamate synthase (fpgs2) [Arabidopsis
  misc_feature (18)..(588): Homolog of NCBI NO: 17976705 NR Description: dihydrofolate synthetase /folylpolyglutamate
  misc_feature (80)..(434): Homolog of NCBI NO: 10177571 NR Description: tetrahydrofolylpolyglutamate synthase-like
  misc_feature (443)..(571): Homolog of NCBI NO: 10177571 NR Description: tetrahydrofolylpolyglutamate synthase-like
  misc_feature (49)..(377): Homolog of NCBI NO: 37535812 NR Description: putative folylpolyglutamate synthetase [Oryza
  misc_feature (364)..(588): Homolog of NCBI NO: 37535812 NR Description: putative folylpolyglutamate synthetase [Oryza
  misc_feature (84)..(426): Homolog of NCBI NO: 30694288 NR Description: folylpolyglutamate-dihydrofolate synthase
  misc_feature (451)..(588): Homolog of NCBI NO: 30694288 NR Description: folylpolyglutamate-dihydrofolate synthase
  misc_feature (84)..(426): Homolog of NCBI NO: 30694286 NR Description: folylpolyglutamate-dihydrofolate synthase [Arabidopsis thaliana] >gi|15292867|gb|AAK92804.1| putative synthase precursor [Arabidopsis thaliana]
  misc_feature (451)..(588): Homolog of NCBI NO: 30694286 NR Description: folylpolyglutamate-dihydrofolate synthase [Arabidopsis thaliana] >gi|15292867|gb|AAK92804.1| putative synthase precursor [Arabidopsis thaliana]
KRVNKKQKKCSNVSDKRMFAVSIVPRTTSCRLSSAFLCQLSIPLTLRLHHHYQHHQPHLPSPLSFQIHSLRKQIDMAAQGGDSYEEALAALSSLITKRSRADKSNKGDRFELVFDYLKLLDLEEDILKMNVIHVAGTKGKGSTCTFTESIIRNYGFRTGLFTSPHLIDVRERFRLDGVDISEEKFLGYFWWCYNRLKERTNEEIPMPTYFRFLALLAFKIFAAEEVDAAILEVGLGGKFDATNAVQKPVVCGISSLGYDHMEILGDTLGKIAGEKAGIFKLGVPAFTVPQPDEAMRVLEEKASETEVNLEVVQPLTARLLSGQKLGLDGEHQYVNAGLAVSLASIWLQQIGKLEVPSRTQMSILPEKFIKGLATASLQGRAQVVPDQYTESRTSGDLVFYLDGAHSPESMEACAKWFSVAVKGDNQSGSSGHLVNGSAGSSHDKWSNETCEQILLFNCMSVRDPNLLLPHLKNMCAKYGVNFKKALFVPNMSVYHKVGTAADLPENDPQVDLSWQFTLQKVWESLVQSERDGEKDGESDGNSEVFTSLPMAIKCLRDTVHESSSATRFQVLVTGSLHLVGDVLRLIRK

SEQ ID NO: 101551 - protein, 571 aa, Arabidopsis thaliana
  peptide (1)..(571): Ceres Seq. ID no. 13608129
  misc_feature (191)..(277): Pfam Name: Mur ligase family, catalytic domain Pfam Description: Mur ligase family, catalytic domain
  misc_feature (1)..(571): Homolog of NCBI NO: 30681208 NR Description: folylpolyglutamate synthase (fpgs2) [Arabidopsis
  misc_feature (1)..(571): Homolog of NCBI NO: 17976705 NR Description: dihydrofolate synthetase /folylpolyglutamate
  misc_feature (63)..(417): Homolog of NCBI NO: 10177571 NR Description: tetrahydrofolylpolyglutamate synthase-like
  misc_feature (426)..(554): Homolog of NCBI NO: 10177571 NR Description: tetrahydrofolylpolyglutamate synthase-like
  misc_feature (32)..(360): Homolog of NCBI NO: 37535812 NR Description: putative folylpolyglutamate synthetase [Oryza
  misc_feature (347)..(571): Homolog of NCBI NO: 37535812 NR Description: putative folylpolyglutamate synthetase [Oryza
  misc_feature (67)..(409): Homolog of NCBI NO: 30694288 NR Description: folylpolyglutamate-dihydrofolate synthase
  misc_feature (434)..(571): Homolog of NCBI NO: 30694288 NR Description: folylpolyglutamate-dihydrofolate synthase
  misc_feature (67)..(409): Homolog of NCBI NO: 30694286 NR Description: folylpolyglutamate-dihydrofolate synthase [Arabidopsis thaliana] >gi|15292867|gb|AAK92804.1| putative synthase precursor [Arabidopsis thaliana]
  misc_feature (434)..(571): Homolog of NCBI NO: 30694286 NR Description: folylpolyglutamate-dihydrofolate synthase [Arabidopsis thaliana] >gi|15292867|gb|AAK92804.1| putative synthase precursor [Arabidopsis thaliana]
MFAVSIVPRTTSCRLSSAFLCQLSIPLTLRLHHHYQHHQPHLPSPLSFQIHSLRKQIDMAAQGGDSYEEALAALSSLITKRSRADKSNKGDRFELVFDYLKLLDLEEDILKMNVIHVAGTKGKGSTCTFTESIIRNYGFRTGLFTSPHLIDVRERFRLDGVDISEEKFLGYFWWCYNRLKERTNEEIPMPTYFRFLALLAFKIFAAEEVDAAILEVGLGGKFDATNAVQKPVVCGISSLGYDHMEILGDTLGKIAGEKAGIFKLGVPAFTVPQPDEAMRVLEEKASETEVNLEVVQPLTARLLSGQKLGLDGEHQYVNAGLAVSLASIWLQQIGKLEVPSRTQMSILPEKFIKGLATASLQGRAQVVPDQYTESRTSGDLVFYLDGAHSPESMEACAKWFSVAVKGDNQSGSSGHLVNGSAGSSHDKWSNETCEQILLFNCMSVRDPNLLLPHLKNMCAKYGVNFKKALFVPNMSVYHKVGTAADLPENDPQVDLSWQFTLQKVWESLVQSERDGEKDGESDGNSEVFTSLPMAIKCLRDTVHESSSATRFQVLVTGSLHLVGDVLRLIRK

SEQ ID NO: 101552 - protein, 513 aa, Arabidopsis thaliana
  peptide (1)..(513): Ceres Seq. ID no. 13608130
  misc_feature (133)..(219): Pfam Name: Mur ligase family, catalytic domain Pfam Description: Mur ligase family, catalytic domain
  misc_feature (1)..(513): Homolog of NCBI NO: 30681208 NR Description: folylpolyglutamate synthase (fpgs2) [Arabidopsis
  misc_feature (1)..(513): Homolog of NCBI NO: 17976705 NR Description: dihydrofolate synthetase /folylpolyglutamate
  misc_feature (5)..(359): Homolog of NCBI NO: 10177571 NR Description: tetrahydrofolylpolyglutamate synthase-like
  misc_feature (368)..(496): Homolog of NCBI NO: 10177571 NR Description: tetrahydrofolylpolyglutamate synthase-like
  misc_feature (1)..(302): Homolog of NCBI NO: 37535812 NR Description: putative folylpolyglutamate synthetase [Oryza
  misc_feature (289)..(513): Homolog of NCBI NO: 37535812 NR Description: putative folylpolyglutamate synthetase [Oryza
  misc_feature (9)..(351): Homolog of NCBI NO: 30694288 NR Description: folylpolyglutamate-dihydrofolate synthase
  misc_feature (376)..(513): Homolog of NCBI NO: 30694288 NR Description: folylpolyglutamate-dihydrofolate synthase
  misc_feature (9)..(351): Homolog of NCBI NO: 30694286 NR Description: folylpolyglutamate-dihydrofolate synthase [Arabidopsis thaliana] >gi|15292867|gb|AAK92804.1| putative synthase precursor [Arabidopsis thaliana]
  misc_feature (376)..(513): Homolog of NCBI NO: 30694286 NR Description: folylpolyglutamate-dihydrofolate synthase [Arabidopsis thaliana] >gi|15292867|gb|AAK92804.1| putative synthase precursor [Arabidopsis thaliana]
MAAQGGDSYEEALAALSSLITKRSRADKSNKGDRFELVFDYLKLLDLEEDILKMNVIHVAGTKGKGSTCTFTESIIRNYGFRTGLFTSPHLIDVRERFRLDGVDISEEKFLGYFWWCYNRLKERTNEEIPMPTYFRFLALLAFKIFAAEEVDAAILEVGLGGKFDATNAVQKPVVCGISSLGYDHMEILGDTLGKIAGEKAGIFKLGVPAFTVPQPDEAMRVLEEKASETEVNLEVVQPLTARLLSGQKLGLDGEHQYVNAGLAVSLASIWLQQIGKLEVPSRTQMSILPEKFIKGLATASLQGRAQVVPDQYTESRTSGDLVFYLDGAHSPESMEACAKWFSVAVKGDNQSGSSGHLVNGSAGSSHDKWSNETCEQILLFNCMSVRDPNLLLPHLKNMCAKYGVNFKKALFVPNMSVYHKVGTAADLPENDPQVDLSWQFTLQKVWESLVQSERDGEKDGESDGNSEVFTSLPMAIKCLRDTVHESSSATRFQVLVTGSLHLVGDVLRLIRK

SEQ ID NO: 101553 - DNA, 1443 bp, Arabidopsis thaliana
  misc_feature (1)..(1443): Ceres Seq. ID no. 13608143
  misc_feature: MA Experiment ID: 108595 Result: Up-regulated in Transcription
  misc_feature: MA Experiment 108595 PARAMETER Experiment Name: At_Ler-pi_Ovule_cDNA_P Parameter: Plant Line Value: null
  misc_feature: MA Experiment ID: 20000179 Result: Down-regulated in Transcription
  misc_feature: MA Experiment 20000179 PARAMETER Experiment Name: At_Germinating_Seeds_P Parameter: Age (hr) Value: 6 vs. 0
  misc_feature: MA Experiment 20000179 PARAMETER Experiment Name: At_Germinating_Seeds_P Parameter: Tissue Value: Germinating Seeds
  misc_feature: MA Experiment ID: 20000180 Result: Down-regulated in Transcription
  misc_feature: MA Experiment 20000180 PARAMETER Experiment Name: At_Germinating_Seeds_P Parameter: Age (hr) Value: 24 vs. 0
  misc_feature: MA Experiment 20000180 PARAMETER Experiment Name: At_Germinating_Seeds_P Parameter: Tissue Value: Germinating Seeds
  misc_feature: MA Experiment ID: 20001557 Result: Up-regulated in Transcription
  misc_feature: MA Experiment 20001557 PARAMETER Experiment Name: At_Drought_Soil_Dry_P Parameter: Age (day) Value: 27
  misc_feature: MA Experiment 20001557 PARAMETER Experiment Name: At_Drought_Soil_Dry_P Parameter: Organism Value: A. thaliana
  misc_feature: MA Experiment 20001557 PARAMETER Experiment Name: At_Drought_Soil_Dry_P Parameter: Plant Line Value: WS
  misc_feature: MA Experiment 20001557 PARAMETER Experiment Name: At_Drought_Soil_Dry_P Parameter: Post Timepoint (hr) Value: 3
  misc_feature: MA Experiment 20001557 PARAMETER Experiment Name: At_Drought_Soil_Dry_P Parameter: Post-Treatment Value: Re-Water vs. No Drought
  misc_feature: MA Experiment 20001557 PARAMETER Experiment Name: At_Drought_Soil_Dry_P Parameter: Timepoint (day) Value: 13
  misc_feature: MA Experiment 20001557 PARAMETER Experiment Name: At_Drought_Soil_Dry_P Parameter: Treatment Value: Drought vs. No Drought
  misc_feature: MA Experiment ID: 20001558 Result: Up-regulated in Transcription
  misc_feature: MA Experiment 20001558 PARAMETER Experiment Name: At_Drought_Soil_Dry_P Parameter: Age (day) Value: 27
  misc_feature: MA Experiment 20001558 PARAMETER Experiment Name: At_Drought_Soil_Dry_P Parameter: Organism Value: A. thaliana
  misc_feature: MA Experiment 20001558 PARAMETER Experiment Name: At_Drought_Soil_Dry_P Parameter: Plant Line Value: WS
  misc_feature: MA Experiment 20001558 PARAMETER Experiment Name: At_Drought_Soil_Dry_P Parameter: Post Timepoint (hr) Value: 6
  misc_feature: MA Experiment 20001558 PARAMETER Experiment Name: At_Drought_Soil_Dry_P Parameter: Post-Treatment Value: Re-Water vs. No Drought
  misc_feature: MA Experiment 20001558 PARAMETER Experiment Name: At_Drought_Soil_Dry_P Parameter: Timepoint (day) Value: 13
  misc_feature: MA Experiment 20001558 PARAMETER Experiment Name: At_Drought_Soil_Dry_P Parameter: Treatment Value: Drought vs. No Drought
  misc_feature: MA Experiment ID: 20001560 Result: Up-regulated in Transcription
  misc_feature: MA Experiment 20001560 PARAMETER Experiment Name: At_Drought_Soil_Dry_P Parameter: Age (day) Value: 28
  misc_feature: MA Experiment 20001560 PARAMETER Experiment Name: At_Drought_Soil_Dry_P Parameter: Organism Value: A. thaliana
  misc_feature: MA Experiment 20001560 PARAMETER Experiment Name: At_Drought_Soil_Dry_P Parameter: Plant Line Value: WS
  misc_feature: MA Experiment 20001560 PARAMETER Experiment Name: At_Drought_Soil_Dry_P Parameter: Post Timepoint (hr) Value: None
  misc_feature: MA Experiment 20001560 PARAMETER Experiment Name: At_Drought_Soil_Dry_P Parameter: Post-Treatment Value: None
  misc_feature: MA Experiment 20001560 PARAMETER Experiment Name: At_Drought_Soil_Dry_P Parameter: Timepoint (day) Value: 14
  misc_feature: MA Experiment 20001560 PARAMETER Experiment Name: At_Drought_Soil_Dry_P Parameter: Treatment Value: Drought vs. No Drought
acatgttttgctctgcttctctctttatcttcttcttcatcttttgtcactcttttcttctgctctaaactttttcttttcgctgcaaaaaaaaattcccaggaatatttcttaaaagaaatttcatccctaaataagaaaaaagcatctccttctttagtgtcctccttcaccaaactcttgattccataagcatatattaaaaaagctctctgctttcttcaactttcccgggaaaatcttcttgttacaaagcatcaatctcttgttttaccaattttctctctttattccttttttgccctttacttttcctaactttggtctttatatataaacacacgacacaaagaagaacacacataagttaaaactattacaacagttttaaagagagagatttaaaaaatggagacagagaagaaagtttctctcccaagaatcttacgaatctctgttactgatccttacgcaacagattcgtcaagcgacgaagaagaagaagttgattttgatgcattatctacaaaacgacgtcgtgttaagaagtacgtgaaggaagtggtgcttgattcggtggtttctgataaagagaagccgatgaagaagaagagaaagaagcgcgttgttactgttccagtggttgttacgacggcgacgaggaagtttcgtggagtgaggcaaagaccgtggggaaaatgggcggcggagattagagatccgagtagacgtgttagggtttggttaggtacttttgacacggcggaggaagctgccattgtttacgataacgcagctattcagctacgtggtcctaacgcagagcttaacttccctcctcctccggtgacggagaatgttgaagaagcttcgacggaggtgaaaggagtttcggattttatcattggcggtggagaatgtcttcgttcgccggtttctgttctcgaatctccgttctccggcgagtctactgcggttaaagaggagtttgtcggtgtatcgacggcggagattgtggttaaaaaggagccgtcttttaacggttcagatttctcggcgccgttgttctcggacgacgacgtttttggtttctcgacgtcgatgagtgaaagtttcggcggcgatttatttggagataatctttttgcggatatgagttttggatccgggtttggattcgggtctgggtctggattctccagctggcacgttgaggaccattttcaagatattggggatttattcgggtcggatcctgtcttaactgtttaagaaataactggccgtttaacggcgtttagtgaagttttgttaccggcgacggcgaggattaaaaaaaaacggcgatttattttttgaatgaagatttgttaaatatattaaacttttttgtaacttaattaatggtgattttatttttaaataaaactaatggtaaatggt

SEQ ID NO: 101554 - protein, 287 aa, Arabidopsis thaliana
  peptide (1)..(287): Ceres Seq. ID no. 13608144
  misc_feature (84)..(148): Pfam Name: AP2 domain Pfam Description: AP2 domain
  misc_feature (1)..(287): Homolog of NCBI NO: 15237053 NR Description: AP2 domain transcription factor, putative
  misc_feature (1)..(252): Homolog of NCBI NO: 15236595 NR Description: AP2 domain transcription factor, putative
  misc_feature (1)..(252): Homolog of NCBI NO: 22655200 NR Description: putative Ap2 domain protein [Arabidopsis thaliana]
  misc_feature (1)..(219): Homolog of NCBI NO: 15234337 NR Description: putative protein; protein id: At4g27950.1
  misc_feature (10)..(274): Homolog of NCBI NO: 15225959 NR Description: AP2 domain transcription factor, putative thaliana] >gi|25347738|pir||C84901 probable AP2 domain
  misc_feature (10)..(223): Homolog of NCBI NO: 15233169 NR Description: AP2 domain transcription factor, putative
  misc_feature (1)..(236): Homolog of NCBI NO: 15238705 NR Description: putative protein; protein id: At5g53290.1
  misc_feature (143)..(287): Homolog of NCBI NO: 15236595 NR Description: AP2 domain transcription factor, putative
  misc_feature (143)..(287): Homolog of NCBI NO: 22655200 NR Description: putative Ap2 domain protein [Arabidopsis thaliana]
  misc_feature (1)..(179): Homolog of NCBI NO: 7531181 NR Description: PATHOGENESIS-RELATED GENES TRANSCRIPTIONAL
METEKKVSLPRILRISVTDPYATDSSSDEEEEVDFDALSTKRRRVKKYVKEVVLDSVVSDKEKPMKKKRKKRVVTVPVVVTTATRKFRGVRQRPWGKWAAEIRDPSRRVRVWLGTFDTAEEAAIVYDNAAIQLRGPNAELNFPPPPVTENVEEASTEVKGVSDFIIGGGECLRSPVSVLESPFSGESTAVKEEFVGVSTAEIVVKKEPSFNGSDFSAPLFSDDDVFGFSTSMSESFGGDLFGDNLFADMSFGSGFGFGSGSGFSSWHVEDHFQDIGDLFGSDPVLTV

SEQ ID NO: 101555 - protein, 223 aa, Arabidopsis thaliana
  peptide (1)..(223): Ceres Seq. ID no. 13608145
  misc_feature (20)..(84): Pfam Name: AP2 domain Pfam Description: AP2 domain
  misc_feature (1)..(223): Homolog of NCBI NO: 15237053 NR Description: AP2 domain transcription factor, putative
  misc_feature (1)..(188): Homolog of NCBI NO: 15236595 NR Description: AP2 domain transcription factor, putative
  misc_feature (1)..(188): Homolog of NCBI NO: 22655200 NR Description: putative Ap2 domain protein [Arabidopsis thaliana]
  misc_feature (1)..(155): Homolog of NCBI NO: 15234337 NR Description: putative protein; protein id: At4g27950.1
  misc_feature (1)..(210): Homolog of NCBI NO: 15225959 NR Description: AP2 domain transcription factor, putative thaliana] >gi|25347738|pir||C84901 probable AP2 domain
  misc_feature (1)..(159): Homolog of NCBI NO: 15233169 NR Description: AP2 domain transcription factor, putative
  misc_feature (1)..(172): Homolog of NCBI NO: 15238705 NR Description: putative protein; protein id: At5g53290.1
  misc_feature (79)..(223): Homolog of NCBI NO: 15236595 NR Description: AP2 domain transcription factor, putative
  misc_feature (79)..(223): Homolog of NCBI NO: 22655200 NR Description: putative Ap2 domain protein [Arabidopsis thaliana]
  misc_feature (1)..(115): Homolog of NCBI NO: 7531181 NR Description: PATHOGENESIS-RELATED GENES TRANSCRIPTIONAL
MKKKRKKRVVTVPVVVTTATRKFRGVRQRPWGKWAAEIRDPSRRVRVWLGTFDTAEEAAIVYDNAAIQLRGPNAELNFPPPPVTENVEEASTEVKGVSDFIIGGGECLRSPVSVLESPFSGESTAVKEEFVGVSTAEIVVKKEPSFNGSDFSAPLFSDDDVFGFSTSMSESFGGDLFGDNLFADMSFGSGFGFGSGSGFSSWHVEDHFQDIGDLFGSDPVLTV

SEQ ID NO: 101556 - DNA, 1722 bp, Arabidopsis thaliana
  misc_feature (1)..(1722): Ceres Seq. ID no. 13608172
  misc_feature: MA Experiment ID: 108488 Result: Down-regulated in Transcription
  misc_feature: MA Experiment ID: 108561 Result: Up-regulated in Transcription
  misc_feature: MA Experiment 108561 PARAMETER Experiment Name: At_100uM_ABA_cDNA_P Parameter: Timepoint (hr) Value: 6
  misc_feature: MA Experiment 108561 PARAMETER Experiment Name: At_100uM_ABA_cDNA_P Parameter: Tissue Value: Aerial
  misc_feature: MA Experiment 108561 PARAMETER Experiment Name: At_100uM_ABA_cDNA_P Parameter: Treatment Value: 100uM ABA vs. No Treatment
  misc_feature: MA Experiment ID: 108573 Result: Up-regulated in Transcription
  misc_feature: MA Experiment 108573 PARAMETER Experiment Name: At_Drought_cDNA_P Parameter: Timepoint (hr) Value: 6
  misc_feature: MA Experiment 108573 PARAMETER Experiment Name: At_Drought_cDNA_P Parameter: Tissue Value: Aerial
  misc_feature: MA Experiment 108573 PARAMETER Experiment Name: At_Drought_cDNA_P Parameter: Treatment Value: Drought vs. No Drought
  misc_feature: MA Experiment ID: 108574 Result: Down-regulated in Transcription
  misc_feature: MA Experiment 108574 PARAMETER Experiment Name: At_Wounding__cDNA_P Parameter: Timepoint (hr) Value: 1
  misc_feature: MA Experiment 108574 PARAMETER Experiment Name: At_Wounding__cDNA_P Parameter: Tissue Value: Aerial
  misc_feature: MA Experiment 108574 PARAMETER Experiment Name: At_Wounding__cDNA_P Parameter: Treatment Value: Wounding vs. No Wounding
  misc_feature: MA Experiment ID: 108579 Result: Down-regulated in Transcription
  misc_feature: MA Experiment 108579 PARAMETER Experiment Name: At_4deg_Cold_cDNA_P Parameter: Temperature (deg C) Value: 4 vs. 22
  misc_feature: MA Experiment 108579 PARAMETER Experiment Name: At_4deg_Cold_cDNA_P Parameter: Timepoint (hr) Value: 6
  misc_feature: MA Experiment 108579 PARAMETER Experiment Name: At_4deg_Cold_cDNA_P Parameter: Tissue Value: Aerial
  misc_feature: MA Experiment ID: 108595 Result: Down-regulated in Transcription
  misc_feature: MA Experiment 108595 PARAMETER Experiment Name: At_Ler-pi_Ovule_cDNA_P Parameter: Plant Line Value: null
  misc_feature: MA Experiment ID: 20000069 Result: Up-regulated in Transcription
  misc_feature: MA Experiment 20000069 PARAMETER Experiment Name: At_100uM_ABA_Mutants_cDNA_P Parameter: Plant Line Value: CS23
  misc_feature: MA Experiment 20000069 PARAMETER Experiment Name: At_100uM_ABA_Mutants_cDNA_P Parameter: Timepoint (hr) Value: 6
  misc_feature: MA Experiment 20000069 PARAMETER Experiment Name: At_100uM_ABA_Mutants_cDNA_P Parameter: Tissue Value: Aerial
  misc_feature: MA Experiment 20000069 PARAMETER Experiment Name: At_100uM_ABA_Mutants_cDNA_P Parameter: Treatment Value: 100uM ABA vs. No Treatment
  misc_feature: MA Experiment ID: 20000071 Result: Up-regulated in Transcription
  misc_feature: MA Experiment 20000071 PARAMETER Experiment Name: At_100uM_ABA_Mutants_cDNA_P Parameter: Plant Line Value: CS8104
  misc_feature: MA Experiment 20000071 PARAMETER Experiment Name: At_100uM_ABA_Mutants_cDNA_P Parameter: Timepoint (hr) Value: 6
  misc_feature: MA Experiment 20000071 PARAMETER Experiment Name: At_100uM_ABA_Mutants_cDNA_P Parameter: Tissue Value: Aerial
  misc_feature: MA Experiment 20000071 PARAMETER Experiment Name: At_100uM_ABA_Mutants_cDNA_P Parameter: Treatment Value: 100uM ABA vs. No Treatment
  misc_feature: MA Experiment ID: 20000179 Result: Up-regulated in Transcription
  misc_feature: MA Experiment 20000179 PARAMETER Experiment Name: At_Germinating_Seeds_P Parameter: Age (hr) Value: 6 vs. 0
  misc_feature: MA Experiment 20000179 PARAMETER Experiment Name: At_Germinating_Seeds_P Parameter: Tissue Value: Germinating Seeds
  misc_feature: MA Experiment ID: 20000180 Result: Up-regulated in Transcription
  misc_feature: MA Experiment 20000180 PARAMETER Experiment Name: At_Germinating_Seeds_P Parameter: Age (hr) Value: 24 vs. 0
  misc_feature: MA Experiment 20000180 PARAMETER Experiment Name: At_Germinating_Seeds_P Parameter: Tissue Value: Germinating Seeds
  misc_feature: MA Experiment ID: 20000213 Result: Down-regulated in Transcription
  misc_feature: MA Experiment 20000213 PARAMETER Experiment Name: At_4deg_Cold_P Parameter: Timepoint (hr) Value: 2
  misc_feature: MA Experiment ID: 20000234 Result: Down-regulated in Transcription
  misc_feature: MA Experiment 20000234 PARAMETER Experiment Name: At_Siliques_P Parameter: Age (day) Value: 21
  misc_feature: MA Experiment 20000234 PARAMETER Experiment Name: At_Siliques_P Parameter: Organism Value: A. thaliana
  misc_feature: MA Experiment 20000234 PARAMETER Experiment Name: At_Siliques_P Parameter: Plant Line Value: WS
  misc_feature: MA Experiment 20000234 PARAMETER Experiment Name: At_Siliques_P Parameter: Tissue Value: Less Than 5mm Siliques vs. Whole Plant
  misc_feature: MA Experiment ID: 20000265 Result: Down-regulated in Transcription
  misc_feature: MA Experiment 20000265 PARAMETER Experiment Name: At_Open_Flower_P Parameter: Age (day) Value: 21
  misc_feature: MA Experiment 20000265 PARAMETER Experiment Name: At_Open_Flower_P Parameter: Plant Line Value: WS
  misc_feature: MA Experiment 20000265 PARAMETER Experiment Name: At_Open_Flower_P Parameter: Tissue Value: Closed Flower vs. Whole Plant
  misc_feature: MA Experiment ID: 20000286 Result: Down-regulated in Transcription
  misc_feature: MA Experiment 20000286 PARAMETER Experiment Name: At_Open_Flower_P Parameter: Age (day) Value: 21
  misc_feature: MA Experiment 20000286 PARAMETER Experiment Name: At_Open_Flower_P Parameter: Plant Line Value: WS
  misc_feature: MA Experiment 20000286 PARAMETER Experiment Name: At_Open_Flower_P Parameter: Tissue Value: Half Open vs. Whole Plant
  misc_feature: MA Experiment ID: 20000438 Result: Down-regulated in Transcription
  misc_feature: MA Experiment 20000438 PARAMETER Experiment Name: At_Shoots__P Parameter: Age (day) Value: 14
  misc_feature: MA Experiment 20000438 PARAMETER Experiment Name: At_Shoots__P Parameter: Tissue Value: Shoots vs. Whole Plant
  misc_feature: MA Experiment ID: 20000794 Result: Up-regulated in Transcription
  misc_feature: MA Experiment 20000794 PARAMETER Experiment Name: At_Petals_P Parameter: Age (day) Value: 23-25 days
  misc_feature: MA Experiment 20000794 PARAMETER Experiment Name: At_Petals_P Parameter: Plant Line Value: WS
  misc_feature: MA Experiment 20000794 PARAMETER Experiment Name: At_Petals_P Parameter: Tissue Value: Petals vs. Whole plant
  misc_feature: MA Experiment ID: 20001247 Result: Up-regulated in Transcription
  misc_feature: MA Experiment 20001247 PARAMETER Experiment Name: At_Far-red-induction_P Parameter: Age (day) Value: 7
  misc_feature: MA Experiment 20001247 PARAMETER Experiment Name: At_Far-red-induction_P Parameter: Light Value: Far-red vs. White
  misc_feature: MA Experiment 20001247 PARAMETER Experiment Name: At_Far-red-induction_P Parameter: Organism Value: A. thaliana
  misc_feature: MA Experiment 20001247 PARAMETER Experiment Name: At_Far-red-induction_P Parameter: Plant Line Value: Columbia
  misc_feature: MA Experiment 20001247 PARAMETER Experiment Name: At_Far-red-induction_P Parameter: Timepoint (hr) Value: 1
  misc_feature: MA Experiment 20001247 PARAMETER Experiment Name: At_Far-red-induction_P Parameter: Tissue Value: Whole Plant
  misc_feature: MA Experiment ID: 20001248 Result: Up-regulated in Transcription
  misc_feature: MA Experiment 20001248 PARAMETER Experiment Name: At_Far-red-induction_P Parameter: Age (day) Value: 7
  misc_feature: MA Experiment 20001248 PARAMETER Experiment Name: At_Far-red-induction_P Parameter: Light Value: Far-red vs. White
  misc_feature: MA Experiment 20001248 PARAMETER Experiment Name: At_Far-red-induction_P Parameter: Organism Value: A. thaliana
  misc_feature: MA Experiment 20001248 PARAMETER Experiment Name: At_Far-red-induction_P Parameter: Plant Line Value: Columbia
  misc_feature: MA Experiment 20001248 PARAMETER Experiment Name: At_Far-red-induction_P Parameter: Timepoint (hr) Value: 4
  misc_feature: MA Experiment 20001248 PARAMETER Experiment Name: At_Far-red-induction_P Parameter: Tissue Value: Whole Plant
  misc_feature: MA Experiment ID: 20001450 Result: Up-regulated in Transcription
  misc_feature: MA Experiment 20001450 PARAMETER Experiment Name: At_Far-red-induction_P Parameter: Age (day) Value: 7
  misc_feature: MA Experiment 20001450 PARAMETER Experiment Name: At_Far-red-induction_P Parameter: Light Value: Far-red vs. White
  misc_feature: MA Experiment 20001450 PARAMETER Experiment Name: At_Far-red-induction_P Parameter: Organism Value: A. thaliana
  misc_feature: MA Experiment 20001450 PARAMETER Experiment Name: At_Far-red-induction_P Parameter: Plant Line Value: Columbia
  misc_feature: MA Experiment 20001450 PARAMETER Experiment Name: At_Far-red-induction_P Parameter: Timepoint (hr) Value: 8
  misc_feature: MA Experiment 20001450 PARAMETER Experiment Name: At_Far-red-induction_P Parameter: Tissue Value: Whole Plant
  misc_feature: MA Experiment ID: 20001451 Result: Up-regulated in Transcription
  misc_feature: MA Experiment 20001451 PARAMETER Experiment Name: At_Far-red-induction_P Parameter: Age (day) Value: 7
  misc_feature: MA Experiment 20001451 PARAMETER Experiment Name: At_Far-red-induction_P Parameter: Light Value: Far-red vs. White
  misc_feature: MA Experiment 20001451 PARAMETER Experiment Name: At_Far-red-induction_P Parameter: Organism Value: A. thaliana
  misc_feature: MA Experiment 20001451 PARAMETER Experiment Name: At_Far-red-induction_P Parameter: Plant Line Value: Columbia
  misc_feature: MA Experiment 20001451 PARAMETER Experiment Name: At_Far-red-induction_P Parameter: Timepoint (hr) Value: 24
  misc_feature: MA Experiment 20001451 PARAMETER Experiment Name: At_Far-red-induction_P Parameter: Tissue Value: Whole Plant
  misc_feature: MA Experiment ID: 20001558 Result: Down-regulated in Transcription
  misc_feature: MA Experiment 20001558 PARAMETER Experiment Name: At_Drought_Soil_Dry_P Parameter: Age (day) Value: 27
  misc_feature: MA Experiment 20001558 PARAMETER Experiment Name: At_Drought_Soil_Dry_P Parameter: Organism Value: A. thaliana
  misc_feature: MA Experiment 20001558 PARAMETER Experiment Name: At_Drought_Soil_Dry_P Parameter: Plant Line Value: WS
  misc_feature: MA Experiment 20001558 PARAMETER Experiment Name: At_Drought_Soil_Dry_P Parameter: Post Timepoint (hr) Value: 6
  misc_feature: MA Experiment 20001558 PARAMETER Experiment Name: At_Drought_Soil_Dry_P Parameter: Post-Treatment Value: Re-Water vs. No Drought
  misc_feature: MA Experiment 20001558 PARAMETER Experiment Name: At_Drought_Soil_Dry_P Parameter: Timepoint (day) Value: 13
  misc_feature: MA Experiment 20001558 PARAMETER Experiment Name: At_Drought_Soil_Dry_P Parameter: Treatment Value: Drought vs. No Drought
  misc_feature: MA Experiment ID: 20001560 Result: Down-regulated in Transcription
  misc_feature: MA Experiment 20001560 PARAMETER Experiment Name: At_Drought_Soil_Dry_P Parameter: Age (day) Value: 28
  misc_feature: MA Experiment 20001560 PARAMETER Experiment Name: At_Drought_Soil_Dry_P Parameter: Organism Value: A. thaliana
  misc_feature: MA Experiment 20001560 PARAMETER Experiment Name: At_Drought_Soil_Dry_P Parameter: Plant Line Value: WS
  misc_feature: MA Experiment 20001560 PARAMETER Experiment Name: At_Drought_Soil_Dry_P Parameter: Post Timepoint (hr) Value: None
  misc_feature: MA Experiment 20001560 PARAMETER Experiment Name: At_Drought_Soil_Dry_P Parameter: Post-Treatment Value: None
  misc_feature: MA Experiment 20001560 PARAMETER Experiment Name: At_Drought_Soil_Dry_P Parameter: Timepoint (day) Value: 14
  misc_feature: MA Experiment 20001560 PARAMETER Experiment Name: At_Drought_Soil_Dry_P Parameter: Treatment Value: Drought vs. No Drought
gaaaaaaacattatcttacaaaaatccaaatactccgacttaaccgggtcggatcctggtgagtactagtatctatctcattacaattcatatccttccttcaacattcgatcatcacgaagccaaagaacaatttctccgtcactatcataaccatggcggtgctttcatctgcagatcgagctagtaatgagaagaaggtgaagagttcatactttgatttgccacctatggaaatgtctgtagcatttcctcaagcaactccagcctctacatttccaccttgtacttcagactattatcatttcaatgatctactgactccggaagaacaagctatccggaagaaagtgagggaatgcatggagaaagaagttgctccaataatgacagagtactgggagaaagcagaatttccattccatatcactccaaagcttggggctatgggtgttgctggtggctcgatcaagggttatggatgtcctggtctctccatcaccgccaatgcaattgccacagcagaaatagctagagttgatgcaagttgttcgactttcattttggtgcattcttctttgggcatgctcactattgcactctgtggatcagaagcacagaaggagaagtatttgccttctttggctcaattgaatactgtggcttgttgggctttgacagagcccgacaatggaagcgatgcaagtggtctaggaacgactgcaacaaaggttgaaggaggttggaaaattaatggacaaaagcgttggattggaaacagcacctttgcagatctgttgatcatctttgcgaggaatacaacaactaaccaaatcaacggattcatagtcaagaaagatgcgcctggcctaaaggctactaagatcccaaataaaataggtttacgtatggttcaaaatggagatattctactacagaatgtctttgttccagatgaggatcggttacctggggtaaattcttttcaggacaccagcaaggttctggctgtctcacgtgtaatggtggcctggcaaccaatcggcatatcaatgggaatctacgatatgtgccacaggtatctgaaggagaggaaacagtttggagcaccgttggctgctttccagttaaaccaacagaagcttgtgcagatgctgggtaacgttcaagcgatgtttctaatgggttggcgtctctgcaagctgtatgagacgggtcagatgactccaggtcaagccagtttaggaaaggcatggatttcatcaaaagcgagagaaactgcttcgctaggtcgggaattacttggtgggaatggaattctagcagattttctggtagcaaaggctttctgtgaccttgaacccatttatacatacgaagggacttatgatataaacaccttagtaacagggagggaagtaacgggtattgcgagtttcaaaccggctacacgtagccgtctctaagttaaaaggttgtccattgtttgttgttgtctgttggttagtattgatattgtgatgtggggtttacatctacaaatgtgccaaataatctgacccaaaaagatttagggtccaatgggggaataatatcgttgttgcaaaacttaatccagttattgcttcttgcaatatggattcgtcttgtggcttgtactgggggaaataccatttgttaaccttttattaattcaaattgccaatgtcaataacttttggt

SEQ ID NO: 101557 - protein, 436 aa, Arabidopsis thaliana; identical to SEQ ID NO: 26763
  peptide (1)..(436): Ceres Seq. ID no. 13608173
  misc_feature (173)..(271): Pfam Name: Acyl-CoA dehydrogenase, middle domain Pfam Description: Acyl-CoA dehydrogenase, middle domain
  misc_feature (1)..(436): Homolog of NCBI NO: 15231059 NR Description: acyl-coA dehydrogenase [Arabidopsis thaliana]
  misc_feature (23)..(435): Homolog of NCBI NO: 34896018 NR Description: ESTs AU056822(S20908),C26441(C12328), correspond to a region of the predicted gene.~Similar to
  misc_feature (59)..(428): Homolog of NCBI NO: 31195739 NR Description: ENSANGP00000000259 [Anopheles gambiae]
  misc_feature (28)..(428): Homolog of NCBI NO: 29827888 NR Description: putative glutaryl-CoA dehydrogenase [Streptomyces
  misc_feature (43)..(435): Homolog of NCBI NO: 28829336 NR Description: similar to Arabidopsis thaliana (Mouse-ear
  misc_feature (46)..(428): Homolog of NCBI NO: 29827260 NR Description: putative glutaryl-CoA dehydrogenase [Streptomyces
  misc_feature (33)..(433): Homolog of NCBI NO: 25027279 NR Description: putative glutaryl-CoA dehydrogenase precursor
  misc_feature (46)..(435): Homolog of NCBI NO: 25026880 NR Description: putative acyl-CoA dehydrogenase [Corynebacterium
  misc_feature (42)..(428): Homolog of NCBI NO: 15805578 NR Description: glutaryl-CoA dehydrogenase, putative [Deinococcus
  misc_feature (47)..(433): Homolog of NCBI NO: 11498596 NR Description: glutaryl-CoA dehydrogenase (gcdH) [Archaeoglobus

SEQ ID NO: 101558 - protein, 411 aa, Arabidopsis thaliana; identical to SEQ ID NO: 26764
  peptide (1)..(411): Ceres Seq. ID no. 13608174
  misc_feature (148)..(246): Pfam Name: Acyl-CoA dehydrogenase, middle domain Pfam Description: Acyl-CoA dehydrogenase, middle domain
  misc_feature (1)..(411): Homolog of NCBI NO: 15231059 NR Description: acyl-coA dehydrogenase [Arabidopsis thaliana]
  misc_feature (1)..(410): Homolog of NCBI NO: 34896018 NR Description: ESTs AU056822(S20908),C26441(C12328), correspond to a region of the predicted gene.~Similar to
  misc_feature (34)..(403): Homolog of NCBI NO: 31195739 NR Description: ENSANGP00000000259 [Anopheles gambiae]
  misc_feature (3)..(403): Homolog of NCBI NO: 29827888 NR Description: putative glutaryl-CoA dehydrogenase [Streptomyces
  misc_feature (18)..(410): Homolog of NCBI NO: 28829336 NR Description: similar to Arabidopsis thaliana (Mouse-ear
  misc_feature (21)..(403): Homolog of NCBI NO: 29827260 NR Description: putative glutaryl-CoA dehydrogenase [Streptomyces
  misc_feature (8)..(408): Homolog of NCBI NO: 25027279 NR Description: putative glutaryl-CoA dehydrogenase precursor
  misc_feature (21)..(410): Homolog of NCBI NO: 25026880 NR Description: putative acyl-CoA dehydrogenase [Corynebacterium
  misc_feature (17)..(403): Homolog of NCBI NO: 15805578 NR Description: glutaryl-CoA dehydrogenase, putative [Deinococcus
  misc_feature (22)..(408): Homolog of NCBI NO: 11498596 NR Description: glutaryl-CoA dehydrogenase (gcdH) [Archaeoglobus

SEQ ID NO: 101559 - protein, 409 aa, Arabidopsis thaliana; identical to SEQ ID NO: 26765
  peptide (1)..(409): Ceres Seq. ID no. 13608175
  misc_feature (146)..(244): Pfam Name: Acyl-CoA dehydrogenase, middle domain Pfam Description: Acyl-CoA dehydrogenase, middle domain
  misc_feature (1)..(409): Homolog of NCBI NO: 15231059 NR Description: acyl-coA dehydrogenase [Arabidopsis thaliana]
  misc_feature (1)..(408): Homolog of NCBI NO: 34896018 NR Description: ESTs AU056822(S20908),C26441(C12328), correspond to a region of the predicted gene.~Similar to
  misc_feature (32)..(401): Homolog of NCBI NO: 31195739 NR Description: ENSANGP00000000259 [Anopheles gambiae]
  misc_feature (1)..(401): Homolog of NCBI NO: 29827888 NR Description: putative glutaryl-CoA dehydrogenase [Streptomyces
  misc_feature (16)..(408): Homolog of NCBI NO: 28829336 NR Description: similar to Arabidopsis thaliana (Mouse-ear
  misc_feature (19)..(401): Homolog of NCBI NO: 29827260 NR Description: putative glutaryl-CoA dehydrogenase [Streptomyces
  misc_feature (6)..(406): Homolog of NCBI NO: 25027279 NR Description: putative glutaryl-CoA dehydrogenase precursor
  misc_feature (19)..(408): Homolog of NCBI NO: 25026880 NR Description: putative acyl-CoA dehydrogenase [Corynebacterium
  misc_feature (15)..(401): Homolog of NCBI NO: 15805578 NR Description: glutaryl-CoA dehydrogenase, putative [Deinococcus
  misc_feature (20)..(406): Homolog of NCBI NO: 11498596 NR Description: glutaryl-CoA dehydrogenase (gcdH) [Archaeoglobus

SEQ ID NO: 101560 - DNA, 1448 bp, Arabidopsis thaliana
  misc_feature (1)..(1448): Ceres Seq. ID no. 13608180
  misc_feature: MA Experiment ID: 108464 Result: Down-regulated in Transcription
  misc_feature: MA Experiment 108464 PARAMETER Experiment Name: At_Germinating_Seeds_cDNA_P Parameter: Age (day) Value: 4 vs. 0
  misc_feature: MA Experiment 108464 PARAMETER Experiment Name: At_Germinating_Seeds_cDNA_P Parameter: Tissue Value: Germinating Seeds
  misc_feature: MA Experiment ID: 108489 Result: Down-regulated in Transcription
  misc_feature: MA Experiment ID: 108573 Result: Down-regulated in Transcription
  misc_feature: MA Experiment 108573 PARAMETER Experiment Name: At_Drought_cDNA_P Parameter: Timepoint (hr) Value: 6
  misc_feature: MA Experiment 108573 PARAMETER Experiment Name: At_Drought_cDNA_P Parameter: Tissue Value: Aerial
  misc_feature: MA Experiment 108573 PARAMETER Experiment Name: At_Drought_cDNA_P Parameter: Treatment Value: Drought vs. No Drought
  misc_feature: MA Experiment ID: 108577 Result: Down-regulated in Transcription
  misc_feature: MA Experiment 108577 PARAMETER Experiment Name: At_42deg_Heat_cDNA_P Parameter: Temperature (deg C) Value: 42 vs. 22
  misc_feature: MA Experiment 108577 PARAMETER Experiment Name: At_42deg_Heat_cDNA_P Parameter: Timepoint (hr) Value: 6
  misc_feature: MA Experiment 108577 PARAMETER Experiment Name: At_42deg_Heat_cDNA_P Parameter: Tissue Value: Aerial
  misc_feature: MA Experiment ID: 108585 Result: Down-regulated in Transcription
  misc_feature: MA Experiment 108585 PARAMETER Experiment Name: At_5mM_NaNP_cDNA_P Parameter: Timepoint (hr) Value: 6
  misc_feature: MA Experiment 108585 PARAMETER Experiment Name: At_5mM_NaNP_cDNA_P Parameter: Tissue Value: Aerial
  misc_feature: MA Experiment 108585 PARAMETER Experiment Name: At_5mM_NaNP_cDNA_P Parameter: Treatment Value: null
  misc_feature: MA Experiment ID: 108668 Result: Down-regulated in Transcription
  misc_feature: MA Experiment 108668 PARAMETER Experiment Name: At_2mM_SA_cDNA_P Parameter: Plant Line Value: WS
  misc_feature: MA Experiment 108668 PARAMETER Experiment Name: At_2mM_SA_cDNA_P Parameter: Timepoint (hr) Value: 6
  misc_feature: MA Experiment 108668 PARAMETER Experiment Name: At_2mM_SA_cDNA_P Parameter: Treatment Value: 2mM SA vs. No Treatment
  misc_feature: MA Experiment ID: 20000069 Result: Up-regulated in Transcription
  misc_feature: MA Experiment 20000069 PARAMETER Experiment Name: At_100uM_ABA_Mutants_cDNA_P Parameter: Plant Line Value: CS23
  misc_feature: MA Experiment 20000069 PARAMETER Experiment Name: At_100uM_ABA_Mutants_cDNA_P Parameter: Timepoint (hr) Value: 6
  misc_feature: MA Experiment 20000069 PARAMETER Experiment Name: At_100uM_ABA_Mutants_cDNA_P Parameter: Tissue Value: Aerial
  misc_feature: MA Experiment 20000069 PARAMETER Experiment Name: At_100uM_ABA_Mutants_cDNA_P Parameter: Treatment Value: 100uM ABA vs. No Treatment
  misc_feature: MA Experiment ID: 20000070 Result: Up-regulated in Transcription
  misc_feature: MA Experiment 20000070 PARAMETER Experiment Name: At_100uM_ABA_Mutants_cDNA_P Parameter: Plant Line Value: CS24
  misc_feature: MA Experiment 20000070 PARAMETER Experiment Name: At_100uM_ABA_Mutants_cDNA_P Parameter: Timepoint (hr) Value: 6
  misc_feature: MA Experiment 20000070 PARAMETER Experiment Name: At_100uM_ABA_Mutants_cDNA_P Parameter: Tissue Value: Aerial
  misc_feature: MA Experiment 20000070 PARAMETER Experiment Name: At_100uM_ABA_Mutants_cDNA_P Parameter: Treatment Value: 100uM ABA vs. No Treatment
  misc_feature: MA Experiment ID: 20000071 Result: Up-regulated in Transcription
  misc_feature: MA Experiment 20000071 PARAMETER Experiment Name: At_100uM_ABA_Mutants_cDNA_P Parameter: Plant Line Value: CS8104
  misc_feature: MA Experiment 20000071 PARAMETER Experiment Name: At_100uM_ABA_Mutants_cDNA_P Parameter: Timepoint (hr) Value: 6
  misc_feature: MA Experiment 20000071 PARAMETER Experiment Name: At_100uM_ABA_Mutants_cDNA_P Parameter: Tissue Value: Aerial
  misc_feature: MA Experiment 20000071 PARAMETER Experiment Name: At_100uM_ABA_Mutants_cDNA_P Parameter: Treatment Value: 100uM ABA vs. No Treatment
  misc_feature: MA Experiment ID: 20000072 Result: Up-regulated in Transcription
  misc_feature: MA Experiment 20000072 PARAMETER Experiment Name: At_100uM_ABA_Mutants_cDNA_P Parameter: Plant Line Value: CS8105
  misc_feature: MA Experiment 20000072 PARAMETER Experiment Name: At_100uM_ABA_Mutants_cDNA_P Parameter: Timepoint (hr) Value: 6
  misc_feature: MA Experiment 20000072 PARAMETER Experiment Name: At_100uM_ABA_Mutants_cDNA_P Parameter: Tissue Value: Aerial
  misc_feature: MA Experiment 20000072 PARAMETER Experiment Name: At_100uM_ABA_Mutants_cDNA_P Parameter: Treatment Value: 100uM ABA vs. No Treatment
  misc_feature: MA Experiment ID: 20000086 Result: Up-regulated in Transcription
  misc_feature: MA Experiment 20000086 PARAMETER Experiment Name: At_100uM_ABA_Mutants_cDNA_P Parameter: Plant Line Value: CS22
  misc_feature: MA Experiment 20000086 PARAMETER Experiment Name: At_100uM_ABA_Mutants_cDNA_P Parameter: Timepoint (hr) Value: 6
  misc_feature: MA Experiment 20000086 PARAMETER Experiment Name: At_100uM_ABA_Mutants_cDNA_P Parameter: Tissue Value: Aerial
  misc_feature: MA Experiment 20000086 PARAMETER Experiment Name: At_100uM_ABA_Mutants_cDNA_P Parameter: Treatment Value: 100uM ABA vs. No Treatment
  misc_feature: MA Experiment ID: 20000087 Result: Up-regulated in Transcription
  misc_feature: MA Experiment 20000087 PARAMETER Experiment Name: At_100uM_ABA_Mutants_cDNA_P Parameter: Plant Line Value: WS
  misc_feature: MA Experiment 20000087 PARAMETER Experiment Name: At_100uM_ABA_Mutants_cDNA_P Parameter: Timepoint (hr) Value: 6
  misc_feature: MA Experiment 20000087 PARAMETER Experiment Name: At_100uM_ABA_Mutants_cDNA_P Parameter: Tissue Value: Aerial
  misc_feature: MA Experiment 20000087 PARAMETER Experiment Name: At_100uM_ABA_Mutants_cDNA_P Parameter: Treatment Value: 100uM ABA vs. No Treatment
  misc_feature: MA Experiment ID: 20000088 Result: Up-regulated in Transcription
  misc_feature: MA Experiment 20000088 PARAMETER Experiment Name: At_100uM_ABA_Mutants_cDNA_P Parameter: Plant Line Value: Landsberg
  misc_feature: MA Experiment 20000088 PARAMETER Experiment Name: At_100uM_ABA_Mutants_cDNA_P Parameter: Timepoint (hr) Value: 6
  misc_feature: MA Experiment 20000088 PARAMETER Experiment Name: At_100uM_ABA_Mutants_cDNA_P Parameter: Tissue Value: Aerial
  misc_feature: MA Experiment 20000088 PARAMETER Experiment Name: At_100uM_ABA_Mutants_cDNA_P Parameter: Treatment Value: 100uM ABA vs. No Treatment
  misc_feature: MA Experiment ID: 20000089 Result: Up-regulated in Transcription
  misc_feature: MA Experiment ID: 20000090 Result: Up-regulated in Transcription
  misc_feature: MA Experiment ID: 20000111 Result: Down-regulated in Transcription
  misc_feature: MA Experiment 20000111 PARAMETER Experiment Name: At_42deg_Heat_cDNA_P Parameter: Temperature (deg C) Value: 42 vs. 22
  misc_feature: MA Experiment 20000111 PARAMETER Experiment Name: At_42deg_Heat_cDNA_P Parameter: Timepoint (hr) Value: 6
  misc_feature: MA Experiment 20000111 PARAMETER Experiment Name: At_42deg_Heat_cDNA_P Parameter: Tissue Value: Aerial
  misc_feature: MA Experiment ID: 20000113 Result: Down-regulated in Transcription
  misc_feature: MA Experiment 20000113 PARAMETER Experiment Name: At_42deg_Heat_cDNA_P Parameter: Temperature (deg C) Value: 42 vs. 22
  misc_feature: MA Experiment 20000113 PARAMETER Experiment Name: At_42deg_Heat_cDNA_P Parameter: Timepoint (hr) Value: 8
  misc_feature: MA Experiment 20000113 PARAMETER Experiment Name: At_42deg_Heat_cDNA_P Parameter: Tissue Value: Aerial
  misc_feature: MA Experiment ID: 20000117 Result: Up-regulated in Transcription
  misc_feature: MA Experiment 20000117 PARAMETER Experiment Name: At_100uM_ABA_Mutants_cDNA_P Parameter: Plant Line Value: Columbia
  misc_feature: MA Experiment 20000117 PARAMETER Experiment Name: At_100uM_ABA_Mutants_cDNA_P Parameter: Timepoint (hr) Value: 6
  misc_feature: MA Experiment 20000117 PARAMETER Experiment Name: At_100uM_ABA_Mutants_cDNA_P Parameter: Tissue Value: Aerial
  misc_feature: MA Experiment 20000117 PARAMETER Experiment Name: At_100uM_ABA_Mutants_cDNA_P Parameter: Treatment Value: 100uM ABA vs. No Treatment
  misc_feature: MA Experiment ID: 20000173 Result: Down-regulated in Transcription
  misc_feature: MA Experiment 20000173 PARAMETER Experiment Name: At_42deg_Heat_P Parameter: Age (day) Value: 14
  misc_feature: MA Experiment 20000173 PARAMETER Experiment Name: At_42deg_Heat_P Parameter: Organism Value: A. thaliana
  misc_feature: MA Experiment 20000173 PARAMETER Experiment Name: At_42deg_Heat_P Parameter: Plant Line Value: WS
  misc_feature: MA Experiment 20000173 PARAMETER Experiment Name: At_42deg_Heat_P Parameter: Temperature (deg C) Value: 42 vs. 22
  misc_feature: MA Experiment 20000173 PARAMETER Experiment Name: At_42deg_Heat_P Parameter: Timepoint (hr) Value: 6
  misc_feature: MA Experiment 20000173 PARAMETER Experiment Name: At_42deg_Heat_P Parameter: Tissue Value: Aerial
  misc_feature: MA Experiment ID: 20000179 Result: Up-regulated in Transcription
  misc_feature: MA Experiment 20000179 PARAMETER Experiment Name: At_Germinating_Seeds_P Parameter: Age (hr) Value: 6 vs. 0
  misc_feature: MA Experiment 20000179 PARAMETER Experiment Name: At_Germinating_Seeds_P Parameter: Tissue Value: Germinating Seeds
  misc_feature: MA Experiment ID: 20000182 Result: Down-regulated in Transcription
  misc_feature: MA Experiment 20000182 PARAMETER Experiment Name: At_2mM_SA_P Parameter: Age (day) Value: 14
  misc_feature: MA Experiment 20000182 PARAMETER Experiment Name: At_2mM_SA_P Parameter: Organism Value: A. thaliana
  misc_feature: MA Experiment 20000182 PARAMETER Experiment Name: At_2mM_SA_P Parameter: Plant Line Value: WS
  misc_feature: MA Experiment 20000182 PARAMETER Experiment Name: At_2mM_SA_P Parameter: Timepoint (hr) Value: 6
  misc_feature: MA Experiment 20000182 PARAMETER Experiment Name: At_2mM_SA_P Parameter: Tissue Value: Aerial
  misc_feature: MA Experiment 20000182 PARAMETER Experiment Name: At_2mM_SA_P Parameter: Treatment Value: 2mM SA vs. No Treatment
  misc_feature: MA Experiment ID: 20000184 Result: Down-regulated in Transcription
  misc_feature: MA Experiment 20000184 PARAMETER Experiment Name: At_Shoots__P Parameter: Age (day) Value: 7
  misc_feature: MA Experiment 20000184 PARAMETER Experiment Name: At_Shoots__P Parameter: Tissue Value: Shoots vs. Whole Plant
  misc_feature: MA Experiment ID: 20000185 Result: Down-regulated in Transcription
  misc_feature: MA Experiment 20000185 PARAMETER Experiment Name: At_Roots__P Parameter: Age (day) Value: 7 vs. 21
  misc_feature: MA Experiment 20000185 PARAMETER Experiment Name: At_Roots__P Parameter: Organism Value: A. thaliana
  misc_feature: MA Experiment 20000185 PARAMETER Experiment Name: At_Roots__P Parameter: Tissue Value: Roots vs. Whole Plant
  misc_feature: MA Experiment ID: 20000224 Result: Up-regulated in Transcription
  misc_feature: MA Experiment ID: 20000437 Result: Up-regulated in Transcription
  misc_feature: MA Experiment 20000437 PARAMETER Experiment Name: At_Drought_P Parameter: Age (day) Value: 8
  misc_feature: MA Experiment 20000437 PARAMETER Experiment Name: At_Drought_P Parameter: Organism Value: A. thaliana
  misc_feature: MA Experiment 20000437 PARAMETER Experiment Name: At_Drought_P Parameter: Plant Line Value: WS
  misc_feature: MA Experiment 20000437 PARAMETER Experiment Name: At_Drought_P Parameter: Timepoint (hr) Value: 24
  misc_feature: MA Experiment 20000437 PARAMETER Experiment Name: At_Drought_P Parameter: Tissue Value: Whole Plant
  misc_feature: MA Experiment 20000437 PARAMETER Experiment Name: At_Drought_P Parameter: Treatment Value: Drought vs. No Drought
  misc_feature: MA Experiment ID: 20000438 Result: Down-regulated in Transcription
  misc_feature: MA Experiment 20000438 PARAMETER Experiment Name: At_Shoots__P Parameter: Age (day) Value: 14
  misc_feature: MA Experiment 20000438 PARAMETER Experiment Name: At_Shoots__P Parameter: Tissue Value: Shoots vs. Whole Plant
  misc_feature: MA Experiment ID: 20000439 Result: Down-regulated in Transcription
  misc_feature: MA Experiment 20000439 PARAMETER Experiment Name: At_Roots__P Parameter: Age (day) Value: 14 vs. 21
  misc_feature: MA Experiment 20000439 PARAMETER Experiment Name: At_Roots__P Parameter: Organism Value: A. thaliana
  misc_feature: MA Experiment 20000439 PARAMETER Experiment Name: At_Roots__P Parameter: Tissue Value: Roots vs. Whole Plant
  misc_feature: MA Experiment ID: 20000443 Result: Down-regulated in Transcription
  misc_feature: MA Experiment 20000443 PARAMETER Experiment Name: At_1uM_BR-BRZ__P Parameter: Tissue Value: Shoot Apices
  misc_feature: MA Experiment 20000443 PARAMETER Experiment Name: At_1uM_BR-BRZ__P Parameter: Treatment Value: 1uM BRZ vs. No Treatment
  misc_feature: MA Experiment ID: 20000452 Result: Up-regulated in Transcription
  misc_feature: MA Experiment 20000452 PARAMETER Experiment Name: At_CS6879_Shoots-Roots_P Parameter: Age (day) Value: 14
  misc_feature: MA Experiment 20000452 PARAMETER Experiment Name: At_CS6879_Shoots-Roots_P Parameter: Organism Value: A. thaliana
  misc_feature: MA Experiment 20000452 PARAMETER Experiment Name: At_CS6879_Shoots-Roots_P Parameter: Plant Line Value: CS6879 vs. WS
  misc_feature: MA Experiment 20000452 PARAMETER Experiment Name: At_CS6879_Shoots-Roots_P Parameter: Tissue Value: Shoots
  misc_feature: MA Experiment ID: 20000709 Result: Down-regulated in Transcription
  misc_feature: MA Experiment 20000709 PARAMETER Experiment Name: At_15mM_NH4NO3_L-to-H_P Parameter: Age (hr) Value: 14
  misc_feature: MA Experiment 20000709 PARAMETER Experiment Name: At_15mM_NH4NO3_L-to-H_P Parameter: Organism Value: A. thaliana
  misc_feature: MA Experiment 20000709 PARAMETER Experiment Name: At_15mM_NH4NO3_L-to-H_P Parameter: Plant Line Value: WS
  misc_feature: MA Experiment 20000709 PARAMETER Experiment Name: At_15mM_NH4NO3_L-to-H_P Parameter: Timepoint (hr) Value: 4
  misc_feature: MA Experiment 20000709 PARAMETER Experiment Name: At_15mM_NH4NO3_L-to-H_P Parameter: Tissue Value: Aerial
  misc_feature: MA Experiment 20000709 PARAMETER Experiment Name: At_15mM_NH4NO3_L-to-H_P Parameter: Treatment Value: 15mM NH4NO3 vs. 30mM Mannitol
  misc_feature: MA Experiment ID: 20000794 Result: Down-regulated in Transcription
  misc_feature: MA Experiment 20000794 PARAMETER Experiment Name: At_Petals_P Parameter: Age (day) Value: 23-25 days
  misc_feature: MA Experiment 20000794 PARAMETER Experiment Name: At_Petals_P Parameter: Plant Line Value: WS
  misc_feature: MA Experiment 20000794 PARAMETER Experiment Name: At_Petals_P Parameter: Tissue Value: Petals vs. Whole plant
  misc_feature: MA Experiment ID: 20001247 Result: Down-regulated in Transcription
  misc_feature: MA Experiment 20001247 PARAMETER Experiment Name: At_Far-red-induction_P Parameter: Age (day) Value: 7
  misc_feature: MA Experiment 20001247 PARAMETER Experiment Name: At_Far-red-induction_P Parameter: Light Value: Far-red vs. White
  misc_feature: MA Experiment 20001247 PARAMETER Experiment Name: At_Far-red-induction_P Parameter: Organism Value: A. thaliana
  misc_feature: MA Experiment 20001247 PARAMETER Experiment Name: At_Far-red-induction_P Parameter: Plant Line Value: Columbia
  misc_feature: MA Experiment 20001247 PARAMETER Experiment Name: At_Far-red-induction_P Parameter: Timepoint (hr) Value: 1
  misc_feature: MA Experiment 20001247 PARAMETER Experiment Name: At_Far-red-induction_P Parameter: Tissue Value: Whole Plant
  misc_feature: MA Experiment ID: 20001451 Result: Down-regulated in Transcription
  misc_feature: MA Experiment 20001451 PARAMETER Experiment Name: At_Far-red-induction_P Parameter: Age (day) Value: 7
  misc_feature: MA Experiment 20001451 PARAMETER Experiment Name: At_Far-red-induction_P Parameter: Light Value: Far-red vs. White
  misc_feature: MA Experiment 20001451 PARAMETER Experiment Name: At_Far-red-induction_P Parameter: Organism Value: A. thaliana
  misc_feature: MA Experiment 20001451 PARAMETER Experiment Name: At_Far-red-induction_P Parameter: Plant Line Value: Columbia
  misc_feature: MA Experiment 20001451 PARAMETER Experiment Name: At_Far-red-induction_P Parameter: Timepoint (hr) Value: 24
  misc_feature: MA Experiment 20001451 PARAMETER Experiment Name: At_Far-red-induction_P Parameter: Tissue Value: Whole Plant
  misc_feature: MA Experiment ID: 20001556 Result: Up-regulated in Transcription
  misc_feature: MA Experiment 20001556 PARAMETER Experiment Name: At_Drought_Soil_Dry_P Parameter: Age (day) Value: 26
  misc_feature: MA Experiment 20001556 PARAMETER Experiment Name: At_Drought_Soil_Dry_P Parameter: Organism Value: A. thaliana
  misc_feature: MA Experiment 20001556 PARAMETER Experiment Name: At_Drought_Soil_Dry_P Parameter: Plant Line Value: WS
  misc_feature: MA Experiment 20001556 PARAMETER Experiment Name: At_Drought_Soil_Dry_P Parameter: Post Timepoint (hr) Value: None
  misc_feature: MA Experiment 20001556 PARAMETER Experiment Name: At_Drought_Soil_Dry_P Parameter: Post-Treatment Value: None
  misc_feature: MA Experiment 20001556 PARAMETER Experiment Name: At_Drought_Soil_Dry_P Parameter: Timepoint (day) Value: 12
  misc_feature: MA Experiment 20001556 PARAMETER Experiment Name: At_Drought_Soil_Dry_P Parameter: Treatment Value: Drought vs. No Drought
  misc_feature: MA Experiment ID: 20001558 Result: Down-regulated in Transcription
  misc_feature: MA Experiment 20001558 PARAMETER Experiment Name: At_Drought_Soil_Dry_P Parameter: Age (day) Value: 27
  misc_feature: MA Experiment 20001558 PARAMETER Experiment Name: At_Drought_Soil_Dry_P Parameter: Organism Value: A. thaliana
  misc_feature: MA Experiment 20001558 PARAMETER Experiment Name: At_Drought_Soil_Dry_P Parameter: Plant Line Value: WS
  misc_feature: MA Experiment 20001558 PARAMETER Experiment Name: At_Drought_Soil_Dry_P Parameter: Post Timepoint (hr) Value: 6
  misc_feature: MA Experiment 20001558 PARAMETER Experiment Name: At_Drought_Soil_Dry_P Parameter: Post-Treatment Value: Re-Water vs. No Drought
  misc_feature: MA Experiment 20001558 PARAMETER Experiment Name: At_Drought_Soil_Dry_P Parameter: Timepoint (day) Value: 13
  misc_feature: MA Experiment 20001558 PARAMETER Experiment Name: At_Drought_Soil_Dry_P Parameter: Treatment Value: Drought vs. No Drought
  misc_feature: MA Experiment ID: 20001559 Result: Up-regulated in Transcription
  misc_feature: MA Experiment 20001559 PARAMETER Experiment Name: At_Drought_Soil_Dry_P Parameter: Age (day) Value: 28
  misc_feature: MA Experiment 20001559 PARAMETER Experiment Name: At_Drought_Soil_Dry_P Parameter: Organism Value: A. thaliana
  misc_feature: MA Experiment 20001559 PARAMETER Experiment Name: At_Drought_Soil_Dry_P Parameter: Plant Line Value: WS
  misc_feature: MA Experiment 20001559 PARAMETER Experiment Name: At_Drought_Soil_Dry_P Parameter: Post Timepoint (hr) Value: 29
  misc_feature: MA Experiment 20001559 PARAMETER Experiment Name: At_Drought_Soil_Dry_P Parameter: Post-Treatment Value: Re-Water vs. No Drought
  misc_feature: MA Experiment 20001559 PARAMETER Experiment Name: At_Drought_Soil_Dry_P Parameter: Timepoint (day) Value: 14
  misc_feature: MA Experiment 20001559 PARAMETER Experiment Name: At_Drought_Soil_Dry_P Parameter: Treatment Value: Drought vs. No Drought
  misc_feature: MA Experiment ID: 20001757 Result: Down-regulated in Transcription
  misc_feature: MA Experiment 20001757 PARAMETER Experiment Name: At_50mM_NH4NO3_L-to-H_P Parameter: Timepoint (hr) Value: 6
  misc_feature: MA Experiment 20001757 PARAMETER Experiment Name: At_50mM_NH4NO3_L-to-H_P Parameter: Tissue Value: Leaf
  misc_feature: MA Experiment 20001757 PARAMETER Experiment Name: At_50mM_NH4NO3_L-to-H_P Parameter: Treatment Value: 50mM NH4NO3 vs 100mM Mannitol
  misc_feature: MA Experiment ID: 20001905 Result: Down-regulated in Transcription
  misc_feature: MA Experiment 20001905 PARAMETER Experiment Name: At_Drought_Reproduction_P Parameter: Age (day) Value: 40
  misc_feature: MA Experiment 20001905 PARAMETER Experiment Name: At_Drought_Reproduction_P Parameter: Organism Value: A. thaliana
  misc_feature: MA Experiment 20001905 PARAMETER Experiment Name: At_Drought_Reproduction_P Parameter: Plant Line Value: WS
  misc_feature: MA Experiment 20001905 PARAMETER Experiment Name: At_Drought_Reproduction_P Parameter: Timepoint (day) Value: 10
  misc_feature: MA Experiment 20001905 PARAMETER Experiment Name: At_Drought_Reproduction_P Parameter: Tissue Value: Rosettes
  misc_feature: MA Experiment 20001905 PARAMETER Experiment Name: At_Drought_Reproduction_P Parameter: Treatment Value: Drought vs. No Drought
acaaacatttttggacatgaattgaaaattattataattaccagattttttatctatcgtcgaacttgggactgagaaagtagcagcttcgtttgcttcctctgatatttttctacactctctgtctctctctaaagatgaattgtcttcagaatcttcccagatgttcagtctcacctctgctgggattcgggtgcattcaaagagatcattcttcttcttcttcttctttgaagatgctaatatcgcctccgatcaaagccaatgatccaaaatctcgacttgttttacatgcagtatcagagtcaaaatccagctcagagatgagtggtgttgcaaaggatgaagagaaatctgatgaatatagccaagacatgactcaagctatgggtgctgttctaacttacaggcacgagttaggaatgaactacaactttattcgtccagatctaattgttggatcctgcttacagacccctgaagatgttgacaagcttcgtaaaattggagttaaaaccatattttgcttgcaacaagatccagacctggaatattttggagtagacataagcagcatccaagcctatgctaagaaatatagtgatattcagcatattcgctgtgaaattagagactttgatgcatttgatttgagaatgcgtcttccagccgtggttggtactctttacaaagctgttaagcgaaatggaggagttacatatgtgcactgcactgctggaatgggaagggctcctgctgttgcgttgacatacatgttctgggtgcaaggctataagcttatggaagctcataaattacttatgagcaaaaggtcgtgctttccgaagctggatgctatcagaaatgcaacaattgatattcttacaggactcaagaggaagactgttactctgacactgaaagataaggggttctccagagtagaaatttctggccttgacattggatggggacagaggatacctctaacactggacaagggaacaggattctggatcctaaagagagaactgcctgaaggacagtttgaatataaatacatcatagatggtgaatggacacacaatgaggccgaaccgtttataggacctaacaaagacggccataccaacaattacgctaaagtagtggacgatccaacaagtgtggatggtacaactcgggagagactatcgagcgaagaccctgagctgttggaggaagaacgctcgaaactaatccagttcttggagacttgttctgaggcagaagtttgagagttgagagcatccgactagactatgtgaatgtacaacttactagtaacaataaaatgcttcatgttagtaatacatacagttacgcttatagcagcaaaagaaaaaaacatgaagttagtagtactatgttcaagtataatatatagtttaaaatctttgttttttctt

SEQ ID NO: 101561 - protein, 379 aa, Arabidopsis thaliana; identical to SEQ ID NO: 40524
  peptide (1)..(379): Ceres Seq. ID no. 13608181
  misc_feature (97)..(247): Pfam Name: Dual specificity phosphatase, catalytic domain Pfam Description: Dual specificity phosphatase, catalytic domain
  misc_feature (1)..(379): Homolog of NCBI NO: 18409505 NR Description: expressed protein [Arabidopsis thaliana] PTPKIS1 [Arabidopsis thaliana] >gi|11595504|emb|CAC18328.1|
  misc_feature (1)..(379): Homolog of NCBI NO: 21536905 NR Description: unknown [Arabidopsis thaliana]
  misc_feature (1)..(379): Homolog of NCBI NO: 16612246 NR Description: AT3g52180/F4F15_290 [Arabidopsis thaliana]
  misc_feature (1)..(265): Homolog of NCBI NO: 11288831 NR Description: hypothetical protein F4F15.290 - Arabidopsis >gi|4678947|emb|CAB41338.1| putative protein [Arabidopsis
  misc_feature (281)..(379): Homolog of NCBI NO: 11288831 NR Description: hypothetical protein F4F15.290 - Arabidopsis >gi|4678947|emb|CAB41338.1| putative protein [Arabidopsis
  misc_feature (1)..(378): Homolog of NCBI NO: 14970762 NR Description: protein tyrosine phosphatase [Lycopersicon
  misc_feature (139)..(337): Homolog of NCBI NO: 11544661 NR Description: PTPKIS1 (truncated form) [Arabidopsis thaliana]
  misc_feature (210)..(300): Homolog of NCBI NO: 34902388 NR Description: Unknown protein [Oryza sativa (japonica
  misc_feature (301)..(372): Homolog of NCBI NO: 34902388 NR Description: Unknown protein [Oryza sativa (japonica
  misc_feature (40)..(87): Homolog of NCBI NO: 34902388 NR Description: Unknown protein [Oryza sativa (japonica

SEQ ID NO: 101562 - protein, 346 aa, Arabidopsis thaliana; identical to SEQ ID NO: 40525
  peptide (1)..(346): Ceres Seq. ID no. 13608182
  misc_feature (64)..(214): Pfam Name: Dual specificity phosphatase, catalytic domain Pfam Description: Dual specificity phosphatase, catalytic domain
  misc_feature (1)..(346): Homolog of NCBI NO: 18409505 NR Description: expressed protein [Arabidopsis thaliana] PTPKIS1 [Arabidopsis thaliana] >gi|11595504|emb|CAC18328.1|
  misc_feature (1)..(346): Homolog of NCBI NO: 21536905 NR Description: unknown [Arabidopsis thaliana]
  misc_feature (1)..(346): Homolog of NCBI NO: 16612246 NR Description: AT3g52180/F4F15_290 [Arabidopsis thaliana]
  misc_feature (1)..(232): Homolog of NCBI NO: 11288831 NR Description: hypothetical protein F4F15.290 - Arabidopsis >gi|4678947|emb|CAB41338.1| putative protein [Arabidopsis
  misc_feature (248)..(346): Homolog of NCBI NO: 11288831 NR Description: hypothetical protein F4F15.290 - Arabidopsis >gi|4678947|emb|CAB41338.1| putative protein [Arabidopsis
  misc_feature (1)..(345): Homolog of NCBI NO: 14970762 NR Description: protein tyrosine phosphatase [Lycopersicon
  misc_feature (106)..(304): Homolog of NCBI NO: 11544661 NR Description: PTPKIS1 (truncated form) [Arabidopsis thaliana]
  misc_feature (177)..(267): Homolog of NCBI NO: 34902388 NR Description: Unknown protein [Oryza sativa (japonica
  misc_feature (268)..(339): Homolog of NCBI NO: 34902388 NR Description: Unknown protein [Oryza sativa (japonica
  misc_feature (7)..(54): Homolog of NCBI NO: 34902388 NR Description: Unknown protein [Oryza sativa (japonica

SEQ ID NO: 101563 - protein, 317 aa, Arabidopsis thaliana; identical to SEQ ID NO: 40526
  peptide (1)..(317): Ceres Seq. ID no. 13608183
  misc_feature (35)..(185): Pfam Name: Dual specificity phosphatase, catalytic domain Pfam Description: Dual specificity phosphatase, catalytic domain
  misc_feature (1)..(317): Homolog of NCBI NO: 18409505 NR Description: expressed protein [Arabidopsis thaliana] PTPKIS1 [Arabidopsis thaliana] >gi|11595504|emb|CAC18328.1|
  misc_feature (1)..(317): Homolog of NCBI NO: 21536905 NR Description: unknown [Arabidopsis thaliana]
  misc_feature (1)..(317): Homolog of NCBI NO: 16612246 NR Description: AT3g52180/F4F15_290 [Arabidopsis thaliana]
  misc_feature (1)..(203): Homolog of NCBI NO: 11288831 NR Description: hypothetical protein F4F15.290 - Arabidopsis >gi|4678947|emb|CAB41338.1| putative protein [Arabidopsis
  misc_feature (219)..(317): Homolog of NCBI NO: 11288831 NR Description: hypothetical protein F4F15.290 - Arabidopsis >gi|4678947|emb|CAB41338.1| putative protein [Arabidopsis
  misc_feature (1)..(316): Homolog of NCBI NO: 14970762 NR Description: protein tyrosine phosphatase [Lycopersicon
  misc_feature (77)..(275): Homolog of NCBI NO: 11544661 NR Description: PTPKIS1 (truncated form) [Arabidopsis thaliana]
  misc_feature (148)..(238): Homolog of NCBI NO: 34902388 NR Description: Unknown protein [Oryza sativa (japonica
  misc_feature (239)..(310): Homolog of NCBI NO: 34902388 NR Description: Unknown protein [Oryza sativa (japonica
  misc_feature (1)..(25): Homolog of NCBI NO: 34902388 NR Description: Unknown protein [Oryza sativa (japonica

SEQ ID NO: 101564 - DNA, 3682 bp, Arabidopsis thaliana
  misc_feature (1)..(3682): Ceres Seq. ID no. 13608184
  misc_feature: MA Experiment ID: 20000355 Result: Up-regulated in Transcription
  misc_feature: MA Experiment 20000355 PARAMETER Experiment Name: At_Siliques_Sub_P Parameter: Age (day) Value: 21
  misc_feature: MA Experiment 20000355 PARAMETER Experiment Name: At_Siliques_Sub_P Parameter: Organism Value: A. thaliana
  misc_feature: MA Experiment 20000355 PARAMETER Experiment Name: At_Siliques_Sub_P Parameter: Plant Line Value: WS
  misc_feature: MA Experiment 20000355 PARAMETER Experiment Name: At_Siliques_Sub_P Parameter: Tissue Value: Less Than 5mm Siliques vs. Whole Plant
  misc_feature: MA Experiment ID: 20000440 Result: Up-regulated in Transcription
  misc_feature: MA Experiment 20000440 PARAMETER Experiment Name: At_Closed-Flower__Sub_P Parameter: Tissue Value: Closed Flower vs. Whole Plant
attggctctctatgatttgacatttaagattattgctgcatttaattgtgctaaatcgattctgcactcatgcttcagctactgttctttgtgtccctgtaaatttaagtttttgagatctgaaactataagaaattttccgattttggttctcattagttgttagatctcttatctcactcgaagcttctttttttacgcggtttgatttattaatttcgttacttctctgtaaattctcgatctttagggttcttctcatcccctggtttaataatgggtccaatctcagttcttgttcactctaattttactttcacaatatctccaattacgcagatgctttttgacaaattttctccattaaaagtgtcttcttttttagctgtattaaatttataggtctctctatctgtactggtatagggttcatgattgagtctacaaaaacataatgaatgacctaaaagctattaactttcgtttctagatctgcttgcttctctttaatatcttcacctcattgctctaatagacattaatctccatttgaagttagtattcttttaccagttttactgatttttctttttcattcaggtaactgtgattgttgcaggatcttgtgtagaaacagatcacaagaagatgaatgataactcggtggtgcggctttgattatcttcagagattttagattctgtatccactctgttgcgatggggtcgtttgcaggcgcttgtgagattgtggaagagaaggatgatgaagtaagattgccaaaacattccgggagatatggtaaatcggttatgggatcatcaagtaaggatttggtggagcgtaagcaacgagagtatcatggttctcttgagtatgacattgatatgctttttcagtctatttctgttaaaccatctactacgaggttgatgagttcttctttccatcatcatgagacgagcgcgagtgccggtccaagcaggaccacaagcccttcgaagagaattgcgtccatgaaaaaaccagggacacctcagtctcctagatttgttggtctctctgattcagtttctttgaagcaggctcttagggatcgttgcatttctaaggcgtcggaaatggctgctcagaaacggttgtcgaaatctgctgctgcatctccgagggtctcagaagctgacaggataaagagtttgtataaccaagtttcgaatgaatctactagcagcaggtctgggcttgttcctgtggacaagggtaaaggaagtttggttgagatacctttgatgcctgtaaacgataaaccaagctcttcaaagagcgtacctcaacggtttgaagatccttctaaccccatttctgagccatctcaagctggaaccagttttggattacaaggagtggggaatcaaacgcgggagattaagctgttgcatagatccaacaaacctgggtcttgtcttagttctggcagtggagattatgagatagagttagatgaaaatgttgcgtctccttccactcatgcatttgttgaagatgatgtgatagaaatagacaaacacgttacttcactgccatctcactctagcaagaaagtcaatgcgacggagcttgacaagaatatttcctcatctgctgtagactcagagcagaaagggaagttggatgatgcacctaattcagggacagagaatggcaaaacagtacggaaggtaacaagaatgattccacgtcccaaacaaccgaaaaagaaaattttgcttaagaagaagttaaaaatcggggttgtgtcagcaacttacccaacaaaagacgatgaagaaattgttccttccttggactctagtgccaatcaacttctctgccagagatgtcactgttcgttgaagagcaccagcatcgatgacaacccaccttcatatacttctagtcataatcctaagatttgcacagatagtttgagctctgtttcaaataaagaagctcatcaaggatctgacgaaaactcctctggctcgtgtaatgtcagtcaaagctctgaagctgacattgtcataatgaaacaagatgtttcctctagcaataatagtggaatcggtgcaatggtagaaaaagaaaccgagaatccgacttccagtgagaaattcgagttctctctgagttcaaaagatagtcttggggattatagcaggagcacaagcattagtgaggagagtaatctgagccgatttagctgtgggaataagcctcacatgtcgatggatgtgagatgggaagcgattaagcatatcaaggttcaatacggctctttgggtttacgacacttcaaccttctgaagaaacttggttgtggagatataggaacagtctatctcgccgagctgattggtacaaactgtttgtttgccataaaggttatggacaacgagttcttggcgagaaggaaaaagtctccccgggcacaagcagaaagagaaatacttaaaatgttggaccatccttttcttcctacattatacgcgcaatttacttcggataatttatcttgtctagtcatggaatattgtcctggaggagatcttcatgtcctcagacagaagcagctaggccggtgtttccctgaacctgcagcaagattctatgtggccgaaattctccttgcactggagtacttacacatgcttggtatcatataccgagatctgaaaccggaaaacattcttgtccgtgaagatggacacattatgcttacggattttgacctctcactccgttgtgcagtgaacccgactcttgtcaggtcaaactctccacctggtaaagatcccgcaaggatttcaggtccatacaacacatccaactgcatacaaccattctgtatcaccgaaccatcttgccaggtttcgtgtttcagccctaggctctcctcaaaccaacaacaaggtagaaaaccaaaaaggggtgatcatctttcgaaaacccaacaacacttgagtagatcattgcctcagctcgtggctgaaccaaccgaagcaagatccaattcctttgtgggaacacacgagtacctagccccagagatcatcaaaggagaaggacatggcgctgcagttgactggtggactttcggggttctcctttacgagcttttatacgggaaaacaccattcaaaggttacaacaacgacgagactttggccaatgttgtgttacagaacctcaagtttcctgatagcccgcttgtaagcttccaggcaaaagacttgatcaggggacttcttgttaaggaaccagagaacaggctcgggtcagagaaaggttctgtagagatcaaaagacatcctttttttgaaggattgaattgggctctgatccggtgtgcaatcccgcctgagctaccggatttctatgagtatggtggtggaccagaggcagcggcggattcgcctggaggcagtaataataggtatcttgaatgtaaagccataggcgatcatcttgagttcgagttgttttaagcaagacatagatattctctggtataagcattcagagtaatcgttgttgtaagttattatatctaagttaaatctaaatgtcttatatgtaaatttagcgttctctgagacataatctgatatagtattctcaaaaaaggtaaatctcagagagatct

SEQ ID NO: 101565 - protein, 934 aa, Arabidopsis thaliana; identical to SEQ ID NO: 44315
  peptide (1)..(934): Ceres Seq. ID no. 13608185
  misc_feature (538)..(879): Pfam Name: Protein kinase domain Pfam Description: Protein kinase domain
  misc_feature (81)..(934): Homolog of NCBI NO: 15227639 NR Description: protein kinase, putative [Arabidopsis thaliana]
  misc_feature (359)..(934): Homolog of NCBI NO: 15242814 NR Description: protein kinase family [Arabidopsis thaliana]
  misc_feature (1)..(188): Homolog of NCBI NO: 15242814 NR Description: protein kinase family [Arabidopsis thaliana]
  misc_feature (400)..(934): Homolog of NCBI NO: 15238798 NR Description: protein kinase, putative [Arabidopsis thaliana]
  misc_feature (400)..(934): Homolog of NCBI NO: 17064850 NR Description: protein kinase 5 [Arabidopsis thaliana]
  misc_feature (430)..(934): Homolog of NCBI NO: 15236802 NR Description: protein kinase, putative [Arabidopsis thaliana]
  misc_feature (357)..(934): Homolog of NCBI NO: 7446383 NR Description: probable protein kinase PK1 - potato
  misc_feature (511)..(934): Homolog of NCBI NO: 320622 NR Description: probable protein kinase - maize (fragment)
  misc_feature (437)..(921): Homolog of NCBI NO: 15241076 NR Description: protein kinase, putative [Arabidopsis thaliana]
  misc_feature (492)..(896): Homolog of NCBI NO: 1346057 NR Description: Protein kinase G11A >gi|100705|pir||B30311

SEQ ID NO: 101566 - protein, 903 aa, Arabidopsis thaliana; identical to SEQ ID NO: 44316
  peptide (1)..(903): Ceres Seq. ID no. 13608186
  misc_feature (507)..(848): Pfam Name: Protein kinase domain Pfam Description: Protein kinase domain
  misc_feature (50)..(903): Homolog of NCBI NO: 15227639 NR Description: protein kinase, putative [Arabidopsis thaliana]
  misc_feature (328)..(903): Homolog of NCBI NO: 15242814 NR Description: protein kinase family [Arabidopsis thaliana]
  misc_feature (1)..(157): Homolog of NCBI NO: 15242814 NR Description: protein kinase family [Arabidopsis thaliana]
  misc_feature (369)..(903): Homolog of NCBI NO: 15238798 NR Description: protein kinase, putative [Arabidopsis thaliana]
  misc_feature (369)..(903): Homolog of NCBI NO: 17064850 NR Description: protein kinase 5 [Arabidopsis thaliana]
  misc_feature (399)..(903): Homolog of NCBI NO: 15236802 NR Description: protein kinase, putative [Arabidopsis thaliana]
  misc_feature (326)..(903): Homolog of NCBI NO: 7446383 NR Description: probable protein kinase PK1 - potato
  misc_feature (480)..(903): Homolog of NCBI NO: 320622 NR Description: probable protein kinase - maize (fragment)
  misc_feature (406)..(890): Homolog of NCBI NO: 15241076 NR Description: protein kinase, putative [Arabidopsis thaliana]
  misc_feature (461)..(865): Homolog of NCBI NO: 1346057 NR Description: Protein kinase G11A >gi|100705|pir||B30311

SEQ ID NO: 101567 - protein, 878 aa, Arabidopsis thaliana; identical to SEQ ID NO: 44317
  peptide (1)..(878): Ceres Seq. ID no. 13608187
  misc_feature (482)..(823): Pfam Name: Protein kinase domain Pfam Description: Protein kinase domain
  misc_feature (25)..(878): Homolog of NCBI NO: 15227639 NR Description: protein kinase, putative [Arabidopsis thaliana]
  misc_feature (303)..(878): Homolog of NCBI NO: 15242814 NR Description: protein kinase family [Arabidopsis thaliana]
  misc_feature (1)..(132): Homolog of NCBI NO: 15242814 NR Description: protein kinase family [Arabidopsis thaliana]
  misc_feature (344)..(878): Homolog of NCBI NO: 15238798 NR Description: protein kinase, putative [Arabidopsis thaliana]
  misc_feature (344)..(878): Homolog of NCBI NO: 17064850 NR Description: protein kinase 5 [Arabidopsis thaliana]
  misc_feature (374)..(878): Homolog of NCBI NO: 15236802 NR Description: protein kinase, putative [Arabidopsis thaliana]
  misc_feature (301)..(878): Homolog of NCBI NO: 7446383 NR Description: probable protein kinase PK1 - potato
  misc_feature (455)..(878): Homolog of NCBI NO: 320622 NR Description: probable protein kinase - maize (fragment)
  misc_feature (381)..(865): Homolog of NCBI NO: 15241076 NR Description: protein kinase, putative [Arabidopsis thaliana]
  misc_feature (436)..(840): Homolog of NCBI NO: 1346057 NR Description: Protein kinase G11A >gi|100705|pir||B30311

SEQ ID NO: 101568 - DNA, 1883 bp, Arabidopsis thaliana
  misc_feature (1)..(1883): Ceres Seq. ID no. 13608188
  misc_feature: MA Experiment ID: 108433 Result: Down-regulated in Transcription
  misc_feature: MA Experiment 108433 PARAMETER Experiment Name: At_rhl_Mutant2_cDNA_P Parameter: Age (day) Value: 7
  misc_feature: MA Experiment 108433 PARAMETER Experiment Name: At_rhl_Mutant2_cDNA_P Parameter: Organism Value: A. thaliana
  misc_feature: MA Experiment 108433 PARAMETER Experiment Name: At_rhl_Mutant2_cDNA_P Parameter: Plant Line Value: rhl Mutant vs. wt landsburg
  misc_feature: MA Experiment 108433 PARAMETER Experiment Name: At_rhl_Mutant2_cDNA_P Parameter: Tissue Value: Roots
  misc_feature: MA Experiment ID: 108461 Result: Up-regulated in Transcription
  misc_feature: MA Experiment 108461 PARAMETER Experiment Name: At_Germinating_Seeds_cDNA_P Parameter: Age (day) Value: 1 vs. 0
  misc_feature: MA Experiment 108461 PARAMETER Experiment Name: At_Germinating_Seeds_cDNA_P Parameter: Tissue Value: Germinating Seeds
  misc_feature: MA Experiment ID: 108462 Result: Up-regulated in Transcription
  misc_feature: MA Experiment 108462 PARAMETER Experiment Name: At_Germinating_Seeds_cDNA_P Parameter: Age (day) Value: 2 vs. 0
  misc_feature: MA Experiment 108462 PARAMETER Experiment Name: At_Germinating_Seeds_cDNA_P Parameter: Tissue Value: Germinating Seeds
  misc_feature: MA Experiment ID: 108463 Result: Up-regulated in Transcription
  misc_feature: MA Experiment 108463 PARAMETER Experiment Name: At_Germinating_Seeds_cDNA_P Parameter: Age (day) Value: 3 vs. 0
  misc_feature: MA Experiment 108463 PARAMETER Experiment Name: At_Germinating_Seeds_cDNA_P Parameter: Tissue Value: Germinating Seeds
  misc_feature: MA Experiment ID: 108464 Result: Up-regulated in Transcription
  misc_feature: MA Experiment 108464 PARAMETER Experiment Name: At_Germinating_Seeds_cDNA_P Parameter: Age (day) Value: 4 vs. 0
  misc_feature: MA Experiment 108464 PARAMETER Experiment Name: At_Germinating_Seeds_cDNA_P Parameter: Tissue Value: Germinating Seeds
  misc_feature: MA Experiment ID: 108577 Result: Down-regulated in Transcription
  misc_feature: MA Experiment 108577 PARAMETER Experiment Name: At_42deg_Heat_cDNA_P Parameter: Temperature (deg C) Value: 42 vs. 22
  misc_feature: MA Experiment 108577 PARAMETER Experiment Name: At_42deg_Heat_cDNA_P Parameter: Timepoint (hr) Value: 6
  misc_feature: MA Experiment 108577 PARAMETER Experiment Name: At_42deg_Heat_cDNA_P Parameter: Tissue Value: Aerial
  misc_feature: MA Experiment ID: 108585 Result: Up-regulated in Transcription
  misc_feature: MA Experiment 108585 PARAMETER Experiment Name: At_5mM_NaNP_cDNA_P Parameter: Timepoint (hr) Value: 6
  misc_feature: MA Experiment 108585 PARAMETER Experiment Name: At_5mM_NaNP_cDNA_P Parameter: Tissue Value: Aerial
  misc_feature: MA Experiment 108585 PARAMETER Experiment Name: At_5mM_NaNP_cDNA_P Parameter: Treatment Value: null
  misc_feature: MA Experiment ID: 108595 Result: Down-regulated in Transcription
  misc_feature: MA Experiment 108595 PARAMETER Experiment Name: At_Ler-pi_Ovule_cDNA_P Parameter: Plant Line Value: null
  misc_feature: MA Experiment ID: 108668 Result: Down-regulated in Transcription
  misc_feature: MA Experiment 108668 PARAMETER Experiment Name: At_2mM_SA_cDNA_P Parameter: Plant Line Value: WS
  misc_feature: MA Experiment 108668 PARAMETER Experiment Name: At_2mM_SA_cDNA_P Parameter: Timepoint (hr) Value: 6
  misc_feature: MA Experiment 108668 PARAMETER Experiment Name: At_2mM_SA_cDNA_P Parameter: Treatment Value: 2mM SA vs. No Treatment
  misc_feature: MA Experiment ID: 20000180 Result: Up-regulated in Transcription
  misc_feature: MA Experiment 20000180 PARAMETER Experiment Name: At_Germinating_Seeds_P Parameter: Age (hr) Value: 24 vs. 0
  misc_feature: MA Experiment 20000180 PARAMETER Experiment Name: At_Germinating_Seeds_P Parameter: Tissue Value: Germinating Seeds
  misc_feature: MA Experiment ID: 20000224 Result: Down-regulated in Transcription
  misc_feature: MA Experiment ID: 20000451 Result: Up-regulated in Transcription
  misc_feature: MA Experiment 20000451 PARAMETER Experiment Name: At_CS6879_Shoots-Roots_P Parameter: Age (day) Value: 14
  misc_feature: MA Experiment 20000451 PARAMETER Experiment Name: At_CS6879_Shoots-Roots_P Parameter: Organism Value: A. thaliana
  misc_feature: MA Experiment 20000451 PARAMETER Experiment Name: At_CS6879_Shoots-Roots_P Parameter: Plant Line Value: CS6879 vs. WS
  misc_feature: MA Experiment 20000451 PARAMETER Experiment Name: At_CS6879_Shoots-Roots_P Parameter: Tissue Value: Roots
  misc_feature: MA Experiment ID: 20000573 Result: Down-regulated in Transcription
  misc_feature: MA Experiment 20000573 PARAMETER Experiment Name: At_100uM_ABA_Mutants__P Parameter: Organism Value: A. thaliana
  misc_feature: MA Experiment 20000573 PARAMETER Experiment Name: At_100uM_ABA_Mutants__P Parameter: Plant Line Value: CS22 vs. Ler wt
  misc_feature: MA Experiment 20000573 PARAMETER Experiment Name: At_100uM_ABA_Mutants__P Parameter: Timepoint (hr) Value: N/A
  misc_feature: MA Experiment 20000573 PARAMETER Experiment Name: At_100uM_ABA_Mutants__P Parameter: Tissue Value: Whole Plant
  misc_feature: MA Experiment 20000573 PARAMETER Experiment Name: At_100uM_ABA_Mutants__P Parameter: Treatment Value: None
  misc_feature: MA Experiment ID: 20000574 Result: Down-regulated in Transcription
  misc_feature: MA Experiment 20000574 PARAMETER Experiment Name: At_100uM_ABA_Mutants__P Parameter: Organism Value: A. thaliana
  misc_feature: MA Experiment 20000574 PARAMETER Experiment Name: At_100uM_ABA_Mutants__P Parameter: Plant Line Value: CS23 vs. Ler wt
  misc_feature: MA Experiment 20000574 PARAMETER Experiment Name: At_100uM_ABA_Mutants__P Parameter: Timepoint (hr) Value: N/A
  misc_feature: MA Experiment 20000574 PARAMETER Experiment Name: At_100uM_ABA_Mutants__P Parameter: Tissue Value: Whole Plant
  misc_feature: MA Experiment 20000574 PARAMETER Experiment Name: At_100uM_ABA_Mutants__P Parameter: Treatment Value: None
  misc_feature: MA Experiment ID: 20000794 Result: Down-regulated in Transcription
  misc_feature: MA Experiment 20000794 PARAMETER Experiment Name: At_Petals_P Parameter: Age (day) Value: 23-25 days
  misc_feature: MA Experiment 20000794 PARAMETER Experiment Name: At_Petals_P Parameter: Plant Line Value: WS
  misc_feature: MA Experiment 20000794 PARAMETER Experiment Name: At_Petals_P Parameter: Tissue Value: Petals vs. Whole plant
  misc_feature: MA Experiment ID: 20001451 Result: Down-regulated in Transcription
  misc_feature: MA Experiment 20001451 PARAMETER Experiment Name: At_Far-red-induction_P Parameter: Age (day) Value: 7
  misc_feature: MA Experiment 20001451 PARAMETER Experiment Name: At_Far-red-induction_P Parameter: Light Value: Far-red vs. White
  misc_feature: MA Experiment 20001451 PARAMETER Experiment Name: At_Far-red-induction_P Parameter: Organism Value: A. thaliana
  misc_feature: MA Experiment 20001451 PARAMETER Experiment Name: At_Far-red-induction_P Parameter: Plant Line Value: Columbia
  misc_feature: MA Experiment 20001451 PARAMETER Experiment Name: At_Far-red-induction_P Parameter: Timepoint (hr) Value: 24
  misc_feature: MA Experiment 20001451 PARAMETER Experiment Name: At_Far-red-induction_P Parameter: Tissue Value: Whole Plant
  misc_feature: MA Experiment ID: 20001906 Result: Down-regulated in Transcription
  misc_feature: MA Experiment 20001906 PARAMETER Experiment Name: At_Drought_Reproduction_P Parameter: Age (day) Value: 35
  misc_feature: MA Experiment 20001906 PARAMETER Experiment Name: At_Drought_Reproduction_P Parameter: Organism Value: A. thaliana
  misc_feature: MA Experiment 20001906 PARAMETER Experiment Name: At_Drought_Reproduction_P Parameter: Plant Line Value: WS
  misc_feature: MA Experiment 20001906 PARAMETER Experiment Name: At_Drought_Reproduction_P Parameter: Timepoint (day) Value: 5
  misc_feature: MA Experiment 20001906 PARAMETER Experiment Name: At_Drought_Reproduction_P Parameter: Tissue Value: Siliques
  misc_feature: MA Experiment 20001906 PARAMETER Experiment Name: At_Drought_Reproduction_P Parameter: Treatment Value: Drought vs. No Drought
gaattttcccttgtttctgaaatggaagacacaacatttaccaaagtgttcgttggaggattagcttgggaaacacacaaagtctctctcaggaattactttgaacagtttggtgacattgttgaagctgtcgttatcactgataaatctagtggtagatctaaaggctatggctttgttactttttgtgatccggaagcagctcagaaagcttgtgtagatccagctcctgttattgatggaagaagagctaattgtaatcttgctgcttttggtgttcagagatccaaaccttcttctcctattcatggacatgtaggaggaagaggcatgaaggtgactagccctttcaagacacactttgggaccgcggctactgctattccttccccacttccattctcccactacacacttccttacactaatccttttgggttctcttcatactcaatggattacaattaccccacgcagagctattacaatgtttatggaggggcaactgctcagcatccaatgtatggaagcggaccaatgactggtgtagcagcagcaccagcagcagggttctacccatatctccagtttgctgaaggaaatggacctgtcactggttatgctcccctccactaccccaaccacatgtttcactattctgctcccgggggaaactacccgcatcacaatggttcaccagtgtctcttgcaccttcaccagtcataccatcagtttgctttgcagttccacaggcttgaccatgaaggctcgtggttcatagttccatgatgctatgtaggggaccaattcatttaaatccttaaggcaaagctttgtttactactttcatccacatgcctctgaagtttcacaagacctgtggcctaaccatggttgcccttttccctttatgcttctaacccattagacaaagaagcccataatttggagtttgggcgtctttgcaagttctagttaagtctcacataggggtttaactaggaccatcttcatacacattactcatcttttcattttattcattgcattacctgctttctgaacgaaggtttcgttcaagatagcttgttcgagctgtagaagtaaacagttaccgtcttttgcacagtgcctcgcaaaggcaagcaattttgtagaaaaacttaaaaacttaggattggctgatcaacaagaaaggaaataaggatttcccgggaaaggcacaagaagtgaattgccaccacctggaagtgttgaagtagtgtgtgcaaaggtgtgcacactacttcacgctatatccattttaatgtgcagtcttaggattattagatctaggaccatgttgttacacattgtcttgtagtagaacgctagaacataaacttcctttgaggataaaggaattgctaacacatgtatattctcggtggctaagctttggagttatagccacacttgagctaacttagattaagatcatttttaagattcaaaatttagattgctcatcatatcttgaaccaaccccactaatggattgtggggttcttgcatttgcatgtatttttgcctcttgggagatattttggttccctttaggttcttctcataacaatcaaccaaaccagttgaccaaccatggttaggaatttcaggtgagaggtattcatcacctctttatctctcttttgtacttctttcctctatttcttcaagactaaaaactctctttttatgtaatttgttgttatatcttgtaagctgtgtgtttctgattctatgtaagaaaactaaaagctttcagtttccatcctcggtggttggaaaatgaaactgtgattgcaatattttactttgatctgatatataatcctcttgtatg

SEQ ID NO: 101569 - protein, 252 aa, Arabidopsis thaliana
  peptide (1)..(252): Ceres Seq. ID no. 13608189
  misc_feature (16)..(71): Pfam Name: RNA recognition motif. (a.k.a. RRM, RBD, or RNP domain) Pfam Description: RNA recognition motif. (a.k.a. RRM, RBD, or RNP
  misc_feature (8)..(252): Homolog of NCBI NO: 14532532 NR Description: At1g33470/F10C21_14 [Arabidopsis thaliana]
  misc_feature (111)..(252): Homolog of NCBI NO: 30692876 NR Description: RRM-containing protein -related [Arabidopsis
  misc_feature (3)..(240): Homolog of NCBI NO: 34907334 NR Description: P0698A10.29 [Oryza sativa (japonica
  misc_feature (10)..(233): Homolog of NCBI NO: 18395177 NR Description: RNA recognition motif (RRM)-containing protein thaliana] >gi|13605871|gb|AAK32921.1|AF367334_1 [Arabidopsis thaliana] >gi|16323282|gb|AAL15396.1|
  misc_feature (10)..(221): Homolog of NCBI NO: 34905758 NR Description: similar to RNA-binding protein [Oryza sativa
  misc_feature (8)..(104): Homolog of NCBI NO: 15217552 NR Description: RNA recognition motif (RRM)-containing protein
  misc_feature (10)..(193): Homolog of NCBI NO: 25518372 NR Description: hypothetical protein F19G10.13 - Arabidopsis
  misc_feature (4)..(244): Homolog of NCBI NO: 15010636 NR Description: At1g20880/F9H16_14 [Arabidopsis thaliana]
  misc_feature (4)..(244): Homolog of NCBI NO: 18394923 NR Description: RNA recognition motif (RRM)-containing protein
  misc_feature (4)..(244): Homolog of NCBI NO: 23505939 NR Description: At1g20880/F9H16_14 [Arabidopsis thaliana]
EFSLVSEMEDTTFTKVFVGGLAWETHKVSLRNYFEQFGDIVEAVVITDKSSGRSKGYGFVTFCDPEAAQKACVDPAPVIDGRRANCNLAAFGVQRSKPSSPIHGHVGGRGMKVTSPFKTHFGTAATAIPSPLPFSHYTLPYTNPFGFSSYSMDYNYPTQSYYNVYGGATAQHPMYGSGPMTGVAAAPAAGFYPYLQFAEGNGPVTGYAPLHYPNHMFHYSAPGGNYPHHNGSPVSLAPSPVIPSVCFAVPQA

SEQ ID NO: 101570 - protein, 245 aa, Arabidopsis thaliana; identical to SEQ ID NO: 39186
  peptide (1)..(245): Ceres Seq. ID no. 13608190
  misc_feature (9)..(64): Pfam Name: RNA recognition motif. (a.k.a. RRM, RBD, or RNP domain) Pfam Description: RNA recognition motif. (a.k.a. RRM, RBD, or RNP
  misc_feature (1)..(245): Homolog of NCBI NO: 14532532 NR Description: At1g33470/F10C21_14 [Arabidopsis thaliana]
  misc_feature (104)..(245): Homolog of NCBI NO: 30692876 NR Description: RRM-containing protein -related [Arabidopsis
  misc_feature (1)..(233): Homolog of NCBI NO: 34907334 NR Description: P0698A10.29 [Oryza sativa (japonica
  misc_feature (3)..(226): Homolog of NCBI NO: 18395177 NR Description: RNA recognition motif (RRM)-containing protein thaliana] >gi|13605871|gb|AAK32921.1|AF367334_1 [Arabidopsis thaliana] >gi|16323282|gb|AAL15396.1|
  misc_feature (3)..(214): Homolog of NCBI NO: 34905758 NR Description: similar to RNA-binding protein [Oryza sativa
  misc_feature (1)..(97): Homolog of NCBI NO: 15217552 NR Description: RNA recognition motif (RRM)-containing protein
  misc_feature (3)..(186): Homolog of NCBI NO: 25518372 NR Description: hypothetical protein F19G10.13 - Arabidopsis
  misc_feature (1)..(237): Homolog of NCBI NO: 15010636 NR Description: At1g20880/F9H16_14 [Arabidopsis thaliana]
  misc_feature (1)..(237): Homolog of NCBI NO: 18394923 NR Description: RNA recognition motif (RRM)-containing protein
  misc_feature (1)..(237): Homolog of NCBI NO: 23505939 NR Description: At1g20880/F9H16_14 [Arabidopsis thaliana]

SEQ ID NO: 101571 - protein, 142 aa, Arabidopsis thaliana; identical to SEQ ID NO: 39187
  peptide (1)..(142): Ceres Seq. ID no. 13608191
  misc_feature (1)..(142): Homolog of NCBI NO: 14532532 NR Description: At1g33470/F10C21_14 [Arabidopsis thaliana]
  misc_feature (1)..(142): Homolog of NCBI NO: 30692876 NR Description: RRM-containing protein -related [Arabidopsis
  misc_feature (1)..(130): Homolog of NCBI NO: 34907334 NR Description: P0698A10.29 [Oryza sativa (japonica
  misc_feature (1)..(123): Homolog of NCBI NO: 18395177 NR Description: RNA recognition motif (RRM)-containing protein thaliana] >gi|13605871|gb|AAK32921.1|AF367334_1 [Arabidopsis thaliana] >gi|16323282|gb|AAL15396.1|
  misc_feature (1)..(111): Homolog of NCBI NO: 34905758 NR Description: similar to RNA-binding protein [Oryza sativa
  misc_feature (1)..(83): Homolog of NCBI NO: 25518372 NR Description: hypothetical protein F19G10.13 - Arabidopsis
  misc_feature (1)..(134): Homolog of NCBI NO: 15010636 NR Description: At1g20880/F9H16_14 [Arabidopsis thaliana]
  misc_feature (1)..(134): Homolog of NCBI NO: 18394923 NR Description: RNA recognition motif (RRM)-containing protein
  misc_feature (1)..(134): Homolog of NCBI NO: 23505939 NR Description: At1g20880/F9H16_14 [Arabidopsis thaliana]
  misc_feature (1)..(142): Homolog of NCBI NO: 22330665 NR Description: RNA recognition motif (RRM)-containing protein

SEQ ID NO: 101572 - DNA, 2530 bp, Arabidopsis thaliana
  misc_feature (1)..(2530): Ceres Seq. ID no. 13608200
  misc_feature: MA Experiment ID: 108434 Result: Down-regulated in Transcription
  misc_feature: MA Experiment 108434 PARAMETER Experiment Name: At_Root_Tips_cDNA_P Parameter: Tissue Value: Root Tips
  misc_feature: MA Experiment ID: 108461 Result: Up-regulated in Transcription
  misc_feature: MA Experiment 108461 PARAMETER Experiment Name: At_Germinating_Seeds_cDNA_P Parameter: Age (day) Value: 1 vs. 0
  misc_feature: MA Experiment 108461 PARAMETER Experiment Name: At_Germinating_Seeds_cDNA_P Parameter: Tissue Value: Germinating Seeds
  misc_feature: MA Experiment ID: 108462 Result: Up-regulated in Transcription
  misc_feature: MA Experiment 108462 PARAMETER Experiment Name: At_Germinating_Seeds_cDNA_P Parameter: Age (day) Value: 2 vs. 0
  misc_feature: MA Experiment 108462 PARAMETER Experiment Name: At_Germinating_Seeds_cDNA_P Parameter: Tissue Value: Germinating Seeds
  misc_feature: MA Experiment ID: 108463 Result: Up-regulated in Transcription
  misc_feature: MA Experiment 108463 PARAMETER Experiment Name: At_Germinating_Seeds_cDNA_P Parameter: Age (day) Value: 3 vs. 0
  misc_feature: MA Experiment 108463 PARAMETER Experiment Name: At_Germinating_Seeds_cDNA_P Parameter: Tissue Value: Germinating Seeds
  misc_feature: MA Experiment ID: 108464 Result: Up-regulated in Transcription
  misc_feature: MA Experiment 108464 PARAMETER Experiment Name: At_Germinating_Seeds_cDNA_P Parameter: Age (day) Value: 4 vs. 0
  misc_feature: MA Experiment 108464 PARAMETER Experiment Name: At_Germinating_Seeds_cDNA_P Parameter: Tissue Value: Germinating Seeds
  misc_feature: MA Experiment ID: 108469 Result: Up-regulated in Transcription
  misc_feature: MA Experiment ID: 108573 Result: Up-regulated in Transcription
  misc_feature: MA Experiment 108573 PARAMETER Experiment Name: At_Drought_cDNA_P Parameter: Timepoint (hr) Value: 6
  misc_feature: MA Experiment 108573 PARAMETER Experiment Name: At_Drought_cDNA_P Parameter: Tissue Value: Aerial
  misc_feature: MA Experiment 108573 PARAMETER Experiment Name: At_Drought_cDNA_P Parameter: Treatment Value: Drought vs. No Drought
  misc_feature: MA Experiment ID: 108668 Result: Up-regulated in Transcription
  misc_feature: MA Experiment 108668 PARAMETER Experiment Name: At_2mM_SA_cDNA_P Parameter: Plant Line Value: WS
  misc_feature: MA Experiment 108668 PARAMETER Experiment Name: At_2mM_SA_cDNA_P Parameter: Timepoint (hr) Value: 6
  misc_feature: MA Experiment 108668 PARAMETER Experiment Name: At_2mM_SA_cDNA_P Parameter: Treatment Value: 2mM SA vs. No Treatment
  misc_feature: MA Experiment ID: 20000179 Result: Up-regulated in Transcription
  misc_feature: MA Experiment 20000179 PARAMETER Experiment Name: At_Germinating_Seeds_P Parameter: Age (hr) Value: 6 vs. 0
  misc_feature: MA Experiment 20000179 PARAMETER Experiment Name: At_Germinating_Seeds_P Parameter: Tissue Value: Germinating Seeds
  misc_feature: MA Experiment ID: 20000180 Result: Up-regulated in Transcription
  misc_feature: MA Experiment 20000180 PARAMETER Experiment Name: At_Germinating_Seeds_P Parameter: Age (hr) Value: 24 vs. 0
  misc_feature: MA Experiment 20000180 PARAMETER Experiment Name: At_Germinating_Seeds_P Parameter: Tissue Value: Germinating Seeds
  misc_feature: MA Experiment ID: 20000182 Result: Up-regulated in Transcription
  misc_feature: MA Experiment 20000182 PARAMETER Experiment Name: At_2mM_SA_P Parameter: Age (day) Value: 14
  misc_feature: MA Experiment 20000182 PARAMETER Experiment Name: At_2mM_SA_P Parameter: Organism Value: A. thaliana
  misc_feature: MA Experiment 20000182 PARAMETER Experiment Name: At_2mM_SA_P Parameter: Plant Line Value: WS
  misc_feature: MA Experiment 20000182 PARAMETER Experiment Name: At_2mM_SA_P Parameter: Timepoint (hr) Value: 6
  misc_feature: MA Experiment 20000182 PARAMETER Experiment Name: At_2mM_SA_P Parameter: Tissue Value: Aerial
  misc_feature: MA Experiment 20000182 PARAMETER Experiment Name: At_2mM_SA_P Parameter: Treatment Value: 2mM SA vs. No Treatment
  misc_feature: MA Experiment ID: 20000184 Result: Down-regulated in Transcription
  misc_feature: MA Experiment 20000184 PARAMETER Experiment Name: At_Shoots__P Parameter: Age (day) Value: 7
  misc_feature: MA Experiment 20000184 PARAMETER Experiment Name: At_Shoots__P Parameter: Tissue Value: Shoots vs. Whole Plant
  misc_feature: MA Experiment ID: 20000265 Result: Down-regulated in Transcription
  misc_feature: MA Experiment 20000265 PARAMETER Experiment Name: At_Open_Flower_P Parameter: Age (day) Value: 21
  misc_feature: MA Experiment 20000265 PARAMETER Experiment Name: At_Open_Flower_P Parameter: Plant Line Value: WS
  misc_feature: MA Experiment 20000265 PARAMETER Experiment Name: At_Open_Flower_P Parameter: Tissue Value: Closed Flower vs. Whole Plant
  misc_feature: MA Experiment ID: 20000438 Result: Down-regulated in Transcription
  misc_feature: MA Experiment 20000438 PARAMETER Experiment Name: At_Shoots__P Parameter: Age (day) Value: 14
  misc_feature: MA Experiment 20000438 PARAMETER Experiment Name: At_Shoots__P Parameter: Tissue Value: Shoots vs. Whole Plant
  misc_feature: MA Experiment ID: 20001451 Result: Down-regulated in Transcription
  misc_feature: MA Experiment 20001451 PARAMETER Experiment Name: At_Far-red-induction_P Parameter: Age (day) Value: 7
  misc_feature: MA Experiment 20001451 PARAMETER Experiment Name: At_Far-red-induction_P Parameter: Light Value: Far-red vs. White
  misc_feature: MA Experiment 20001451 PARAMETER Experiment Name: At_Far-red-induction_P Parameter: Organism Value: A. thaliana
  misc_feature: MA Experiment 20001451 PARAMETER Experiment Name: At_Far-red-induction_P Parameter: Plant Line Value: Columbia
  misc_feature: MA Experiment 20001451 PARAMETER Experiment Name: At_Far-red-induction_P Parameter: Timepoint (hr) Value: 24
  misc_feature: MA Experiment 20001451 PARAMETER Experiment Name: At_Far-red-induction_P Parameter: Tissue Value: Whole Plant
  misc_feature: MA Experiment ID: 20001757 Result: Down-regulated in Transcription
  misc_feature: MA Experiment 20001757 PARAMETER Experiment Name: At_50mM_NH4NO3_L-to-H_P Parameter: Timepoint (hr) Value: 6
  misc_feature: MA Experiment 20001757 PARAMETER Experiment Name: At_50mM_NH4NO3_L-to-H_P Parameter: Tissue Value: Leaf
  misc_feature: MA Experiment 20001757 PARAMETER Experiment Name: At_50mM_NH4NO3_L-to-H_P Parameter: Treatment Value: 50mM NH4NO3 vs 100mM Mannitol
aaccatctcactttcttttttctgtcttacactccaagatcggtctcgatggcttcgttcatagatcttttcgccggcgacatcacgacgcaactcttaaagctgctcgctctagtagctaacacagtctacagttgcaaaggaatcgccgaacgactgatcacgatgatcagagacgttcaaccaacgatcagggagatccaatacagtggcgcggagctgagtaaccatcaccaaactcaactgggagtattctatgagatcttggagaaagcaagaaagctatgtgaaaaggttttaagatgcaataggtggaaccttaaacatgtgtaccacgcgaataagatgaaggatctcgagaaacaaatatctcgtttcctcaacagccagattttgctctttgttcttgctgaggtatgtcatctacgggtcaatggtgacaggattgagaggaatatggatagactgttgactgagcggaatgattctttgtcgtttccggagactatgatggagattgagacggtaagcgatccggagattcagacggtattggaattggggaagaaaaaggtgaaggagatgatgtttaagtttacggatacacatttgtttgggatctctggaatgagcggttcagggaaaaccactcttgcaatagagctttcaaaggacgatgatgttcgaggactctttaagaataaggttttgtttttgactgtgtcacggtctccgaattttgagaatttggagtcttgtatacgagaatttctttatgatggagttcatcaacggaagctagtgattcttgatgatgtttggacaagggagtccttggacaggctgatgtctaaaattcgtggaagcactactttagtagtgtcacggtccaagcttgcagatcctagaaccacctacaatgtggaattattaaagaaagatgaagcaatgtctcttttgtgtctctgtgctttcgaacaaaagtccccgccttctccattcaacaaatatttggtgaagcaggttgttgatgagtgtaaaggtttacctttatctttgaaagttcttggtgcttcgttaaaaaacaaacctgaaagatattgggaaggcgtagtgaagaggttattaagaggagaagctgctgatgaaactcatgagagcagagtgtttgctcatatggaagaaagtctagaaaacctcgacccgaaaatccgagactgtttcttggatatgggtgctttccctgaagacaagaagatccctcttgatcttctcacgagcgtgtgggttgagaggcatgatattgacgaggaaactgcgttttcctttgttcttcgtttagctgacaagaatctccttactatagtgaacaatccgaggtttggcgatgtgcacattggctactatgatgtatttgtgacgcaacacgatgttttgagagacctagcccttcatatgtccaatcgtgtggacgtaaataggagagagcggttattaatgccaaaaacagagccagtgcttccaagagaatgggaaaagaataaagatgagccatttgatgccaagatagtttcccttcatacaggggaaatggatgaaatgaattggtttgacatggacctccctaaggcagaagttttaatactgaacttctcttcggacaactacgtcttgccaccatttattggtaagatgagtagactcagggtgctcgtgattatcaacaatggcatgtctcctgcgcgtctacatggcttctccatctttgccaatttggccaaactgaggagtctctggctcaagagggtacatgtccctgaactcaccagctgcaccattccactgaaaaacctgcacaagatacatctaatcttttgtaaggtcaagaacagctttgttcagacgtcattcgacatctcgaaaatattcccaagcttgtctgatctcactattgatcactgtgatgatcttttggaactaaaatccatatttggaataacctctctcaactctctcagcataaccaactgtccacggattcttgaattgcccaagaatttgagtaacgtacagtcccttgaacgtctaaggttatatgcctgccccgagctgatatccctcccggtcgaagtttgtgagctgccatgtctaaagtacgttgacatttcacagtgtgtcagcctggtttctcttcctgaaaagtttggaaagctagggagtcttgagaaaattgacatgagagaatgcagtttattgggtttaccaagttctgtagctgcacttgtgtctctacgccatgtcatttgcgatgaggagacttcgtctatgtgggaaatggtcaagaaggtggttcctgaactttgcattgaagtcgccaaaaaatgcttcaccgtggattggcttgacgattaggcttcttgttccttcaaactcttgataaccccttgtattaatcattgatcagcagtaattagagcgagttatttgaagtttggaatgtttctctctatatataagatcatttttagct

SEQ ID NO: 101573 - protein, 803 aa, Arabidopsis thaliana
  peptide (1)..(803): Ceres Seq. ID no. 13608201
  misc_feature (263)..(430): Pfam Name: NB-ARC domain Pfam Description: NB-ARC domain
  misc_feature (162)..(803): Homolog of NCBI NO: 15238281 NR Description: disease resistance protein (CC-NBS-LRR class),
  misc_feature (22)..(214): Homolog of NCBI NO: 15238281 NR Description: disease resistance protein (CC-NBS-LRR class),
  misc_feature (257)..(530): Homolog of NCBI NO: 7485661 NR Description: hypothetical protein F17M5.60 - Arabidopsis >gi|4490297|emb|CAB38788.1| putative protein [Arabidopsis >gi|7270278|emb|CAB80047.1| putative protein [Arabidopsis
  misc_feature (527)..(803): Homolog of NCBI NO: 7485661 NR Description: hypothetical protein F17M5.60 - Arabidopsis >gi|4490297|emb|CAB38788.1| putative protein [Arabidopsis >gi|7270278|emb|CAB80047.1| putative protein [Arabidopsis
  misc_feature (22)..(258): Homolog of NCBI NO: 7485661 NR Description: hypothetical protein F17M5.60 - Arabidopsis >gi|4490297|emb|CAB38788.1| putative protein [Arabidopsis >gi|7270278|emb|CAB80047.1| putative protein [Arabidopsis
  misc_feature (171)..(803): Homolog of NCBI NO: 30689664 NR Description: disease resistance protein (CC-NBS-LRR class),
  misc_feature (195)..(803): Homolog of NCBI NO: 15238054 NR Description: disease resistance protein (NBS-LRR class),
  misc_feature (250)..(787): Homolog of NCBI NO: 15240127 NR Description: disease resistance protein (CC-NBS-LRR class),
  misc_feature (25)..(247): Homolog of NCBI NO: 15240127 NR Description: disease resistance protein (CC-NBS-LRR class),
  misc_feature (338)..(803): Homolog of NCBI NO: 21655203 NR Description: NBS/LRR [Pinus taeda]
NHLTFFFLSYTPRSVSMASFIDLFAGDITTQLLKLLALVANTVYSCKGIAERLITMIRDVQPTIREIQYSGAELSNHHQTQLGVFYEILEKARKLCEKVLRCNRWNLKHVYHANKMKDLEKQISRFLNSQILLFVLAEVCHLRVNGDRIERNMDRLLTERNDSLSFPETMMEIETVSDPEIQTVLELGKKKVKEMMFKFTDTHLFGISGMSGSGKTTLAIELSKDDDVRGLFKNKVLFLTVSRSPNFENLESCIREFLYDGVHQRKLVILDDVWTRESLDRLMSKIRGSTTLVVSRSKLADPRTTYNVELLKKDEAMSLLCLCAFEQKSPPSPFNKYLVKQVVDECKGLPLSLKVLGASLKNKPERYWEGVVKRLLRGEAADETHESRVFAHMEESLENLDPKIRDCFLDMGAFPEDKKIPLDLLTSVWVERHDIDEETAFSFVLRLADKNLLTIVNNPRFGDVHIGYYDVFVTQHDVLRDLALHMSNRVDVNRRERLLMPKTEPVLPREWEKNKDEPFDAKIVSLHTGEMDEMNWFDMDLPKAEVLILNFSSDNYVLPPFIGKMSRLRVLVIINNGMSPARLHGFSIFANLAKLRSLWLKRVHVPELTSCTIPLKNLHKIHLIFCKVKNSFVQTSFDISKIFPSLSDLTIDHCDDLLELKSIFGITSLNSLSITNCPRILELPKNLSNVQSLERLRLYACPELISLPVEVCELPCLKYVDISQCVSLVSLPEKFGKLGSLEKIDMRECSLLGLPSSVAALVSLRHVICDEETSSMWEMVKKVVPELCIEVAKKCFTVDWLDD

SEQ ID NO: 101574 - protein, 787 aa, Arabidopsis thaliana
  peptide (1)..(787): Ceres Seq. ID no. 13608202
  misc_feature (247)..(414): Pfam Name: NB-ARC domain Pfam Description: NB-ARC domain
  misc_feature (146)..(787): Homolog of NCBI NO: 15238281 NR Description: disease resistance protein (CC-NBS-LRR class),
  misc_feature (6)..(198): Homolog of NCBI NO: 15238281 NR Description: disease resistance protein (CC-NBS-LRR class),
  misc_feature (241)..(514): Homolog of NCBI NO: 7485661 NR Description: hypothetical protein F17M5.60 - Arabidopsis >gi|4490297|emb|CAB38788.1| putative protein [Arabidopsis >gi|7270278|emb|CAB80047.1| putative protein [Arabidopsis
  misc_feature (511)..(787): Homolog of NCBI NO: 7485661 NR Description: hypothetical protein F17M5.60 - Arabidopsis >gi|4490297|emb|CAB38788.1| putative protein [Arabidopsis >gi|7270278|emb|CAB80047.1| putative protein [Arabidopsis
  misc_feature (6)..(242): Homolog of NCBI NO: 7485661 NR Description: hypothetical protein F17M5.60 - Arabidopsis >gi|4490297|emb|CAB38788.1| putative protein [Arabidopsis >gi|7270278|emb|CAB80047.1| putative protein [Arabidopsis
  misc_feature (155)..(787): Homolog of NCBI NO: 30689664 NR Description: disease resistance protein (CC-NBS-LRR class),
  misc_feature (179)..(787): Homolog of NCBI NO: 15238054 NR Description: disease resistance protein (NBS-LRR class),
  misc_feature (234)..(771): Homolog of NCBI NO: 15240127 NR Description: disease resistance protein (CC-NBS-LRR class),
  misc_feature (9)..(231): Homolog of NCBI NO: 15240127 NR Description: disease resistance protein (CC-NBS-LRR class),
  misc_feature (322)..(787): Homolog of NCBI NO: 21655203 NR Description: NBS/LRR [Pinus taeda]
MASFIDLFAGDITTQLLKLLALVANTVYSCKGIAERLITMIRDVQPTIREIQYSGAELSNHHQTQLGVFYEILEKARKLCEKVLRCNRWNLKHVYHANKMKDLEKQISRFLNSQILLFVLAEVCHLRVNGDRIERNMDRLLTERNDSLSFPETMMEIETVSDPEIQTVLELGKKKVKEMMFKFTDTHLFGISGMSGSGKTTLAIELSKDDDVRGLFKNKVLFLTVSRSPNFENLESCIREFLYDGVHQRKLVILDDVWTRESLDRLMSKIRGSTTLVVSRSKLADPRTTYNVELLKKDEAMSLLCLCAFEQKSPPSPFNKYLVKQVVDECKGLPLSLKVLGASLKNKPERYWEGVVKRLLRGEAADETHESRVFAHMEESLENLDPKIRDCFLDMGAFPEDKKIPLDLLTSVWVERHDIDEETAFSFVLRLADKNLLTIVNNPRFGDVHIGYYDVFVTQHDVLRDLALHMSNRVDVNRRERLLMPKTEPVLPREWEKNKDEPFDAKIVSLHTGEMDEMNWFDMDLPKAEVLILNFSSDNYVLPPFIGKMSRLRVLVIINNGMSPARLHGFSIFANLAKLRSLWLKRVHVPELTSCTIPLKNLHKIHLIFCKVKNSFVQTSFDISKIFPSLSDLTIDHCDDLLELKSIFGITSLNSLSITNCPRILELPKNLSNVQSLERLRLYACPELISLPVEVCELPCLKYVDISQCVSLVSLPEKFGKLGSLEKIDMRECSLLGLPSSVAALVSLRHVICDEETSSMWEMVKKVVPELCIEVAKKCFTVDWLDD

SEQ ID NO: 101575 - protein, 748 aa, Arabidopsis thaliana
  peptide (1)..(748): Ceres Seq. ID no. 13608203
  misc_feature (208)..(375): Pfam Name: NB-ARC domain Pfam Description: NB-ARC domain
  misc_feature (107)..(748): Homolog of NCBI NO: 15238281 NR Description: disease resistance protein (CC-NBS-LRR class),
  misc_feature (1)..(159): Homolog of NCBI NO: 15238281 NR Description: disease resistance protein (CC-NBS-LRR class),
  misc_feature (202)..(475): Homolog of NCBI NO: 7485661 NR Description: hypothetical protein F17M5.60 - Arabidopsis >gi|4490297|emb|CAB38788.1| putative protein [Arabidopsis >gi|7270278|emb|CAB80047.1| putative protein [Arabidopsis
  misc_feature (472)..(748): Homolog of NCBI NO: 7485661 NR Description: hypothetical protein F17M5.60 - Arabidopsis >gi|4490297|emb|CAB38788.1| putative protein [Arabidopsis >gi|7270278|emb|CAB80047.1| putative protein [Arabidopsis
  misc_feature (1)..(203): Homolog of NCBI NO: 7485661 NR Description: hypothetical protein F17M5.60 - Arabidopsis >gi|4490297|emb|CAB38788.1| putative protein [Arabidopsis >gi|7270278|emb|CAB80047.1| putative protein [Arabidopsis
  misc_feature (116)..(748): Homolog of NCBI NO: 30689664 NR Description: disease resistance protein (CC-NBS-LRR class),
  misc_feature (140)..(748): Homolog of NCBI NO: 15238054 NR Description: disease resistance protein (NBS-LRR class),
  misc_feature (195)..(732): Homolog of NCBI NO: 15240127 NR Description: disease resistance protein (CC-NBS-LRR class),
  misc_feature (1)..(192): Homolog of NCBI NO: 15240127 NR Description: disease resistance protein (CC-NBS-LRR class),
  misc_feature (283)..(748): Homolog of NCBI NO: 21655203 NR Description: NBS/LRR [Pinus taeda]
MIRDVQPTIREIQYSGAELSNHHQTQLGVFYEILEKARKLCEKVLRCNRWNLKHVYHANKMKDLEKQISRFLNSQILLFVLAEVCHLRVNGDRIERNMDRLLTERNDSLSFPETMMEIETVSDPEIQTVLELGKKKVKEMMFKFTDTHLFGISGMSGSGKTTLAIELSKDDDVRGLFKNKVLFLTVSRSPNFENLESCIREFLYDGVHQRKLVILDDVWTRESLDRLMSKIRGSTTLVVSRSKLADPRTTYNVELLKKDEAMSLLCLCAFEQKSPPSPFNKYLVKQVVDECKGLPLSLKVLGASLKNKPERYWEGVVKRLLRGEAADETHESRVFAHMEESLENLDPKIRDCFLDMGAFPEDKKIPLDLLTSVWVERHDIDEETAFSFVLRLADKNLLTIVNNPRFGDVHIGYYDVFVTQHDVLRDLALHMSNRVDVNRRERLLMPKTEPVLPREWEKNKDEPFDAKIVSLHTGEMDEMNWFDMDLPKAEVLILNFSSDNYVLPPFIGKMSRLRVLVIINNGMSPARLHGFSIFANLAKLRSLWLKRVHVPELTSCTIPLKNLHKIHLIFCKVKNSFVQTSFDISKIFPSLSDLTIDHCDDLLELKSIFGITSLNSLSITNCPRILELPKNLSNVQSLERLRLYACPELISLPVEVCELPCLKYVDISQCVSLVSLPEKFGKLGSLEKIDMRECSLLGLPSSVAALVSLRHVICDEETSSMWEMVKKVVPELCIEVAKKCFTVDWLDD

SEQ ID NO: 101576 - DNA, 1400 bp, Arabidopsis thaliana
  misc_feature (1)..(1400): Ceres Seq. ID no. 13608212
  misc_feature: MA Experiment ID: 108434 Result: Up-regulated in Transcription
  misc_feature: MA Experiment 108434 PARAMETER Experiment Name: At_Root_Tips_cDNA_P Parameter: Tissue Value: Root Tips
  misc_feature: MA Experiment ID: 108577 Result: Down-regulated in Transcription
  misc_feature: MA Experiment 108577 PARAMETER Experiment Name: At_42deg_Heat_cDNA_P Parameter: Temperature (deg C) Value: 42 vs. 22
  misc_feature: MA Experiment 108577 PARAMETER Experiment Name: At_42deg_Heat_cDNA_P Parameter: Timepoint (hr) Value: 6
  misc_feature: MA Experiment 108577 PARAMETER Experiment Name: At_42deg_Heat_cDNA_P Parameter: Tissue Value: Aerial
  misc_feature: MA Experiment ID: 20000171 Result: Down-regulated in Transcription
  misc_feature: MA Experiment 20000171 PARAMETER Experiment Name: At_42deg_Heat_P Parameter: Age (day) Value: 14
  misc_feature: MA Experiment 20000171 PARAMETER Experiment Name: At_42deg_Heat_P Parameter: Organism Value: A. thaliana
  misc_feature: MA Experiment 20000171 PARAMETER Experiment Name: At_42deg_Heat_P Parameter: Plant Line Value: WS
  misc_feature: MA Experiment 20000171 PARAMETER Experiment Name: At_42deg_Heat_P Parameter: Temperature (deg C) Value: 42 vs. 22
  misc_feature: MA Experiment 20000171 PARAMETER Experiment Name: At_42deg_Heat_P Parameter: Timepoint (hr) Value: 1
  misc_feature: MA Experiment 20000171 PARAMETER Experiment Name: At_42deg_Heat_P Parameter: Tissue Value: Aerial
  misc_feature: MA Experiment ID: 20000173 Result: Down-regulated in Transcription
  misc_feature: MA Experiment 20000173 PARAMETER Experiment Name: At_42deg_Heat_P Parameter: Age (day) Value: 14
  misc_feature: MA Experiment 20000173 PARAMETER Experiment Name: At_42deg_Heat_P Parameter: Organism Value: A. thaliana
  misc_feature: MA Experiment 20000173 PARAMETER Experiment Name: At_42deg_Heat_P Parameter: Plant Line Value: WS
  misc_feature: MA Experiment 20000173 PARAMETER Experiment Name: At_42deg_Heat_P Parameter: Temperature (deg C) Value: 42 vs. 22
  misc_feature: MA Experiment 20000173 PARAMETER Experiment Name: At_42deg_Heat_P Parameter: Timepoint (hr) Value: 6
  misc_feature: MA Experiment 20000173 PARAMETER Experiment Name: At_42deg_Heat_P Parameter: Tissue Value: Aerial
  misc_feature: MA Experiment ID: 20001560 Result: Up-regulated in Transcription
  misc_feature: MA Experiment 20001560 PARAMETER Experiment Name: At_Drought_Soil_Dry_P Parameter: Age (day) Value: 28
  misc_feature: MA Experiment 20001560 PARAMETER Experiment Name: At_Drought_Soil_Dry_P Parameter: Organism Value: A. thaliana
  misc_feature: MA Experiment 20001560 PARAMETER Experiment Name: At_Drought_Soil_Dry_P Parameter: Plant Line Value: WS
  misc_feature: MA Experiment 20001560 PARAMETER Experiment Name: At_Drought_Soil_Dry_P Parameter: Post Timepoint (hr) Value: None
  misc_feature: MA Experiment 20001560 PARAMETER Experiment Name: At_Drought_Soil_Dry_P Parameter: Post-Treatment Value: None
  misc_feature: MA Experiment 20001560 PARAMETER Experiment Name: At_Drought_Soil_Dry_P Parameter: Timepoint (day) Value: 14
  misc_feature: MA Experiment 20001560 PARAMETER Experiment Name: At_Drought_Soil_Dry_P Parameter: Treatment Value: Drought vs. No Drought
acgcttcccaaccgcctgcctttttcagattacctccggtttctaccactctcgccgtcgccgtcaccggtactccgatcacctccgcacgattcatttcctatttgcatttttcacctctctagcggaaagtgagtcttctcgagaatgggagattgaagaagtaagagattcactgattgaggaagagagaaagttagttcagaaaaatggctccagtgagtaaagctgataagaaggcagccgtagatgctgctgcgtggatgttcaatgtcgtcacttctgttggtatcatcattgttaataaagctttaatggcgacttatggttatagctttgctacaacgttaactggtttacatttcgctacaacgactctgatgacgcttgttttaagatgtcttggttacattcagccttctcatcttccgtttacggagcttttgagatttattctgtttgctaatttctccattgttggaatgaatgtcagtcttatgtggaactctgttggtttttatcagattgctaagctcagcatgattcctgtatcttgtttgttggaaatggttttcgataagattcgttattccagagatacaaagcttagcataggactggttcttgtgggtgttggtgtttgcactgttactgatgttagtgtaaacactaaaggatttgtagccgctttcgttgctgtgtggagtactgctctgcaacaatactatgtacattaccttcagcgcaagtactcgcttaactcattcaacctattgggacataccgctccagcccaagccgcaacattactggtagttggcccgtttcttgattattggctgacagaaaaaagagtagacatgtacgattacaacttggtttcagtgctgtttataaccctgtcgtgcacaatagcgattggaaccaacctaagccagttcatctgcatcggaagattcacagctgtatcgttccaagtgctgggacacatgaagacgatcctggtgctgataatgggcttcttcttctttggtagagaaggtcttaacttgcacgtggttgttggaatgataattgcagtactgggtatgatctggtacggtaatgcctcttcgaagccaggaggcaaagagcgacgaaactattctcttccaactacccgtcaacagaaactcggagctgcttcggattctgacgacaacgaagacaaagcctagtagtaagtagtatattatcaggaacatcacatagttacgtctctgttttgagttgtttttttattagcttaatttatgattctcgtgctaaattttggtttggtacgaaagaaagcgaattttttcatacagacgtttgagatttttgtaatgcatttttgcgaaatcaagttacatcaacgc

SEQ ID NO: 101577 - protein, 335 aa, Arabidopsis thaliana
  peptide (1)..(335): Ceres Seq. ID no. 13608213
  misc_feature (1)..(335): Homolog of NCBI NO: 18399097 NR Description: transporter-related [Arabidopsis thaliana]
  misc_feature (1)..(335): Homolog of NCBI NO: 21595054 NR Description: unknown [Arabidopsis thaliana]
  misc_feature (1)..(335): Homolog of NCBI NO: 15234794 NR Description: transporter-related [Arabidopsis thaliana]
  misc_feature (1)..(330): Homolog of NCBI NO: 18420440 NR Description: transporter-related [Arabidopsis thaliana]
  misc_feature (2)..(330): Homolog of NCBI NO: 21593003 NR Description: unknown [Arabidopsis thaliana]
  misc_feature (2)..(330): Homolog of NCBI NO: 7486049 NR Description: hypothetical protein F23K16.20 - Arabidopsis >gi|5042155|emb|CAB44674.1| putative protein [Arabidopsis >gi|7270923|emb|CAB80602.1| putative protein [Arabidopsis
  misc_feature (1)..(329): Homolog of NCBI NO: 30313364 NR Description: putative transmembrane protein [Oryza sativa]
  misc_feature (1)..(315): Homolog of NCBI NO: 18394949 NR Description: transporter-related [Arabidopsis thaliana]
  misc_feature (1)..(315): Homolog of NCBI NO: 21536703 NR Description: unknown [Arabidopsis thaliana]
  misc_feature (1)..(297): Homolog of NCBI NO: 15238957 NR Description: transporter-related [Arabidopsis thaliana] gb|AAF04433.1~gene_id:MDH9.11~strong similarity to unknown
MAPVSKADKKAAVDAAAWMFNVVTSVGIIIVNKALMATYGYSFATTLTGLHFATTTLMTLVLRCLGYIQPSHLPFTELLRFILFANFSIVGMNVSLMWNSVGFYQIAKLSMIPVSCLLEMVFDKIRYSRDTKLSIGLVLVGVGVCTVTDVSVNTKGFVAAFVAVWSTALQQYYVHYLQRKYSLNSFNLLGHTAPAQAATLLVVGPFLDYWLTEKRVDMYDYNLVSVLFITLSCTIAIGTNLSQFICIGRFTAVSFQVLGHMKTILVLIMGFFFFGREGLNLHVVVGMIIAVLGMIWYGNASSKPGGKERRNYSLPTTRQQKLGAASDSDDNEDKA

SEQ ID NO: 101578 - protein, 317 aa, Arabidopsis thaliana
  peptide (1)..(317): Ceres Seq. ID no. 13608214
  misc_feature (1)..(317): Homolog of NCBI NO: 18399097 NR Description: transporter-related [Arabidopsis thaliana]
  misc_feature (1)..(317): Homolog of NCBI NO: 21595054 NR Description: unknown [Arabidopsis thaliana]
  misc_feature (1)..(317): Homolog of NCBI NO: 15234794 NR Description: transporter-related [Arabidopsis thaliana]
  misc_feature (1)..(312): Homolog of NCBI NO: 18420440 NR Description: transporter-related [Arabidopsis thaliana]
  misc_feature (1)..(312): Homolog of NCBI NO: 21593003 NR Description: unknown [Arabidopsis thaliana]
  misc_feature (1)..(312): Homolog of NCBI NO: 7486049 NR Description: hypothetical protein F23K16.20 - Arabidopsis >gi|5042155|emb|CAB44674.1| putative protein [Arabidopsis >gi|7270923|emb|CAB80602.1| putative protein [Arabidopsis
  misc_feature (1)..(311): Homolog of NCBI NO: 30313364 NR Description: putative transmembrane protein [Oryza sativa]
  misc_feature (1)..(297): Homolog of NCBI NO: 18394949 NR Description: transporter-related [Arabidopsis thaliana]
  misc_feature (1)..(297): Homolog of NCBI NO: 21536703 NR Description: unknown [Arabidopsis thaliana]
  misc_feature (1)..(279): Homolog of NCBI NO: 15238957 NR Description: transporter-related [Arabidopsis thaliana] gb|AAF04433.1~gene_id:MDH9.11~strong similarity to unknown
MFNVVTSVGIIIVNKALMATYGYSFATTLTGLHFATTTLMTLVLRCLGYIQPSHLPFTELLRFILFANFSIVGMNVSLMWNSVGFYQIAKLSMIPVSCLLEMVFDKIRYSRDTKLSIGLVLVGVGVCTVTDVSVNTKGFVAAFVAVWSTALQQYYVHYLQRKYSLNSFNLLGHTAPAQAATLLVVGPFLDYWLTEKRVDMYDYNLVSVLFITLSCTIAIGTNLSQFICIGRFTAVSFQVLGHMKTILVLIMGFFFFGREGLNLHVVVGMIIAVLGMIWYGNASSKPGGKERRNYSLPTTRQQKLGAASDSDDNEDKA

SEQ ID NO: 101579 - protein, 300 aa, Arabidopsis thaliana
  peptide (1)..(300): Ceres Seq. ID no. 13608215
  misc_feature (1)..(300): Homolog of NCBI NO: 18399097 NR Description: transporter-related [Arabidopsis thaliana]
  misc_feature (1)..(300): Homolog of NCBI NO: 21595054 NR Description: unknown [Arabidopsis thaliana]
  misc_feature (1)..(300): Homolog of NCBI NO: 15234794 NR Description: transporter-related [Arabidopsis thaliana]
  misc_feature (1)..(295): Homolog of NCBI NO: 18420440 NR Description: transporter-related [Arabidopsis thaliana]
  misc_feature (1)..(295): Homolog of NCBI NO: 21593003 NR Description: unknown [Arabidopsis thaliana]
  misc_feature (1)..(295): Homolog of NCBI NO: 7486049 NR Description: hypothetical protein F23K16.20 - Arabidopsis >gi|5042155|emb|CAB44674.1| putative protein [Arabidopsis >gi|7270923|emb|CAB80602.1| putative protein [Arabidopsis
  misc_feature (1)..(294): Homolog of NCBI NO: 30313364 NR Description: putative transmembrane protein [Oryza sativa]
  misc_feature (1)..(280): Homolog of NCBI NO: 18394949 NR Description: transporter-related [Arabidopsis thaliana]
  misc_feature (1)..(280): Homolog of NCBI NO: 21536703 NR Description: unknown [Arabidopsis thaliana]
  misc_feature (1)..(262): Homolog of NCBI NO: 15238957 NR Description: transporter-related [Arabidopsis thaliana] gb|AAF04433.1~gene_id:MDH9.11~strong similarity to unknown
MATYGYSFATTLTGLHFATTTLMTLVLRCLGYIQPSHLPFTELLRFILFANFSIVGMNVSLMWNSVGFYQIAKLSMIPVSCLLEMVFDKIRYSRDTKLSIGLVLVGVGVCTVTDVSVNTKGFVAAFVAVWSTALQQYYVHYLQRKYSLNSFNLLGHTAPAQAATLLVVGPFLDYWLTEKRVDMYDYNLVSVLFITLSCTIAIGTNLSQFICIGRFTAVSFQVLGHMKTILVLIMGFFFFGREGLNLHVVVGMIIAVLGMIWYGNASSKPGGKERRNYSLPTTRQQKLGAASDSDDNEDKA

SEQ ID NO: 101580 - DNA, 782 bp, Arabidopsis thaliana
  misc_feature (1)..(782): Ceres Seq. ID no. 13608216
  misc_feature: MA Experiment ID: 108434 Result: Up-regulated in Transcription
  misc_feature: MA Experiment 108434 PARAMETER Experiment Name: At_Root_Tips_cDNA_P Parameter: Tissue Value: Root Tips
  misc_feature: MA Experiment ID: 20001911 Result: Down-regulated in Transcription
  misc_feature: MA Experiment 20001911 PARAMETER Experiment Name: At_Drought_Reproduction_P Parameter: Age (day) Value: 40
  misc_feature: MA Experiment 20001911 PARAMETER Experiment Name: At_Drought_Reproduction_P Parameter: Organism Value: A. thaliana
  misc_feature: MA Experiment 20001911 PARAMETER Experiment Name: At_Drought_Reproduction_P Parameter: Plant Line Value: WS
  misc_feature: MA Experiment 20001911 PARAMETER Experiment Name: At_Drought_Reproduction_P Parameter: Timepoint (day) Value: 10
  misc_feature: MA Experiment 20001911 PARAMETER Experiment Name: At_Drought_Reproduction_P Parameter: Tissue Value: Flowers
  misc_feature: MA Experiment 20001911 PARAMETER Experiment Name: At_Drought_Reproduction_P Parameter: Treatment Value: Drought vs. No Drought
ttggcgagaaaagttgagaactggaatcgaagaagcgatagggttttggttacttggagtgtgagtattttagttaccaccgcttgcaatttcaaattggtttcttttttccggtgacatttagtaagacaatggaagaaataagatcggcgatggagaagcaagtggatctcgtagcggatctggttgagaaactctccggagagctccgaacggggtttcaacctgcttacgataatttcttggggtttttccacgccattgattggaaggaaccttggattatgggtttaatggcgtttcatgctttgttgttactagtgactcttctttctagaaggcatctcaacttccatatgttcctcttcttattggctttggctggggtatactttgcagagaatctcaaccgggagttgaggaaaaactggaagagcttctcaactcaaaactactttgactcgaacggagtcttcctatcgactctctggtctggaccacttttggtcattgcaatgataatcctgataaacacactcttttcgctttgctacttaatcgtaaagtggaaaagagctgagctcaggcatcgcgcaaggcttgctcataccaaggaggaatgatcccactttttttaatctcacatttatgtatactctcacacaatgcatcaaaactgttttgagttttttagtagaagctgctcttttatgtatttcgttttcaattgaatcgaattgtatcaaaccgaaccaaaccaaattattctacttcggtctgtt

SEQ ID NO: 101581 - protein, 163 aa, Arabidopsis thaliana
  peptide (1)..(163): Ceres Seq. ID no. 13608217
  misc_feature (1)..(163): Homolog of NCBI NO: 18399227 NR Description: expressed protein [Arabidopsis thaliana]
  misc_feature (1)..(163): Homolog of NCBI NO: 21554376 NR Description: unknown [Arabidopsis thaliana]
  misc_feature (1)..(163): Homolog of NCBI NO: 38637052 NR Description: unknown protein [Oryza sativa (japonica
  misc_feature (1)..(47): Homolog of NCBI NO: 25518732 NR Description: hypothetical protein F7P12.4 [imported] -
  misc_feature (46)..(82): Homolog of NCBI NO: 25518732 NR Description: hypothetical protein F7P12.4 [imported] -
  misc_feature (40)..(156): Homolog of NCBI NO: 24653051 NR Description: CG30051-PB [Drosophila melanogaster]
  misc_feature (44)..(162): Homolog of NCBI NO: 31210097 NR Description: ENSANGP00000009975 [Anopheles gambiae]
  misc_feature (45)..(163): Homolog of NCBI NO: 11359939 NR Description: hypothetical protein DKFZp434C1714.1 - human
  misc_feature (45)..(163): Homolog of NCBI NO: 16359094 NR Description: Unknown (protein for IMAGE:4686355) [Homo sapiens]
  misc_feature (45)..(163): Homolog of NCBI NO: 21595411 NR Description: Hypothetical protein DKFZp434C1714 [Homo sapiens]
MEEIRSAMEKQVDLVADLVEKLSGELRTGFQPAYDNFLGFFHAIDWKEPWIMGLMAFHALLLLVTLLSRRHLNFHMFLFLLALAGVYFAENLNRELRKNWKSFSTQNYFDSNGVFLSTLWSGPLLVIAMIILINTLFSLCYLIVKWKRAELRHRARLAHTKEE

SEQ ID NO: 101582 - protein, 156 aa, Arabidopsis thaliana
  peptide (1)..(156): Ceres Seq. ID no. 13608218
  misc_feature (1)..(156): Homolog of NCBI NO: 18399227 NR Description: expressed protein [Arabidopsis thaliana]
  misc_feature (1)..(156): Homolog of NCBI NO: 21554376 NR Description: unknown [Arabidopsis thaliana]
  misc_feature (1)..(156): Homolog of NCBI NO: 38637052 NR Description: unknown protein [Oryza sativa (japonica
  misc_feature (1)..(40): Homolog of NCBI NO: 25518732 NR Description: hypothetical protein F7P12.4 [imported] -
  misc_feature (39)..(75): Homolog of NCBI NO: 25518732 NR Description: hypothetical protein F7P12.4 [imported] -
  misc_feature (33)..(149): Homolog of NCBI NO: 24653051 NR Description: CG30051-PB [Drosophila melanogaster]
  misc_feature (37)..(155): Homolog of NCBI NO: 31210097 NR Description: ENSANGP00000009975 [Anopheles gambiae]
  misc_feature (38)..(156): Homolog of NCBI NO: 11359939 NR Description: hypothetical protein DKFZp434C1714.1 - human
  misc_feature (38)..(156): Homolog of NCBI NO: 16359094 NR Description: Unknown (protein for IMAGE:4686355) [Homo sapiens]
  misc_feature (38)..(156): Homolog of NCBI NO: 21595411 NR Description: Hypothetical protein DKFZp434C1714 [Homo sapiens]
MEKQVDLVADLVEKLSGELRTGFQPAYDNFLGFFHAIDWKEPWIMGLMAFHALLLLVTLLSRRHLNFHMFLFLLALAGVYFAENLNRELRKNWKSFSTQNYFDSNGVFLSTLWSGPLLVIAMIILINTLFSLCYLIVKWKRAELRHRARLAHTKEE

SEQ ID NO: 101583 - protein, 112 aa, Arabidopsis thaliana
  peptide (1)..(112): Ceres Seq. ID no. 13608219
  misc_feature (1)..(112): Homolog of NCBI NO: 18399227 NR Description: expressed protein [Arabidopsis thaliana]
  misc_feature (1)..(112): Homolog of NCBI NO: 21554376 NR Description: unknown [Arabidopsis thaliana]
  misc_feature (1)..(112): Homolog of NCBI NO: 38637052 NR Description: unknown protein [Oryza sativa (japonica
  misc_feature (1)..(31): Homolog of NCBI NO: 25518732 NR Description: hypothetical protein F7P12.4 [imported] -
  misc_feature (1)..(105): Homolog of NCBI NO: 24653051 NR Description: CG30051-PB [Drosophila melanogaster]
  misc_feature (1)..(111): Homolog of NCBI NO: 31210097 NR Description: ENSANGP00000009975 [Anopheles gambiae]
  misc_feature (1)..(112): Homolog of NCBI NO: 11359939 NR Description: hypothetical protein DKFZp434C1714.1 - human
  misc_feature (1)..(112): Homolog of NCBI NO: 16359094 NR Description: Unknown (protein for IMAGE:4686355) [Homo sapiens]
  misc_feature (1)..(112): Homolog of NCBI NO: 21595411 NR Description: Hypothetical protein DKFZp434C1714 [Homo sapiens]
  misc_feature (1)..(112): Homolog of NCBI NO: 34864175 NR Description: similar to cDNA sequence BC024093 [Rattus
MGLMAFHALLLLVTLLSRRHLNFHMFLFLLALAGVYFAENLNRELRKNWKSFSTQNYFDSNGVFLSTLWSGPLLVIAMIILINTLFSLCYLIVKWKRAELRHRARLAHTKEE

SEQ ID NO: 101584 - DNA, 1755 bp, Arabidopsis thaliana
  misc_feature (1)..(1755): Ceres Seq. ID no. 13608220
  misc_feature: MA Experiment ID: 108573 Result: Up-regulated in Transcription
  misc_feature: MA Experiment 108573 PARAMETER Experiment Name: At_Drought_cDNA_P Parameter: Timepoint (hr) Value: 6
  misc_feature: MA Experiment 108573 PARAMETER Experiment Name: At_Drought_cDNA_P Parameter: Tissue Value: Aerial
  misc_feature: MA Experiment 108573 PARAMETER Experiment Name: At_Drought_cDNA_P Parameter: Treatment Value: Drought vs. No Drought
  misc_feature: MA Experiment ID: 108579 Result: Down-regulated in Transcription
  misc_feature: MA Experiment 108579 PARAMETER Experiment Name: At_4deg_Cold_cDNA_P Parameter: Temperature (deg C) Value: 4 vs. 22
  misc_feature: MA Experiment 108579 PARAMETER Experiment Name: At_4deg_Cold_cDNA_P Parameter: Timepoint (hr) Value: 6
  misc_feature: MA Experiment 108579 PARAMETER Experiment Name: At_4deg_Cold_cDNA_P Parameter: Tissue Value: Aerial
  misc_feature: MA Experiment ID: 108585 Result: Up-regulated in Transcription
  misc_feature: MA Experiment 108585 PARAMETER Experiment Name: At_5mM_NaNP_cDNA_P Parameter: Timepoint (hr) Value: 6
  misc_feature: MA Experiment 108585 PARAMETER Experiment Name: At_5mM_NaNP_cDNA_P Parameter: Tissue Value: Aerial
  misc_feature: MA Experiment 108585 PARAMETER Experiment Name: At_5mM_NaNP_cDNA_P Parameter: Treatment Value: null
  misc_feature: MA Experiment ID: 20000224 Result: Down-regulated in Transcription
  misc_feature: MA Experiment ID: 20000234 Result: Down-regulated in Transcription
  misc_feature: MA Experiment 20000234 PARAMETER Experiment Name: At_Siliques_P Parameter: Age (day) Value: 21
  misc_feature: MA Experiment 20000234 PARAMETER Experiment Name: At_Siliques_P Parameter: Organism Value: A. thaliana
  misc_feature: MA Experiment 20000234 PARAMETER Experiment Name: At_Siliques_P Parameter: Plant Line Value: WS
  misc_feature: MA Experiment 20000234 PARAMETER Experiment Name: At_Siliques_P Parameter: Tissue Value: Less Than 5mm Siliques vs. Whole Plant
  misc_feature: MA Experiment ID: 20000235 Result: Down-regulated in Transcription
  misc_feature: MA Experiment 20000235 PARAMETER Experiment Name: At_Siliques_P Parameter: Age (day) Value: 21
  misc_feature: MA Experiment 20000235 PARAMETER Experiment Name: At_Siliques_P Parameter: Organism Value: A. thaliana
  misc_feature: MA Experiment 20000235 PARAMETER Experiment Name: At_Siliques_P Parameter: Plant Line Value: WS
  misc_feature: MA Experiment 20000235 PARAMETER Experiment Name: At_Siliques_P Parameter: Tissue Value: 5-10mm Siliques vs. Whole Plant
  misc_feature: MA Experiment ID: 20000265 Result: Down-regulated in Transcription
  misc_feature: MA Experiment 20000265 PARAMETER Experiment Name: At_Open_Flower_P Parameter: Age (day) Value: 21
  misc_feature: MA Experiment 20000265 PARAMETER Experiment Name: At_Open_Flower_P Parameter: Plant Line Value: WS
  misc_feature: MA Experiment 20000265 PARAMETER Experiment Name: At_Open_Flower_P Parameter: Tissue Value: Closed Flower vs. Whole Plant
  misc_feature: MA Experiment ID: 20000286 Result: Down-regulated in Transcription
  misc_feature: MA Experiment 20000286 PARAMETER Experiment Name: At_Open_Flower_P Parameter: Age (day) Value: 21
  misc_feature: MA Experiment 20000286 PARAMETER Experiment Name: At_Open_Flower_P Parameter: Plant Line Value: WS
  misc_feature: MA Experiment 20000286 PARAMETER Experiment Name: At_Open_Flower_P Parameter: Tissue Value: Half Open vs. Whole Plant
  misc_feature: MA Experiment ID: 20001248 Result: Up-regulated in Transcription
  misc_feature: MA Experiment 20001248 PARAMETER Experiment Name: At_Far-red-induction_P Parameter: Age (day) Value: 7
  misc_feature: MA Experiment 20001248 PARAMETER Experiment Name: At_Far-red-induction_P Parameter: Light Value: Far-red vs. White
  misc_feature: MA Experiment 20001248 PARAMETER Experiment Name: At_Far-red-induction_P Parameter: Organism Value: A. thaliana
  misc_feature: MA Experiment 20001248 PARAMETER Experiment Name: At_Far-red-induction_P Parameter: Plant Line Value: Columbia
  misc_feature: MA Experiment 20001248 PARAMETER Experiment Name: At_Far-red-induction_P Parameter: Timepoint (hr) Value: 4
  misc_feature: MA Experiment 20001248 PARAMETER Experiment Name: At_Far-red-induction_P Parameter: Tissue Value: Whole Plant
  misc_feature: MA Experiment ID: 20001450 Result: Up-regulated in Transcription
  misc_feature: MA Experiment 20001450 PARAMETER Experiment Name: At_Far-red-induction_P Parameter: Age (day) Value: 7
  misc_feature: MA Experiment 20001450 PARAMETER Experiment Name: At_Far-red-induction_P Parameter: Light Value: Far-red vs. White
  misc_feature: MA Experiment 20001450 PARAMETER Experiment Name: At_Far-red-induction_P Parameter: Organism Value: A. thaliana
  misc_feature: MA Experiment 20001450 PARAMETER Experiment Name: At_Far-red-induction_P Parameter: Plant Line Value: Columbia
  misc_feature: MA Experiment 20001450 PARAMETER Experiment Name: At_Far-red-induction_P Parameter: Timepoint (hr) Value: 8
  misc_feature: MA Experiment 20001450 PARAMETER Experiment Name: At_Far-red-induction_P Parameter: Tissue Value: Whole Plant
ctctctctctatcatcatcatcatcactttctctatctatctctcttcttaaagcggccattggtgctctccaagttccatctcaagcttttcttcttgttttgttgttctcttaattgaaaaacaagatcttgaactaaaaaatggaaactgaagacgatttgtgcaacaccaattggggaagctcttcttcgaaatcgcgagagccgggttcatcagactgtgggaattcgacattcgcaggttttacgtcccagcagaagtgggaagatgcttcaatcttggattatgagatgggtgtggagcctggattgcaagagagcattcaagcaaatgttgatttcttacaaggtgttagggctcaagcgtgggatccaaggacgatgttgagtaacctttcttttatggagcagaagattcaccagctgcaggatcttgttcatcttcttgttggtcgtggtgggcagcttcaaggtcgtcaagacgagctcgcggctcagcagcagcagcttataacgacggatcttacttccattatcatacagcttatttcaactgcaggtagtcttcttccatctgttaagcataatatgtcaacagctccgggtccattcactgggcagcccggttcagccgtgttcccttatgtaagggaggctaataacgttgcttcacagagtcagaacaataacaactgtggtgctcgagagttcgatttgcctaagccggttcttgttgatgagagggaaggtcatgttgtggaggaacatgagatgaaagatgaagatgatgtggaagaaggagagaaccttcctcccggttcgtatgagatattgcagcttgagaaagaagagattctcgcaccgcatactcacttctgcacgatatgtggcaagggtttcaagagagacgcgaatttgaggatgcatatgagagggcatggagatgagtacaaaacagcagctgctctggcgaaaccgaacaaagaatccgtacccgggtctgagccgatgctgatcaagaggtactcgtgcccattccttggttgcaaacgtaacaaggagcacaaaaagttccagcctttgaaaacgattctatgcgtgaagaatcactataaacgcacccactgcgataaaagcttcacttgcagccggtgccataccaagaaattctctgtcattgcagatcttaaaacccacgagaagcactgcgggaaaaacaagtggctttgttcctgtggtacaacattttcaaggaaagacaagttgtttggtcacatagctctgttccagggacacacgcctgcaatccctcttgaagagacaaaaccatcagccagtacatctactcagagagggagctctgaaggcgggaacaacaaccaaggaatggttggcttcaatcttggttctgcatcaaatgctaaccaagaaaccacacagcctggaatgactgatgggaggatatgttttgaggagtcgttctcaccaatgaactttgatacatgtaattttggagggttccacgagtttccgcgactgatgtttgatgattcagagagttcttttcaaatgcttattgcgaatgcctgtggtttctcgcccaggaatgttggtgagtctgtttcagatactagtctctaaggcattgccatatatatgataagttatgtaagatgttctagtttttagccttttaagcagttcttttgtgtctgtaattttgttttcgccataataataatatcagaatagc

SEQ ID NO: 101585 - protein, 499 aa, Arabidopsis thaliana
  peptide (1)..(499): Ceres Seq. ID no. 13608221
  misc_feature (333)..(356): Pfam Name: Zinc finger, C2H2 type Pfam Description: Zinc finger, C2H2 type
  misc_feature (1)..(499): Homolog of NCBI NO: 15218606 NR Description: zinc finger protein -related [Arabidopsis
  misc_feature (1)..(499): Homolog of NCBI NO: 21593564 NR Description: zinc finger protein, putative [Arabidopsis
  misc_feature (206)..(493): Homolog of NCBI NO: 34908682 NR Description: putative zinc finger protein [Oryza sativa
  misc_feature (76)..(154): Homolog of NCBI NO: 34908682 NR Description: putative zinc finger protein [Oryza sativa
  misc_feature (213)..(469): Homolog of NCBI NO: 28376689 NR Description: putative zinc finger protein [Oryza sativa
  misc_feature (226)..(388): Homolog of NCBI NO: 10177236 NR Description: contains similarity to C2H2-type zinc finger [Arabidopsis thaliana] >gi|28466935|gb|AAO44076.1| At5g22890
  misc_feature (226)..(388): Homolog of NCBI NO: 30688719 NR Description: expressed protein [Arabidopsis thaliana]
  misc_feature (70)..(401): Homolog of NCBI NO: 10241636 NR Description: putative zinc finger protein [Oryza sativa
  misc_feature (215)..(401): Homolog of NCBI NO: 38346456 NR Description: OSJNBa0019G23.4 [Oryza sativa (japonica
METEDDLCNTNWGSSSSKSREPGSSDCGNSTFAGFTSQQKWEDASILDYEMGVEPGLQESIQANVDFLQGVRAQAWDPRTMLSNLSFMEQKIHQLQDLVHLLVGRGGQLQGRQDELAAQQQQLITTDLTSIIIQLISTAGSLLPSVKHNMSTAPGPFTGQPGSAVFPYVREANNVASQSQNNNNCGAREFDLPKPVLVDEREGHVVEEHEMKDEDDVEEGENLPPGSYEILQLEKEEILAPHTHFCTICGKGFKRDANLRMHMRGHGDEYKTAAALAKPNKESVPGSEPMLIKRYSCPFLGCKRNKEHKKFQPLKTILCVKNHYKRTHCDKSFTCSRCHTKKFSVIADLKTHEKHCGKNKWLCSCGTTFSRKDKLFGHIALFQGHTPAIPLEETKPSASTSTQRGSSEGGNNNQGMVGFNLGSASNANQETTQPGMTDGRICFEESFSPMNFDTCNFGGFHEFPRLMFDDSESSFQMLIANACGFSPRNVGESVSDTSL

SEQ ID NO: 101586 - protein, 449 aa, Arabidopsis thaliana
  peptide (1)..(449): Ceres Seq. ID no. 13608222
  misc_feature (283)..(306): Pfam Name: Zinc finger, C2H2 type Pfam Description: Zinc finger, C2H2 type
  misc_feature (1)..(449): Homolog of NCBI NO: 15218606 NR Description: zinc finger protein -related [Arabidopsis
  misc_feature (1)..(449): Homolog of NCBI NO: 21593564 NR Description: zinc finger protein, putative [Arabidopsis
  misc_feature (156)..(443): Homolog of NCBI NO: 34908682 NR Description: putative zinc finger protein [Oryza sativa
  misc_feature (26)..(104): Homolog of NCBI NO: 34908682 NR Description: putative zinc finger protein [Oryza sativa
  misc_feature (163)..(419): Homolog of NCBI NO: 28376689 NR Description: putative zinc finger protein [Oryza sativa
  misc_feature (176)..(338): Homolog of NCBI NO: 10177236 NR Description: contains similarity to C2H2-type zinc finger [Arabidopsis thaliana] >gi|28466935|gb|AAO44076.1| At5g22890
  misc_feature (176)..(338): Homolog of NCBI NO: 30688719 NR Description: expressed protein [Arabidopsis thaliana]
  misc_feature (20)..(351): Homolog of NCBI NO: 10241636 NR Description: putative zinc finger protein [Oryza sativa
  misc_feature (165)..(351): Homolog of NCBI NO: 38346456 NR Description: OSJNBa0019G23.4 [Oryza sativa (japonica
MGVEPGLQESIQANVDFLQGVRAQAWDPRTMLSNLSFMEQKIHQLQDLVHLLVGRGGQLQGRQDELAAQQQQLITTDLTSIIIQLISTAGSLLPSVKHNMSTAPGPFTGQPGSAVFPYVREANNVASQSQNNNNCGAREFDLPKPVLVDEREGHVVEEHEMKDEDDVEEGENLPPGSYEILQLEKEEILAPHTHFCTICGKGFKRDANLRMHMRGHGDEYKTAAALAKPNKESVPGSEPMLIKRYSCPFLGCKRNKEHKKFQPLKTILCVKNHYKRTHCDKSFTCSRCHTKKFSVIADLKTHEKHCGKNKWLCSCGTTFSRKDKLFGHIALFQGHTPAIPLEETKPSASTSTQRGSSEGGNNNQGMVGFNLGSASNANQETTQPGMTDGRICFEESFSPMNFDTCNFGGFHEFPRLMFDDSESSFQMLIANACGFSPRNVGESVSDTSL

SEQ ID NO: 101587 - protein, 419 aa, Arabidopsis thaliana
  peptide (1)..(419): Ceres Seq. ID no. 13608223
  misc_feature (253)..(276): Pfam Name: Zinc finger, C2H2 type Pfam Description: Zinc finger, C2H2 type
  misc_feature (1)..(419): Homolog of NCBI NO: 15218606 NR Description: zinc finger protein -related [Arabidopsis
  misc_feature (1)..(419): Homolog of NCBI NO: 21593564 NR Description: zinc finger protein, putative [Arabidopsis
  misc_feature (126)..(413): Homolog of NCBI NO: 34908682 NR Description: putative zinc finger protein [Oryza sativa
  misc_feature (1)..(74): Homolog of NCBI NO: 34908682 NR Description: putative zinc finger protein [Oryza sativa
  misc_feature (133)..(389): Homolog of NCBI NO: 28376689 NR Description: putative zinc finger protein [Oryza sativa
  misc_feature (146)..(308): Homolog of NCBI NO: 10177236 NR Description: contains similarity to C2H2-type zinc finger [Arabidopsis thaliana] >gi|28466935|gb|AAO44076.1| At5g22890
  misc_feature (146)..(308): Homolog of NCBI NO: 30688719 NR Description: expressed protein [Arabidopsis thaliana]
  misc_feature (1)..(321): Homolog of NCBI NO: 10241636 NR Description: putative zinc finger protein [Oryza sativa
  misc_feature (135)..(321): Homolog of NCBI NO: 38346456 NR Description: OSJNBa0019G23.4 [Oryza sativa (japonica
MLSNLSFMEQKIHQLQDLVHLLVGRGGQLQGRQDELAAQQQQLITTDLTSIIIQLISTAGSLLPSVKHNMSTAPGPFTGQPGSAVFPYVREANNVASQSQNNNNCGAREFDLPKPVLVDEREGHVVEEHEMKDEDDVEEGENLPPGSYEILQLEKEEILAPHTHFCTICGKGFKRDANLRMHMRGHGDEYKTAAALAKPNKESVPGSEPMLIKRYSCPFLGCKRNKEHKKFQPLKTILCVKNHYKRTHCDKSFTCSRCHTKKFSVIADLKTHEKHCGKNKWLCSCGTTFSRKDKLFGHIALFQGHTPAIPLEETKPSASTSTQRGSSEGGNNNQGMVGFNLGSASNANQETTQPGMTDGRICFEESFSPMNFDTCNFGGFHEFPRLMFDDSESSFQMLIANACGFSPRNVGESVSDTSL

SEQ ID NO: 101588 - DNA, 1527 bp, Arabidopsis thaliana
  misc_feature (1)..(1527): Ceres Seq. ID no. 13608224
  misc_feature: MA Experiment ID: 108462 Result: Down-regulated in Transcription
  misc_feature: MA Experiment 108462 PARAMETER Experiment Name: At_Germinating_Seeds_cDNA_P Parameter: Age (day) Value: 2 vs. 0
  misc_feature: MA Experiment 108462 PARAMETER Experiment Name: At_Germinating_Seeds_cDNA_P Parameter: Tissue Value: Germinating Seeds
  misc_feature: MA Experiment ID: 108464 Result: Down-regulated in Transcription
  misc_feature: MA Experiment 108464 PARAMETER Experiment Name: At_Germinating_Seeds_cDNA_P Parameter: Age (day) Value: 4 vs. 0
  misc_feature: MA Experiment 108464 PARAMETER Experiment Name: At_Germinating_Seeds_cDNA_P Parameter: Tissue Value: Germinating Seeds
  misc_feature: MA Experiment ID: 108573 Result: Up-regulated in Transcription
  misc_feature: MA Experiment 108573 PARAMETER Experiment Name: At_Drought_cDNA_P Parameter: Timepoint (hr) Value: 6
  misc_feature: MA Experiment 108573 PARAMETER Experiment Name: At_Drought_cDNA_P Parameter: Tissue Value: Aerial
  misc_feature: MA Experiment 108573 PARAMETER Experiment Name: At_Drought_cDNA_P Parameter: Treatment Value: Drought vs. No Drought
  misc_feature: MA Experiment ID: 20000069 Result: Up-regulated in Transcription
  misc_feature: MA Experiment 20000069 PARAMETER Experiment Name: At_100uM_ABA_Mutants_cDNA_P Parameter: Plant Line Value: CS23
  misc_feature: MA Experiment 20000069 PARAMETER Experiment Name: At_100uM_ABA_Mutants_cDNA_P Parameter: Timepoint (hr) Value: 6
  misc_feature: MA Experiment 20000069 PARAMETER Experiment Name: At_100uM_ABA_Mutants_cDNA_P Parameter: Tissue Value: Aerial
  misc_feature: MA Experiment 20000069 PARAMETER Experiment Name: At_100uM_ABA_Mutants_cDNA_P Parameter: Treatment Value: 100uM ABA vs. No Treatment
  misc_feature: MA Experiment ID: 20000070 Result: Up-regulated in Transcription
  misc_feature: MA Experiment 20000070 PARAMETER Experiment Name: At_100uM_ABA_Mutants_cDNA_P Parameter: Plant Line Value: CS24
  misc_feature: MA Experiment 20000070 PARAMETER Experiment Name: At_100uM_ABA_Mutants_cDNA_P Parameter: Timepoint (hr) Value: 6
  misc_feature: MA Experiment 20000070 PARAMETER Experiment Name: At_100uM_ABA_Mutants_cDNA_P Parameter: Tissue Value: Aerial
  misc_feature: MA Experiment 20000070 PARAMETER Experiment Name: At_100uM_ABA_Mutants_cDNA_P Parameter: Treatment Value: 100uM ABA vs. No Treatment
  misc_feature: MA Experiment ID: 20000071 Result: Up-regulated in Transcription
  misc_feature: MA Experiment 20000071 PARAMETER Experiment Name: At_100uM_ABA_Mutants_cDNA_P Parameter: Plant Line Value: CS8104
  misc_feature: MA Experiment 20000071 PARAMETER Experiment Name: At_100uM_ABA_Mutants_cDNA_P Parameter: Timepoint (hr) Value: 6
  misc_feature: MA Experiment 20000071 PARAMETER Experiment Name: At_100uM_ABA_Mutants_cDNA_P Parameter: Tissue Value: Aerial
  misc_feature: MA Experiment 20000071 PARAMETER Experiment Name: At_100uM_ABA_Mutants_cDNA_P Parameter: Treatment Value: 100uM ABA vs. No Treatment
  misc_feature: MA Experiment ID: 20000072 Result: Up-regulated in Transcription
  misc_feature: MA Experiment 20000072 PARAMETER Experiment Name: At_100uM_ABA_Mutants_cDNA_P Parameter: Plant Line Value: CS8105
  misc_feature: MA Experiment 20000072 PARAMETER Experiment Name: At_100uM_ABA_Mutants_cDNA_P Parameter: Timepoint (hr) Value: 6
  misc_feature: MA Experiment 20000072 PARAMETER Experiment Name: At_100uM_ABA_Mutants_cDNA_P Parameter: Tissue Value: Aerial
  misc_feature: MA Experiment 20000072 PARAMETER Experiment Name: At_100uM_ABA_Mutants_cDNA_P Parameter: Treatment Value: 100uM ABA vs. No Treatment
  misc_feature: MA Experiment ID: 20000086 Result: Up-regulated in Transcription
  misc_feature: MA Experiment 20000086 PARAMETER Experiment Name: At_100uM_ABA_Mutants_cDNA_P Parameter: Plant Line Value: CS22
  misc_feature: MA Experiment 20000086 PARAMETER Experiment Name: At_100uM_ABA_Mutants_cDNA_P Parameter: Timepoint (hr) Value: 6
  misc_feature: MA Experiment 20000086 PARAMETER Experiment Name: At_100uM_ABA_Mutants_cDNA_P Parameter: Tissue Value: Aerial
  misc_feature: MA Experiment 20000086 PARAMETER Experiment Name: At_100uM_ABA_Mutants_cDNA_P Parameter: Treatment Value: 100uM ABA vs. No Treatment
  misc_feature: MA Experiment ID: 20000087 Result: Up-regulated in Transcription
  misc_feature: MA Experiment 20000087 PARAMETER Experiment Name: At_100uM_ABA_Mutants_cDNA_P Parameter: Plant Line Value: WS
  misc_feature: MA Experiment 20000087 PARAMETER Experiment Name: At_100uM_ABA_Mutants_cDNA_P Parameter: Timepoint (hr) Value: 6
  misc_feature: MA Experiment 20000087 PARAMETER Experiment Name: At_100uM_ABA_Mutants_cDNA_P Parameter: Tissue Value: Aerial
  misc_feature: MA Experiment 20000087 PARAMETER Experiment Name: At_100uM_ABA_Mutants_cDNA_P Parameter: Treatment Value: 100uM ABA vs. No Treatment
  misc_feature: MA Experiment ID: 20000088 Result: Up-regulated in Transcription
  misc_feature: MA Experiment 20000088 PARAMETER Experiment Name: At_100uM_ABA_Mutants_cDNA_P Parameter: Plant Line Value: Landsberg
  misc_feature: MA Experiment 20000088 PARAMETER Experiment Name: At_100uM_ABA_Mutants_cDNA_P Parameter: Timepoint (hr) Value: 6
  misc_feature: MA Experiment 20000088 PARAMETER Experiment Name: At_100uM_ABA_Mutants_cDNA_P Parameter: Tissue Value: Aerial
  misc_feature: MA Experiment 20000088 PARAMETER Experiment Name: At_100uM_ABA_Mutants_cDNA_P Parameter: Treatment Value: 100uM ABA vs. No Treatment
  misc_feature: MA Experiment ID: 20000089 Result: Up-regulated in Transcription
  misc_feature: MA Experiment ID: 20000090 Result: Up-regulated in Transcription
  misc_feature: MA Experiment ID: 20000184 Result: Down-regulated in Transcription
  misc_feature: MA Experiment 20000184 PARAMETER Experiment Name: At_Shoots__P Parameter: Age (day) Value: 7
  misc_feature: MA Experiment 20000184 PARAMETER Experiment Name: At_Shoots__P Parameter: Tissue Value: Shoots vs. Whole Plant
  misc_feature: MA Experiment ID: 20000224 Result: Down-regulated in Transcription
  misc_feature: MA Experiment ID: 20000437 Result: Up-regulated in Transcription
  misc_feature: MA Experiment 20000437 PARAMETER Experiment Name: At_Drought_P Parameter: Age (day) Value: 8
  misc_feature: MA Experiment 20000437 PARAMETER Experiment Name: At_Drought_P Parameter: Organism Value: A. thaliana
  misc_feature: MA Experiment 20000437 PARAMETER Experiment Name: At_Drought_P Parameter: Plant Line Value: WS
  misc_feature: MA Experiment 20000437 PARAMETER Experiment Name: At_Drought_P Parameter: Timepoint (hr) Value: 24
  misc_feature: MA Experiment 20000437 PARAMETER Experiment Name: At_Drought_P Parameter: Tissue Value: Whole Plant
  misc_feature: MA Experiment 20000437 PARAMETER Experiment Name: At_Drought_P Parameter: Treatment Value: Drought vs. No Drought
  misc_feature: MA Experiment ID: 20000495 Result: Up-regulated in Transcription
  misc_feature: MA Experiment 20000495 PARAMETER Experiment Name: At_Guard_Cells_P Parameter: Harvest Date Value: 8/2/2002
  misc_feature: MA Experiment 20000495 PARAMETER Experiment Name: At_Guard_Cells_P Parameter: Organism Value: A. thaliana
  misc_feature: MA Experiment 20000495 PARAMETER Experiment Name: At_Guard_Cells_P Parameter: Tissue Value: Guard Cells vs. Leaves
  misc_feature: MA Experiment ID: 20000794 Result: Up-regulated in Transcription
  misc_feature: MA Experiment 20000794 PARAMETER Experiment Name: At_Petals_P Parameter: Age (day) Value: 23-25 days
  misc_feature: MA Experiment 20000794 PARAMETER Experiment Name: At_Petals_P Parameter: Plant Line Value: WS
  misc_feature: MA Experiment 20000794 PARAMETER Experiment Name: At_Petals_P Parameter: Tissue Value: Petals vs. Whole plant
  misc_feature: MA Experiment ID: 20001247 Result: Down-regulated in Transcription
  misc_feature: MA Experiment 20001247 PARAMETER Experiment Name: At_Far-red-induction_P Parameter: Age (day) Value: 7
  misc_feature: MA Experiment 20001247 PARAMETER Experiment Name: At_Far-red-induction_P Parameter: Light Value: Far-red vs. White
  misc_feature: MA Experiment 20001247 PARAMETER Experiment Name: At_Far-red-induction_P Parameter: Organism Value: A. thaliana
  misc_feature: MA Experiment 20001247 PARAMETER Experiment Name: At_Far-red-induction_P Parameter: Plant Line Value: Columbia
  misc_feature: MA Experiment 20001247 PARAMETER Experiment Name: At_Far-red-induction_P Parameter: Timepoint (hr) Value: 1
  misc_feature: MA Experiment 20001247 PARAMETER Experiment Name: At_Far-red-induction_P Parameter: Tissue Value: Whole Plant
  misc_feature: MA Experiment ID: 20001248 Result: Up-regulated in Transcription
  misc_feature: MA Experiment 20001248 PARAMETER Experiment Name: At_Far-red-induction_P Parameter: Age (day) Value: 7
  misc_feature: MA Experiment 20001248 PARAMETER Experiment Name: At_Far-red-induction_P Parameter: Light Value: Far-red vs. White
  misc_feature: MA Experiment 20001248 PARAMETER Experiment Name: At_Far-red-induction_P Parameter: Organism Value: A. thaliana
  misc_feature: MA Experiment 20001248 PARAMETER Experiment Name: At_Far-red-induction_P Parameter: Plant Line Value: Columbia
  misc_feature: MA Experiment 20001248 PARAMETER Experiment Name: At_Far-red-induction_P Parameter: Timepoint (hr) Value: 4
  misc_feature: MA Experiment 20001248 PARAMETER Experiment Name: At_Far-red-induction_P Parameter: Tissue Value: Whole Plant
  misc_feature: MA Experiment ID: 20001451 Result: Down-regulated in Transcription
  misc_feature: MA Experiment 20001451 PARAMETER Experiment Name: At_Far-red-induction_P Parameter: Age (day) Value: 7
  misc_feature: MA Experiment 20001451 PARAMETER Experiment Name: At_Far-red-induction_P Parameter: Light Value: Far-red vs. White
  misc_feature: MA Experiment 20001451 PARAMETER Experiment Name: At_Far-red-induction_P Parameter: Organism Value: A. thaliana
  misc_feature: MA Experiment 20001451 PARAMETER Experiment Name: At_Far-red-induction_P Parameter: Plant Line Value: Columbia
  misc_feature: MA Experiment 20001451 PARAMETER Experiment Name: At_Far-red-induction_P Parameter: Timepoint (hr) Value: 24
  misc_feature: MA Experiment 20001451 PARAMETER Experiment Name: At_Far-red-induction_P Parameter: Tissue Value: Whole Plant
aggtcgcaacaccgcaatagatcttttccccaagtttcagacaaacataaagcagcagagaaaattttcaagtttcaaagagcttttccctcaccaagcaaaatttggatatttgtcagcaaaatctgcagctaaattgggacttgtcttgttagttcaaagattgaaacttttttggttaattgtttggcggaagaagatttacaatgggagaggagcatccgagaaagcggtctagacaacattttgaagcggaggcgagaaacgtatcgttgtttgaatcccctcaatgcgaaacctccaagtggtatttcagcagggaagagattgagcgtttctctccatccagaaaagatgggattgatcttgtgaaggagtcgtttttacggtcttcgtattgcaccttcctgcaaagacttggcatgaagcttcatgtgtcccaggttacaatatcatgtgcaatggtgatgtgccacaggttttacatgcgccaatctcatgcaaaaaatgactggcagacaatagcgacttccagtctgttcctcgcttgcaaagctgaagatgagccatgtcaactgtccagtgtcgttgtagcgtcttatgaaataatttatgagtgggatccttctgcctcaattagaatccatcaaactgagtgttatcatgaatttaaagaaattattttgtccggggaaagtcttctgctgagcacaagtgctttccatttagacattgaacttccctacaaacctctggctgcggctttgaatagactgaacgcttggcctgaccttgcaacagctgcatggaattttgtgcatgactggattcgaaccacactatgcttgcagtacaaaccccatgttattgcaacagccactgtgcacctagctgctacgtttcagaatgcgaaagtaggcagcaggagagattggtggttggagtttggagttacaactaagctattaaaagaggtaatccaggagatgtgcacactgatagaagtggacagaaggaggaatatgccacctccacctccacctccaagaagagagttaagttgggcaatacctgcagccgtaaagccggtccatatggctagagcttatccgtttcacagctaccctttgcagtcctatagacaggctggcatctggtgagccattgttgagcagcatgaagatgtaatctctcttagagtcttgagttggtttagcaataaaagatttccgtagagactcatgagagaggcagtgtagcattatatagagatccgagtgaggtgcttctgtctaagttaagcgtctcatgtatgaccaaagtggattctctcgagattcttggtctctgttctcgatagagagagattatgtatagaagtgtcccattcacatgttataatactagctgactttatatcgtttgtatatctggaatctatgtttttggtttctttaaaaagtttaaagttgttttgattttgactaattctctcattgttaagtaatttggtttttgatgaagtgc

SEQ ID NO: 101589 - protein, 317 aa, Arabidopsis thaliana; identical to SEQ ID NO: 22591
  peptide (1)..(317): Ceres Seq. ID no. 13608225
  misc_feature (31)..(175): Pfam Name: Cyclin, N-terminal domain Pfam Description: Cyclin, N-terminal domain
  misc_feature (1)..(317): Homolog of NCBI NO: 15217663 NR Description: cyclin family [Arabidopsis thaliana] Contains similarity to gb|AF113001 silencing mediator of retinoic and thyroid hormone receptor alpha and gb|AF109179 cyclin T1 from
  misc_feature (1)..(317): Homolog of NCBI NO: 21618277 NR Description: putative cyclin [Arabidopsis thaliana]
  misc_feature (86)..(317): Homolog of NCBI NO: 6693016 NR Description: T22C5.8 [Arabidopsis thaliana]
  misc_feature (28)..(269): Homolog of NCBI NO: 30694715 NR Description: cyclin family [Arabidopsis thaliana]
  misc_feature (28)..(269): Homolog of NCBI NO: 30684822 NR Description: cyclin family [Arabidopsis thaliana]
  misc_feature (28)..(269): Homolog of NCBI NO: 9759604 NR Description: contains similarity to cyclin~gene_id:K18C1.7
  misc_feature (28)..(269): Homolog of NCBI NO: 7486085 NR Description: hypothetical protein F24J7.161 - Arabidopsis >gi|4582488|emb|CAB40377.1| putative protein [Arabidopsis >gi|7268756|emb|CAB78962.1| putative protein [Arabidopsis
  misc_feature (30)..(268): Homolog of NCBI NO: 15219592 NR Description: cyclin family [Arabidopsis thaliana]
  misc_feature (30)..(258): Homolog of NCBI NO: 15235087 NR Description: cyclin family [Arabidopsis thaliana]
  misc_feature (1)..(77): Homolog of NCBI NO: 25403322 NR Description: protein T22C5.7 [imported] - Arabidopsis thaliana T22C5.7 [Arabidopsis thaliana] >gi|17065458|gb|AAL32883.1| to cyclin T1 [Arabidopsis thaliana] >gi|20148545|gb|AAM10163.1|

SEQ ID NO: 101590 - protein, 245 aa, Arabidopsis thaliana; identical to SEQ ID NO: 22592
  peptide (1)..(245): Ceres Seq. ID no. 13608226
  misc_feature (1)..(103): Pfam Name: Cyclin, N-terminal domain Pfam Description: Cyclin, N-terminal domain
  misc_feature (1)..(245): Homolog of NCBI NO: 15217663 NR Description: cyclin family [Arabidopsis thaliana] Contains similarity to gb|AF113001 silencing mediator of retinoic and thyroid hormone receptor alpha and gb|AF109179 cyclin T1 from
  misc_feature (1)..(245): Homolog of NCBI NO: 21618277 NR Description: putative cyclin [Arabidopsis thaliana]
  misc_feature (14)..(245): Homolog of NCBI NO: 6693016 NR Description: T22C5.8 [Arabidopsis thaliana]
  misc_feature (1)..(197): Homolog of NCBI NO: 30694715 NR Description: cyclin family [Arabidopsis thaliana]
  misc_feature (1)..(197): Homolog of NCBI NO: 30684822 NR Description: cyclin family [Arabidopsis thaliana]
  misc_feature (1)..(197): Homolog of NCBI NO: 9759604 NR Description: contains similarity to cyclin~gene_id:K18C1.7
  misc_feature (1)..(197): Homolog of NCBI NO: 7486085 NR Description: hypothetical protein F24J7.161 - Arabidopsis >gi|4582488|emb|CAB40377.1| putative protein [Arabidopsis >gi|7268756|emb|CAB78962.1| putative protein [Arabidopsis
  misc_feature (1)..(196): Homolog of NCBI NO: 15219592 NR Description: cyclin family [Arabidopsis thaliana]
  misc_feature (1)..(186): Homolog of NCBI NO: 15235087 NR Description: cyclin family [Arabidopsis thaliana]
  misc_feature (1)..(194): Homolog of NCBI NO: 28278709 NR Description: similar to cyclin T1 [Danio rerio]

SEQ ID NO: 101591 - protein, 232 aa, Arabidopsis thaliana; identical to SEQ ID NO: 22593
  peptide (1)..(232): Ceres Seq. ID no. 13608227
  misc_feature (1)..(90): Pfam Name: Cyclin, N-terminal domain Pfam Description: Cyclin, N-terminal domain
  misc_feature (1)..(232): Homolog of NCBI NO: 15217663 NR Description: cyclin family [Arabidopsis thaliana] Contains similarity to gb|AF113001 silencing mediator of retinoic and thyroid hormone receptor alpha and gb|AF109179 cyclin T1 from
  misc_feature (1)..(232): Homolog of NCBI NO: 21618277 NR Description: putative cyclin [Arabidopsis thaliana]
  misc_feature (1)..(232): Homolog of NCBI NO: 6693016 NR Description: T22C5.8 [Arabidopsis thaliana]
  misc_feature (1)..(184): Homolog of NCBI NO: 30694715 NR Description: cyclin family [Arabidopsis thaliana]
  misc_feature (1)..(184): Homolog of NCBI NO: 30684822 NR Description: cyclin family [Arabidopsis thaliana]
  misc_feature (1)..(184): Homolog of NCBI NO: 9759604 NR Description: contains similarity to cyclin~gene_id:K18C1.7
  misc_feature (1)..(184): Homolog of NCBI NO: 7486085 NR Description: hypothetical protein F24J7.161 - Arabidopsis >gi|4582488|emb|CAB40377.1| putative protein [Arabidopsis >gi|7268756|emb|CAB78962.1| putative protein [Arabidopsis
  misc_feature (1)..(183): Homolog of NCBI NO: 15219592 NR Description: cyclin family [Arabidopsis thaliana]
  misc_feature (1)..(173): Homolog of NCBI NO: 15235087 NR Description: cyclin family [Arabidopsis thaliana]
  misc_feature (1)..(181): Homolog of NCBI NO: 28278709 NR Description: similar to cyclin T1 [Danio rerio]

SEQ ID NO: 101592 - DNA, 717 bp, Arabidopsis thaliana
  misc_feature (1)..(717): Ceres Seq. ID no. 13608228
  misc_feature: MA Experiment ID: 108462 Result: Down-regulated in Transcription
  misc_feature: MA Experiment 108462 PARAMETER Experiment Name: At_Germinating_Seeds_cDNA_P Parameter: Age (day) Value: 2 vs. 0
  misc_feature: MA Experiment 108462 PARAMETER Experiment Name: At_Germinating_Seeds_cDNA_P Parameter: Tissue Value: Germinating Seeds
  misc_feature: MA Experiment ID: 108463 Result: Down-regulated in Transcription
  misc_feature: MA Experiment 108463 PARAMETER Experiment Name: At_Germinating_Seeds_cDNA_P Parameter: Age (day) Value: 3 vs. 0
  misc_feature: MA Experiment 108463 PARAMETER Experiment Name: At_Germinating_Seeds_cDNA_P Parameter: Tissue Value: Germinating Seeds
  misc_feature: MA Experiment ID: 108464 Result: Down-regulated in Transcription
  misc_feature: MA Experiment 108464 PARAMETER Experiment Name: At_Germinating_Seeds_cDNA_P Parameter: Age (day) Value: 4 vs. 0
  misc_feature: MA Experiment 108464 PARAMETER Experiment Name: At_Germinating_Seeds_cDNA_P Parameter: Tissue Value: Germinating Seeds
  misc_feature: MA Experiment ID: 20000113 Result: Up-regulated in Transcription
  misc_feature: MA Experiment 20000113 PARAMETER Experiment Name: At_42deg_Heat_cDNA_P Parameter: Temperature (deg C) Value: 42 vs. 22
  misc_feature: MA Experiment 20000113 PARAMETER Experiment Name: At_42deg_Heat_cDNA_P Parameter: Timepoint (hr) Value: 8
  misc_feature: MA Experiment 20000113 PARAMETER Experiment Name: At_42deg_Heat_cDNA_P Parameter: Tissue Value: Aerial
  misc_feature: MA Experiment ID: 20000224 Result: Down-regulated in Transcription
aaacaacaggtcagagaataaatagaaaaaccaaaaccctttagcgtctcccaaatcctctcaatcctctgctgctcaatctctcatcatcggcatcgctctctctaaaaatgtctcagatggatcccgacgctgtatctaaggccttcgtcgaacattactattccaccttcgacaccaaccgtgtcggtctcgctggtctctatcaggaagcttctatgctcaccttcgaaggtcaaaagatccaaggagtccagagcatcgtcgctaagctcacctctcttcctttccagcagtgcaagcatcacatctccaccgttgattgtcagccttctggtcctgcttccggtatgctcgttttcgtctccggtaatctccagctcgccggagaagaacacgctctcaagttcagccagatgtttcatttgatgccgacgccacaaggaagcttttacgtgttcaacgatatattcaggttgaactatgcctgaacagaaatcagattgttgttagcatacatcattgttgcatttctatactatttgagcaaatccttctatcaatttttctcgtctttttcttgttattcccagatgatttaccttgggaacagaggaatattgtctctcatcatgtatttggtttggattgtttgttcatttgtcattacaatctattgactttataagacaatttgaatggtcatttggctcttgt

SEQ ID NO: 101593 - protein, 126 aa, Arabidopsis thaliana; identical to SEQ ID NO: 36334
  peptide (1)..(126): Ceres Seq. ID no. 13608229
  misc_feature (9)..(123): Pfam Name: Nuclear transport factor 2 (NTF2) domain Pfam Description: Nuclear transport factor 2 (NTF2) domain
  misc_feature (1)..(126): Homolog of NCBI NO: 15217779 NR Description: nuclear transport factor 2 -related [Arabidopsis
  misc_feature (4)..(126): Homolog of NCBI NO: 21555203 NR Description: nuclear transport factor 2, putative [Arabidopsis
  misc_feature (4)..(126): Homolog of NCBI NO: 15223491 NR Description: nuclear transport factor -related [Arabidopsis
  misc_feature (4)..(125): Homolog of NCBI NO: 15214179 NR Description: Nuclear transport factor 2 (NTF-2)
  misc_feature (7)..(125): Homolog of NCBI NO: 34908774 NR Description: putative Nuclear transport factor 2 [Oryza sativa
  misc_feature (7)..(126): Homolog of NCBI NO: 25402667 NR Description: protein T23J18.22 [imported] - Arabidopsis >gi|6554189|gb|AAF16635.1|AC011661_13 T23J18.22 [Arabidopsis
  misc_feature (5)..(125): Homolog of NCBI NO: 14700035 NR Description: nuclear transport factor 2 [Aspergillus nidulans]
  misc_feature (5)..(125): Homolog of NCBI NO: 19114665 NR Description: nuclear transport factor, NTF2 homolog pombe] >gi|19862916|sp|Q10100|NTF2_SCHPO Probable nuclear
  misc_feature (4)..(126): Homolog of NCBI NO: 15214172 NR Description: Nuclear transport factor 2 (NTF-2)
  misc_feature (4)..(126): Homolog of NCBI NO: 6320846 NR Description: May coordinate the Ran-dependent (GSP1/GSP2) and disassociation reactions of nuclear import; human homolog yeast mutants; Ntf2p [Saccharomyces cerevisiae] (Nuclear

SEQ ID NO: 101594 - protein, 123 aa, Arabidopsis thaliana; identical to SEQ ID NO: 36335
  peptide (1)..(123): Ceres Seq. ID no. 13608230
  misc_feature (6)..(120): Pfam Name: Nuclear transport factor 2 (NTF2) domain Pfam Description: Nuclear transport factor 2 (NTF2) domain
  misc_feature (1)..(123): Homolog of NCBI NO: 15217779 NR Description: nuclear transport factor 2 -related [Arabidopsis
  misc_feature (1)..(123): Homolog of NCBI NO: 21555203 NR Description: nuclear transport factor 2, putative [Arabidopsis
  misc_feature (1)..(123): Homolog of NCBI NO: 15223491 NR Description: nuclear transport factor -related [Arabidopsis
  misc_feature (1)..(122): Homolog of NCBI NO: 15214179 NR Description: Nuclear transport factor 2 (NTF-2)
  misc_feature (4)..(122): Homolog of NCBI NO: 34908774 NR Description: putative Nuclear transport factor 2 [Oryza sativa
  misc_feature (4)..(123): Homolog of NCBI NO: 25402667 NR Description: protein T23J18.22 [imported] - Arabidopsis >gi|6554189|gb|AAF16635.1|AC011661_13 T23J18.22 [Arabidopsis
  misc_feature (2)..(122): Homolog of NCBI NO: 14700035 NR Description: nuclear transport factor 2 [Aspergillus nidulans]
  misc_feature (2)..(122): Homolog of NCBI NO: 19114665 NR Description: nuclear transport factor, NTF2 homolog pombe] >gi|19862916|sp|Q10100|NTF2_SCHPO Probable nuclear
  misc_feature (1)..(123): Homolog of NCBI NO: 15214172 NR Description: Nuclear transport factor 2 (NTF-2)
  misc_feature (1)..(123): Homolog of NCBI NO: 6320846 NR Description: May coordinate the Ran-dependent (GSP1/GSP2) and disassociation reactions of nuclear import; human homolog yeast mutants; Ntf2p [Saccharomyces cerevisiae] (Nuclear

SEQ ID NO: 101595 - protein, 90 aa, Arabidopsis thaliana; identical to SEQ ID NO: 36336
  peptide (1)..(90): Ceres Seq. ID no. 13608231
  misc_feature (1)..(87): Pfam Name: Nuclear transport factor 2 (NTF2) domain Pfam Description: Nuclear transport factor 2 (NTF2) domain
  misc_feature (1)..(90): Homolog of NCBI NO: 15217779 NR Description: nuclear transport factor 2 -related [Arabidopsis
  misc_feature (1)..(90): Homolog of NCBI NO: 21555203 NR Description: nuclear transport factor 2, putative [Arabidopsis
  misc_feature (1)..(90): Homolog of NCBI NO: 15223491 NR Description: nuclear transport factor -related [Arabidopsis
  misc_feature (1)..(89): Homolog of NCBI NO: 15214179 NR Description: Nuclear transport factor 2 (NTF-2)
  misc_feature (1)..(89): Homolog of NCBI NO: 34908774 NR Description: putative Nuclear transport factor 2 [Oryza sativa
  misc_feature (1)..(90): Homolog of NCBI NO: 25402667 NR Description: protein T23J18.22 [imported] - Arabidopsis >gi|6554189|gb|AAF16635.1|AC011661_13 T23J18.22 [Arabidopsis
  misc_feature (1)..(89): Homolog of NCBI NO: 14700035 NR Description: nuclear transport factor 2 [Aspergillus nidulans]
  misc_feature (1)..(89): Homolog of NCBI NO: 19114665 NR Description: nuclear transport factor, NTF2 homolog pombe] >gi|19862916|sp|Q10100|NTF2_SCHPO Probable nuclear
  misc_feature (1)..(90): Homolog of NCBI NO: 15214172 NR Description: Nuclear transport factor 2 (NTF-2)
  misc_feature (1)..(90): Homolog of NCBI NO: 6320846 NR Description: May coordinate the Ran-dependent (GSP1/GSP2) and disassociation reactions of nuclear import; human homolog yeast mutants; Ntf2p [Saccharomyces cerevisiae] (Nuclear

SEQ ID NO: 101596 - DNA, 1819 bp, Arabidopsis thaliana
  misc_feature (1)..(1819): Ceres Seq. ID no. 13608236
  misc_feature: MA Experiment ID: 108434 Result: Down-regulated in Transcription
  misc_feature: MA Experiment 108434 PARAMETER Experiment Name: At_Root_Tips_cDNA_P Parameter: Tissue Value: Root Tips
  misc_feature: MA Experiment ID: 108461 Result: Down-regulated in Transcription
  misc_feature: MA Experiment 108461 PARAMETER Experiment Name: At_Germinating_Seeds_cDNA_P Parameter: Age (day) Value: 1 vs. 0
  misc_feature: MA Experiment 108461 PARAMETER Experiment Name: At_Germinating_Seeds_cDNA_P Parameter: Tissue Value: Germinating Seeds
  misc_feature: MA Experiment ID: 108501 Result: Down-regulated in Transcription
  misc_feature: MA Experiment 108501 PARAMETER Experiment Name: At_ap2_floral_buds_cDNA_P Parameter: Plant Line Value: ap2 (Ler.)
  misc_feature: MA Experiment 108501 PARAMETER Experiment Name: At_ap2_floral_buds_cDNA_P Parameter: Tissue Value: Closed Flower
  misc_feature: MA Experiment ID: 108668 Result: Up-regulated in Transcription
  misc_feature: MA Experiment 108668 PARAMETER Experiment Name: At_2mM_SA_cDNA_P Parameter: Plant Line Value: WS
  misc_feature: MA Experiment 108668 PARAMETER Experiment Name: At_2mM_SA_cDNA_P Parameter: Timepoint (hr) Value: 6
  misc_feature: MA Experiment 108668 PARAMETER Experiment Name: At_2mM_SA_cDNA_P Parameter: Treatment Value: 2mM SA vs. No Treatment
  misc_feature: MA Experiment ID: 20000087 Result: Up-regulated in Transcription
  misc_feature: MA Experiment 20000087 PARAMETER Experiment Name: At_100uM_ABA_Mutants_cDNA_P Parameter: Plant Line Value: WS
  misc_feature: MA Experiment 20000087 PARAMETER Experiment Name: At_100uM_ABA_Mutants_cDNA_P Parameter: Timepoint (hr) Value: 6
  misc_feature: MA Experiment 20000087 PARAMETER Experiment Name: At_100uM_ABA_Mutants_cDNA_P Parameter: Tissue Value: Aerial
  misc_feature: MA Experiment 20000087 PARAMETER Experiment Name: At_100uM_ABA_Mutants_cDNA_P Parameter: Treatment Value: 100uM ABA vs. No Treatment
  misc_feature: MA Experiment ID: 20000117 Result: Up-regulated in Transcription
  misc_feature: MA Experiment 20000117 PARAMETER Experiment Name: At_100uM_ABA_Mutants_cDNA_P Parameter: Plant Line Value: Columbia
  misc_feature: MA Experiment 20000117 PARAMETER Experiment Name: At_100uM_ABA_Mutants_cDNA_P Parameter: Timepoint (hr) Value: 6
  misc_feature: MA Experiment 20000117 PARAMETER Experiment Name: At_100uM_ABA_Mutants_cDNA_P Parameter: Tissue Value: Aerial
  misc_feature: MA Experiment 20000117 PARAMETER Experiment Name: At_100uM_ABA_Mutants_cDNA_P Parameter: Treatment Value: 100uM ABA vs. No Treatment
  misc_feature: MA Experiment ID: 20000173 Result: Down-regulated in Transcription
  misc_feature: MA Experiment 20000173 PARAMETER Experiment Name: At_42deg_Heat_P Parameter: Age (day) Value: 14
  misc_feature: MA Experiment 20000173 PARAMETER Experiment Name: At_42deg_Heat_P Parameter: Organism Value: A. thaliana
  misc_feature: MA Experiment 20000173 PARAMETER Experiment Name: At_42deg_Heat_P Parameter: Plant Line Value: WS
  misc_feature: MA Experiment 20000173 PARAMETER Experiment Name: At_42deg_Heat_P Parameter: Temperature (deg C) Value: 42 vs. 22
  misc_feature: MA Experiment 20000173 PARAMETER Experiment Name: At_42deg_Heat_P Parameter: Timepoint (hr) Value: 6
  misc_feature: MA Experiment 20000173 PARAMETER Experiment Name: At_42deg_Heat_P Parameter: Tissue Value: Aerial
  misc_feature: MA Experiment ID: 20000182 Result: Up-regulated in Transcription
  misc_feature: MA Experiment 20000182 PARAMETER Experiment Name: At_2mM_SA_P Parameter: Age (day) Value: 14
  misc_feature: MA Experiment 20000182 PARAMETER Experiment Name: At_2mM_SA_P Parameter: Organism Value: A. thaliana
  misc_feature: MA Experiment 20000182 PARAMETER Experiment Name: At_2mM_SA_P Parameter: Plant Line Value: WS
  misc_feature: MA Experiment 20000182 PARAMETER Experiment Name: At_2mM_SA_P Parameter: Timepoint (hr) Value: 6
  misc_feature: MA Experiment 20000182 PARAMETER Experiment Name: At_2mM_SA_P Parameter: Tissue Value: Aerial
  misc_feature: MA Experiment 20000182 PARAMETER Experiment Name: At_2mM_SA_P Parameter: Treatment Value: 2mM SA vs. No Treatment
  misc_feature: MA Experiment ID: 20000184 Result: Down-regulated in Transcription
  misc_feature: MA Experiment 20000184 PARAMETER Experiment Name: At_Shoots__P Parameter: Age (day) Value: 7
  misc_feature: MA Experiment 20000184 PARAMETER Experiment Name: At_Shoots__P Parameter: Tissue Value: Shoots vs. Whole Plant
  misc_feature: MA Experiment ID: 20000573 Result: Up-regulated in Transcription
  misc_feature: MA Experiment 20000573 PARAMETER Experiment Name: At_100uM_ABA_Mutants__P Parameter: Organism Value: A. thaliana
  misc_feature: MA Experiment 20000573 PARAMETER Experiment Name: At_100uM_ABA_Mutants__P Parameter: Plant Line Value: CS22 vs. Ler wt
  misc_feature: MA Experiment 20000573 PARAMETER Experiment Name: At_100uM_ABA_Mutants__P Parameter: Timepoint (hr) Value: N/A
  misc_feature: MA Experiment 20000573 PARAMETER Experiment Name: At_100uM_ABA_Mutants__P Parameter: Tissue Value: Whole Plant
  misc_feature: MA Experiment 20000573 PARAMETER Experiment Name: At_100uM_ABA_Mutants__P Parameter: Treatment Value: None
  misc_feature: MA Experiment ID: 20000574 Result: Up-regulated in Transcription
  misc_feature: MA Experiment 20000574 PARAMETER Experiment Name: At_100uM_ABA_Mutants__P Parameter: Organism Value: A. thaliana
  misc_feature: MA Experiment 20000574 PARAMETER Experiment Name: At_100uM_ABA_Mutants__P Parameter: Plant Line Value: CS23 vs. Ler wt
  misc_feature: MA Experiment 20000574 PARAMETER Experiment Name: At_100uM_ABA_Mutants__P Parameter: Timepoint (hr) Value: N/A
  misc_feature: MA Experiment 20000574 PARAMETER Experiment Name: At_100uM_ABA_Mutants__P Parameter: Tissue Value: Whole Plant
  misc_feature: MA Experiment 20000574 PARAMETER Experiment Name: At_100uM_ABA_Mutants__P Parameter: Treatment Value: None
  misc_feature: MA Experiment ID: 20000794 Result: Up-regulated in Transcription
  misc_feature: MA Experiment 20000794 PARAMETER Experiment Name: At_Petals_P Parameter: Age (day) Value: 23-25 days
  misc_feature: MA Experiment 20000794 PARAMETER Experiment Name: At_Petals_P Parameter: Plant Line Value: WS
  misc_feature: MA Experiment 20000794 PARAMETER Experiment Name: At_Petals_P Parameter: Tissue Value: Petals vs. Whole plant
  misc_feature: MA Experiment ID: 20001248 Result: Up-regulated in Transcription
  misc_feature: MA Experiment 20001248 PARAMETER Experiment Name: At_Far-red-induction_P Parameter: Age (day) Value: 7
  misc_feature: MA Experiment 20001248 PARAMETER Experiment Name: At_Far-red-induction_P Parameter: Light Value: Far-red vs. White
  misc_feature: MA Experiment 20001248 PARAMETER Experiment Name: At_Far-red-induction_P Parameter: Organism Value: A. thaliana
  misc_feature: MA Experiment 20001248 PARAMETER Experiment Name: At_Far-red-induction_P Parameter: Plant Line Value: Columbia
  misc_feature: MA Experiment 20001248 PARAMETER Experiment Name: At_Far-red-induction_P Parameter: Timepoint (hr) Value: 4
  misc_feature: MA Experiment 20001248 PARAMETER Experiment Name: At_Far-red-induction_P Parameter: Tissue Value: Whole Plant
  misc_feature: MA Experiment ID: 20001450 Result: Up-regulated in Transcription
  misc_feature: MA Experiment 20001450 PARAMETER Experiment Name: At_Far-red-induction_P Parameter: Age (day) Value: 7
  misc_feature: MA Experiment 20001450 PARAMETER Experiment Name: At_Far-red-induction_P Parameter: Light Value: Far-red vs. White
  misc_feature: MA Experiment 20001450 PARAMETER Experiment Name: At_Far-red-induction_P Parameter: Organism Value: A. thaliana
  misc_feature: MA Experiment 20001450 PARAMETER Experiment Name: At_Far-red-induction_P Parameter: Plant Line Value: Columbia
  misc_feature: MA Experiment 20001450 PARAMETER Experiment Name: At_Far-red-induction_P Parameter: Timepoint (hr) Value: 8
  misc_feature: MA Experiment 20001450 PARAMETER Experiment Name: At_Far-red-induction_P Parameter: Tissue Value: Whole Plant
  misc_feature: MA Experiment ID: 20001905 Result: Up-regulated in Transcription
  misc_feature: MA Experiment 20001905 PARAMETER Experiment Name: At_Drought_Reproduction_P Parameter: Age (day) Value: 40
  misc_feature: MA Experiment 20001905 PARAMETER Experiment Name: At_Drought_Reproduction_P Parameter: Organism Value: A. thaliana
  misc_feature: MA Experiment 20001905 PARAMETER Experiment Name: At_Drought_Reproduction_P Parameter: Plant Line Value: WS
  misc_feature: MA Experiment 20001905 PARAMETER Experiment Name: At_Drought_Reproduction_P Parameter: Timepoint (day) Value: 10
  misc_feature: MA Experiment 20001905 PARAMETER Experiment Name: At_Drought_Reproduction_P Parameter: Tissue Value: Rosettes
  misc_feature: MA Experiment 20001905 PARAMETER Experiment Name: At_Drought_Reproduction_P Parameter: Treatment Value: Drought vs. No Drought
  misc_feature: MA Experiment ID: 20001908 Result: Up-regulated in Transcription
  misc_feature: MA Experiment 20001908 PARAMETER Experiment Name: At_Drought_Reproduction_P Parameter: Age (day) Value: 40
  misc_feature: MA Experiment 20001908 PARAMETER Experiment Name: At_Drought_Reproduction_P Parameter: Organism Value: A. thaliana
  misc_feature: MA Experiment 20001908 PARAMETER Experiment Name: At_Drought_Reproduction_P Parameter: Plant Line Value: WS
  misc_feature: MA Experiment 20001908 PARAMETER Experiment Name: At_Drought_Reproduction_P Parameter: Timepoint (day) Value: 10
  misc_feature: MA Experiment 20001908 PARAMETER Experiment Name: At_Drought_Reproduction_P Parameter: Tissue Value: Siliques
  misc_feature: MA Experiment 20001908 PARAMETER Experiment Name: At_Drought_Reproduction_P Parameter: Treatment Value: Drought vs. No Drought
  misc_feature: MA Experiment ID: 20001911 Result: Up-regulated in Transcription
  misc_feature: MA Experiment 20001911 PARAMETER Experiment Name: At_Drought_Reproduction_P Parameter: Age (day) Value: 40
  misc_feature: MA Experiment 20001911 PARAMETER Experiment Name: At_Drought_Reproduction_P Parameter: Organism Value: A. thaliana
  misc_feature: MA Experiment 20001911 PARAMETER Experiment Name: At_Drought_Reproduction_P Parameter: Plant Line Value: WS
  misc_feature: MA Experiment 20001911 PARAMETER Experiment Name: At_Drought_Reproduction_P Parameter: Timepoint (day) Value: 10
  misc_feature: MA Experiment 20001911 PARAMETER Experiment Name: At_Drought_Reproduction_P Parameter: Tissue Value: Flowers
  misc_feature: MA Experiment 20001911 PARAMETER Experiment Name: At_Drought_Reproduction_P Parameter: Treatment Value: Drought vs. No Drought
gtcccaaacgattcacttttctcaccatctcaatctccagaccaaaagaaacaaaaaatggattctttttcatattcttcgatgaaatccatgttgattcaagctcgtggctcgttgaactcgcgtttgtcggagtttgagccactggttctgctattggttccgcttgtctctctgtttctcgctcagattatcggatctgtgtttggcgttgttcacgagaaaggcctcaaagcttgtcttattgggtttatcatgggactcctcaaaatgattcctggagttcagaattacattgatgctgagaaacaaaaggttgttgaccaattacaatctggtagcagctctaagaaaaagaataagactgaagtattgccagtaaaaggtctaggagttgaagttttagagaaaatggagaatgagaagaggaatgatgctatttggcaaggaaaatgctctggcactgtatacataggtggagccgagtctgaaggacatttttcattgataaatcaagcatgttcaatgtttgcgcataccaatccgttgcatatagacgtattccagagtgtggtgcggtttgagtcagaagtagtcgcaatgactgctgcgttacttgggagtaaagaaacggcgtcaggaggtcaaatatgcggaaacatgacgtctggaggaacagaaagtatagtgttggctgtgaagtcatctcgtgactatatgaagtacaagaagggaatcacacggccagaaatgattatacctgagtcgggtcattcggcttatgataaggcggcccagtattttaaaatcaagttgtggcgagttccagttgacaaagacttccgagctgatgtgaaggcaacaaggcggcatattaacagaaacaccatcatgattgttggatcagcaccaggattccctcatggcatcattgatcctatcgaggagcttggtcaactggctcttagctatggaatatgctttcatgttgacctttgccttggtggttttgtgttacctttcgctcgtaaacttgggtaccagatcccaccttttgatttttctgtacaaggagttacttcaatttctgtggacgtgcataaatatggtttggctcctaaaggaactagtacagttctatatagaaatcatgagatcagaaagcaccaatttgttgctgtaactgaatggtcaggaggtctatacgtgtctccaactatcgctgggagtaggcctgggtctttggtagccggtgcttgggctgcaatgatgtcgctcggcgaagaaggttacctacaaaacacaagtaagataatggaagcatcaaagagactagaagaaggagtaagagaaatccatgaactattcgtcattggaaagccagatatgacaatcgtggcttttggttctaaagcattggatatatttgaagttaatgacatcatgtcttctaaaggttggcatttgaatgcactacagagacccaacagcattcatatatgtattactcttcaacacgtccctgtagtcgatgacttccttcgggatctgcgtgaagctgtggaaactgtaaaagcaaacccaggaccgatcacgggaggcttggctccaatatatggagcagcagggaagatgccagaccgaggcatggtgaatgagcttctggttagtttcatggacagtcaatattaagtttcttgaaggttaaagcatctagtgggtaaattgatatcacatttcagttggagaagcaaaactttgtatattcacaaccacattgtttcgtttgccctactaataaaatttcattacaatcttc

SEQ ID NO: 101597 - protein, 563 aa, Arabidopsis thaliana; identical to SEQ ID NO: 26047
  peptide (1)..(563): Ceres Seq. ID no. 13608237
  misc_feature (165)..(471): Pfam Name: Pyridoxal-dependent decarboxylase conserved domain Pfam Description: Pyridoxal-dependent decarboxylase conserved
  misc_feature (20)..(563): Homolog of NCBI NO: 15217780 NR Description: sphingosine-1-phosphate lyase -related
  misc_feature (33)..(394): Homolog of NCBI NO: 34893998 NR Description: putative sphingosine-1-phosphate lyase [Oryza
  misc_feature (391)..(561): Homolog of NCBI NO: 34893998 NR Description: putative sphingosine-1-phosphate lyase [Oryza
  misc_feature (40)..(560): Homolog of NCBI NO: 30908928 NR Description: sphingosine-1-phosphate lyase [Dictyostelium
  misc_feature (34)..(563): Homolog of NCBI NO: 10129683 NR Description: sphingosine-1-phosphate lyase [Homo sapiens]
  misc_feature (34)..(563): Homolog of NCBI NO: 27465561 NR Description: sphingosine-1-phosphate lyase 1 [Rattus
  misc_feature (34)..(563): Homolog of NCBI NO: 6330874 NR Description: KIAA1252 protein [Homo sapiens]
  misc_feature (34)..(563): Homolog of NCBI NO: 31982936 NR Description: sphingosine-1-phosphate lyase 1;
  misc_feature (28)..(563): Homolog of NCBI NO: 31543694 NR Description: sphingosine phosphate lyase 1 [Mus musculus] sphingosine phosphate lyase 1 [Mus musculus] unnamed protein product [Mus musculus]
  misc_feature (28)..(563): Homolog of NCBI NO: 26335473 NR Description: unnamed protein product [Mus musculus]

SEQ ID NO: 101598 - protein, 544 aa, Arabidopsis thaliana; identical to SEQ ID NO: 26048
  peptide (1)..(544): Ceres Seq. ID no. 13608238
  misc_feature (146)..(452): Pfam Name: Pyridoxal-dependent decarboxylase conserved domain Pfam Description: Pyridoxal-dependent decarboxylase conserved
  misc_feature (1)..(544): Homolog of NCBI NO: 15217780 NR Description: sphingosine-1-phosphate lyase -related
  misc_feature (14)..(375): Homolog of NCBI NO: 34893998 NR Description: putative sphingosine-1-phosphate lyase [Oryza
  misc_feature (372)..(542): Homolog of NCBI NO: 34893998 NR Description: putative sphingosine-1-phosphate lyase [Oryza
  misc_feature (21)..(541): Homolog of NCBI NO: 30908928 NR Description: sphingosine-1-phosphate lyase [Dictyostelium
  misc_feature (15)..(544): Homolog of NCBI NO: 10129683 NR Description: sphingosine-1-phosphate lyase [Homo sapiens]
  misc_feature (15)..(544): Homolog of NCBI NO: 27465561 NR Description: sphingosine-1-phosphate lyase 1 [Rattus
  misc_feature (15)..(544): Homolog of NCBI NO: 6330874 NR Description: KIAA1252 protein [Homo sapiens]
  misc_feature (15)..(544): Homolog of NCBI NO: 31982936 NR Description: sphingosine-1-phosphate lyase 1;
  misc_feature (9)..(544): Homolog of NCBI NO: 31543694 NR Description: sphingosine phosphate lyase 1 [Mus musculus] sphingosine phosphate lyase 1 [Mus musculus] unnamed protein product [Mus musculus]
  misc_feature (9)..(544): Homolog of NCBI NO: 26335473 NR Description: unnamed protein product [Mus musculus]

SEQ ID NO: 101599 - protein, 536 aa, Arabidopsis thaliana; identical to SEQ ID NO: 26049
  peptide (1)..(536): Ceres Seq. ID no. 13608239
  misc_feature (138)..(444): Pfam Name: Pyridoxal-dependent decarboxylase conserved domain Pfam Description: Pyridoxal-dependent decarboxylase conserved
  misc_feature (1)..(536): Homolog of NCBI NO: 15217780 NR Description: sphingosine-1-phosphate lyase -related
  misc_feature (6)..(367): Homolog of NCBI NO: 34893998 NR Description: putative sphingosine-1-phosphate lyase [Oryza
  misc_feature (364)..(534): Homolog of NCBI NO: 34893998 NR Description: putative sphingosine-1-phosphate lyase [Oryza
  misc_feature (13)..(533): Homolog of NCBI NO: 30908928 NR Description: sphingosine-1-phosphate lyase [Dictyostelium
  misc_feature (7)..(536): Homolog of NCBI NO: 10129683 NR Description: sphingosine-1-phosphate lyase [Homo sapiens]
  misc_feature (7)..(536): Homolog of NCBI NO: 27465561 NR Description: sphingosine-1-phosphate lyase 1 [Rattus
  misc_feature (7)..(536): Homolog of NCBI NO: 6330874 NR Description: KIAA1252 protein [Homo sapiens]
  misc_feature (7)..(536): Homolog of NCBI NO: 31982936 NR Description: sphingosine-1-phosphate lyase 1;
  misc_feature (1)..(536): Homolog of NCBI NO: 31543694 NR Description: sphingosine phosphate lyase 1 [Mus musculus] sphingosine phosphate lyase 1 [Mus musculus] unnamed protein product [Mus musculus]
  misc_feature (1)..(536): Homolog of NCBI NO: 26335473 NR Description: unnamed protein product [Mus musculus]

SEQ ID NO: 101600 - DNA, 1019 bp, Arabidopsis thaliana
  misc_feature (1)..(1019): Ceres Seq. ID no. 13608248
  misc_feature: MA Experiment ID: 108434 Result: Up-regulated in Transcription
  misc_feature: MA Experiment 108434 PARAMETER Experiment Name: At_Root_Tips_cDNA_P Parameter: Tissue Value: Root Tips
  misc_feature: MA Experiment ID: 108462 Result: Down-regulated in Transcription
  misc_feature: MA Experiment 108462 PARAMETER Experiment Name: At_Germinating_Seeds_cDNA_P Parameter: Age (day) Value: 2 vs. 0
  misc_feature: MA Experiment 108462 PARAMETER Experiment Name: At_Germinating_Seeds_cDNA_P Parameter: Tissue Value: Germinating Seeds
  misc_feature: MA Experiment ID: 108463 Result: Down-regulated in Transcription
  misc_feature: MA Experiment 108463 PARAMETER Experiment Name: At_Germinating_Seeds_cDNA_P Parameter: Age (day) Value: 3 vs. 0
  misc_feature: MA Experiment 108463 PARAMETER Experiment Name: At_Germinating_Seeds_cDNA_P Parameter: Tissue Value: Germinating Seeds
  misc_feature: MA Experiment ID: 108464 Result: Down-regulated in Transcription
  misc_feature: MA Experiment 108464 PARAMETER Experiment Name: At_Germinating_Seeds_cDNA_P Parameter: Age (day) Value: 4 vs. 0
  misc_feature: MA Experiment 108464 PARAMETER Experiment Name: At_Germinating_Seeds_cDNA_P Parameter: Tissue Value: Germinating Seeds
  misc_feature: MA Experiment ID: 108573 Result: Down-regulated in Transcription
  misc_feature: MA Experiment 108573 PARAMETER Experiment Name: At_Drought_cDNA_P Parameter: Timepoint (hr) Value: 6
  misc_feature: MA Experiment 108573 PARAMETER Experiment Name: At_Drought_cDNA_P Parameter: Tissue Value: Aerial
  misc_feature: MA Experiment 108573 PARAMETER Experiment Name: At_Drought_cDNA_P Parameter: Treatment Value: Drought vs. No Drought
  misc_feature: MA Experiment ID: 108595 Result: Down-regulated in Transcription
  misc_feature: MA Experiment 108595 PARAMETER Experiment Name: At_Ler-pi_Ovule_cDNA_P Parameter: Plant Line Value: null
  misc_feature: MA Experiment ID: 20000224 Result: Up-regulated in Transcription
  misc_feature: MA Experiment ID: 20000437 Result: Down-regulated in Transcription
  misc_feature: MA Experiment 20000437 PARAMETER Experiment Name: At_Drought_P Parameter: Age (day) Value: 8
  misc_feature: MA Experiment 20000437 PARAMETER Experiment Name: At_Drought_P Parameter: Organism Value: A. thaliana
  misc_feature: MA Experiment 20000437 PARAMETER Experiment Name: At_Drought_P Parameter: Plant Line Value: WS
  misc_feature: MA Experiment 20000437 PARAMETER Experiment Name: At_Drought_P Parameter: Timepoint (hr) Value: 24
  misc_feature: MA Experiment 20000437 PARAMETER Experiment Name: At_Drought_P Parameter: Tissue Value: Whole Plant
  misc_feature: MA Experiment 20000437 PARAMETER Experiment Name: At_Drought_P Parameter: Treatment Value: Drought vs. No Drought
cctcttcaccaatcggatccacgaaaaattcgataaacctcgattgatcccaaattcccaatggaggtttctgttctcacctaatttagctccatatccctcgcagtccgattcaagtgagattcttctaagttttttggaagaataatggtgttgccgttgatgaaactgggcacactcgccgtcaaaaccataagtaaaccattggctagtcagctcaagcaccaagctaaggttcatcccaagtttcgtcaatctatcatcaacttcgctcagaggaatcatcgaatcactacgcaaatgcaaagaaggatatatggtcatgccactgatgtagagattcgtcccttagatgaggaaaaggctgttcaagctgctgttgacctcattggagagatctttctctttggggtcggtggagctgttgttgtttttgaggtgcagagaagttcgcggtcagaagcaagaaaagaggaagcacgtaagcaagaactagaggagttgagaataaaagatgaagaactagaaaagcaagtggcagatctcaagagcaagctagaggagcttgaacaacttgctaaggcacgaggactgagcggtattttccagttaaaaccacagcctggtactaccgctagtgggaaaccagacaaatccagttgaatcatcatcatcatcatcttattcaatctagaagattcaaaccaaagttaacaatacggtaatgattctttttcacaagagttgaggagtttctgattctctcctctatatacatgtaccatccatcatcaaaaacaatctgcttttaaattatcaaattaggtgacaaataaaaaaagttttgatgttgaggttttgtcttttcaacatttgttgcttagatttggtcttttgagaccaatggctcgattttaggtaatgttggataatgacgaattcattatgaaagagacattgagatgtaccaaattacttctttctccagattacaaaatgtacatcatatttatccatga

SEQ ID NO: 101601 - protein, 171 aa, Arabidopsis thaliana; identical to SEQ ID NO: 30222
  peptide (1)..(171): Ceres Seq. ID no. 13608249
  misc_feature (1)..(171): Homolog of NCBI NO: 18396819 NR Description: expressed protein [Arabidopsis thaliana] F3M18.5 [Arabidopsis thaliana] At1g28510/F3M18_5 [Arabidopsis thaliana]
  misc_feature (1)..(164): Homolog of NCBI NO: 34904528 NR Description: B1066G12.9 [Oryza sativa (japonica
  misc_feature (1)..(145): Homolog of NCBI NO: 15230967 NR Description: hypothetical protein [Arabidopsis thaliana]
  misc_feature (6)..(141): Homolog of NCBI NO: 19112998 NR Description: hypothetical coiled-coil protein
  misc_feature (1)..(143): Homolog of NCBI NO: 31242605 NR Description: ENSANGP00000017479 [Anopheles gambiae]
  misc_feature (1)..(159): Homolog of NCBI NO: 24649440 NR Description: CG13601-PA [Drosophila melanogaster]
  misc_feature (4)..(148): Homolog of NCBI NO: 26342969 NR Description: unnamed protein product [Mus musculus]
  misc_feature (4)..(148): Homolog of NCBI NO: 27676608 NR Description: similar to OPA3 protein; Optic atrophy 3
  misc_feature (4)..(164): Homolog of NCBI NO: 13376717 NR Description: OPA3 protein; Optic atrophy 3 (Iraqi-Jewish atrophy plus') [Homo sapiens] >gi|20139177|sp|Q9H6K4|OPA3_HUMAN atrophy 3 protein >gi|10438477|dbj|BAB15255.1| unnamed protein
  misc_feature (2)..(129): Homolog of NCBI NO: 23482917 NR Description: Arabidopsis thaliana At1g28510/F3M18_5

SEQ ID NO: 101602 - protein, 166 aa, Arabidopsis thaliana; identical to SEQ ID NO: 30223
  peptide (1)..(166): Ceres Seq. ID no. 13608250
  misc_feature (1)..(166): Homolog of NCBI NO: 18396819 NR Description: expressed protein [Arabidopsis thaliana] F3M18.5 [Arabidopsis thaliana] At1g28510/F3M18_5 [Arabidopsis thaliana]
  misc_feature (1)..(159): Homolog of NCBI NO: 34904528 NR Description: B1066G12.9 [Oryza sativa (japonica
  misc_feature (1)..(140): Homolog of NCBI NO: 15230967 NR Description: hypothetical protein [Arabidopsis thaliana]
  misc_feature (1)..(136): Homolog of NCBI NO: 19112998 NR Description: hypothetical coiled-coil protein
  misc_feature (1)..(138): Homolog of NCBI NO: 31242605 NR Description: ENSANGP00000017479 [Anopheles gambiae]
  misc_feature (1)..(154): Homolog of NCBI NO: 24649440 NR Description: CG13601-PA [Drosophila melanogaster]
  misc_feature (1)..(143): Homolog of NCBI NO: 26342969 NR Description: unnamed protein product [Mus musculus]
  misc_feature (1)..(143): Homolog of NCBI NO: 27676608 NR Description: similar to OPA3 protein; Optic atrophy 3
  misc_feature (1)..(159): Homolog of NCBI NO: 13376717 NR Description: OPA3 protein; Optic atrophy 3 (Iraqi-Jewish atrophy plus') [Homo sapiens] >gi|20139177|sp|Q9H6K4|OPA3_HUMAN atrophy 3 protein >gi|10438477|dbj|BAB15255.1| unnamed protein
  misc_feature (1)..(124): Homolog of NCBI NO: 23482917 NR Description: Arabidopsis thaliana At1g28510/F3M18_5

SEQ ID NO: 101603 - protein, 120 aa, Arabidopsis thaliana; identical to SEQ ID NO: 30224
  peptide (1)..(120): Ceres Seq. ID no. 13608251
  misc_feature (1)..(120): Homolog of NCBI NO: 18396819 NR Description: expressed protein [Arabidopsis thaliana] F3M18.5 [Arabidopsis thaliana] At1g28510/F3M18_5 [Arabidopsis thaliana]
  misc_feature (1)..(113): Homolog of NCBI NO: 34904528 NR Description: B1066G12.9 [Oryza sativa (japonica
  misc_feature (1)..(94): Homolog of NCBI NO: 15230967 NR Description: hypothetical protein [Arabidopsis thaliana]
  misc_feature (1)..(90): Homolog of NCBI NO: 19112998 NR Description: hypothetical coiled-coil protein
  misc_feature (1)..(92): Homolog of NCBI NO: 31242605 NR Description: ENSANGP00000017479 [Anopheles gambiae]
  misc_feature (1)..(108): Homolog of NCBI NO: 24649440 NR Description: CG13601-PA [Drosophila melanogaster]
  misc_feature (1)..(97): Homolog of NCBI NO: 26342969 NR Description: unnamed protein product [Mus musculus]
  misc_feature (1)..(97): Homolog of NCBI NO: 27676608 NR Description: similar to OPA3 protein; Optic atrophy 3
  misc_feature (1)..(113): Homolog of NCBI NO: 13376717 NR Description: OPA3 protein; Optic atrophy 3 (Iraqi-Jewish atrophy plus') [Homo sapiens] >gi|20139177|sp|Q9H6K4|OPA3_HUMAN atrophy 3 protein >gi|10438477|dbj|BAB15255.1| unnamed protein
  misc_feature (1)..(78): Homolog of NCBI NO: 23482917 NR Description: Arabidopsis thaliana At1g28510/F3M18_5

SEQ ID NO: 101604 - DNA, 1879 bp, Arabidopsis thaliana
  misc_feature (1)..(1879): Ceres Seq. ID no. 13608252
  misc_feature: MA Experiment ID: 20000185 Result: Up-regulated in Transcription
  misc_feature: MA Experiment 20000185 PARAMETER Experiment Name: At_Roots__P Parameter: Age (day) Value: 7 vs. 21
  misc_feature: MA Experiment 20000185 PARAMETER Experiment Name: At_Roots__P Parameter: Organism Value: A. thaliana
  misc_feature: MA Experiment 20000185 PARAMETER Experiment Name: At_Roots__P Parameter: Tissue Value: Roots vs. Whole Plant
  misc_feature: MA Experiment ID: 20000227 Result: Down-regulated in Transcription
  misc_feature: MA Experiment 20000227 PARAMETER Experiment Name: At_Root-Tips-vs-Tops_P Parameter: Tissue Value: Root Tips vs. Root Tops
  misc_feature: MA Experiment ID: 20000439 Result: Up-regulated in Transcription
  misc_feature: MA Experiment 20000439 PARAMETER Experiment Name: At_Roots__P Parameter: Age (day) Value: 14 vs. 21
  misc_feature: MA Experiment 20000439 PARAMETER Experiment Name: At_Roots__P Parameter: Organism Value: A. thaliana
  misc_feature: MA Experiment 20000439 PARAMETER Experiment Name: At_Roots__P Parameter: Tissue Value: Roots vs. Whole Plant
gaaaaatctctatttttctctccaatatccttcttaagtttttgaaccctctccacttcaatataaccgacctctcttctctcttctgaaaaaaacaccaaaggagctttaaatgctccgttacataatctctatctctttccaagaatatagagaaaggaaaataatatacaagaattaaaagaaggtatatcatcatctctctagctagtgatcaaagcaccgtcatcatcatcatatatcatcagcttgcctcagaggagaagaccaacataagagagatcgaagatcaaaatctatctctcttcatcatcttctgctgttactatcatatcacacgctctctcaaacatcatcctatatatagacttctcttcatcatcatcaaatgcaaggtcatcaccagaatcatcatcaacacttatcatcatcctccgccacgtcttcccatggaaacttcatgaacaaagatgggtatgatattggagagatagacccatcactcttcctctatcttgatggacaaggacatcatgatcctccatcaactgctccttctcctttacatcatcatcacacaactcagaatttggcgatgagacctccaacatcgacgctcaacatctttccatctcagcctatgcacatagagccacctccttcttctacacacaataaggaagggaaccgcaagggtcttgcctcatcggaccatgacatacctaaatcgtcagaccctaaaacattgagaagactagcacaaaacagagaagcagcaagaaaaagcagattacgtaaaaaggcttatgttcagcaactcgagtcatgtaggatcaaactgacccaactagaacaagagattcaacgggccagatcccaaggcgtattctttggagggtctcttataggaggagatcaacagcaaggtggactacccattggccctggcaacatcagctctgaagcagcggtgttcgatatggaatatgcgaggtggctggaggagcagcagaggctattaaacgaactaagggtggcaacacaagaacacttgtccgagaacgagcttaggatgtttgtggacacatgtttagctcattatgaccatttgattaacctcaaggctatggtcgctaagaccgatgtcttccacctcatttctggagcatggaaaactccagctgaacgttgcttcttgtggatgggtggtttccgtccatcggagatcattaaggtgattgtgaaccagatagaaccattgacggagcaacagatagttgggatatgtgggctgcaacagtccacacaagaggccgaggaggctctctcgcaaggcctcgaggcgttgaatcaatcactttccgatagcattgtctctgactccctcccgcctgcctccgcaccacttcctcctcatctatccaatttcatgtcacacatgtccttagctctcaacaagctctctgctctcgagggcttcgttctccaggcggataatttgaggcaccaaacgatccataggctgaaccaattgttgacgacccgtcaagaagcacggtgtcttctagccgttgcggagtacttccaccgtcttcaagctctaagttctctctggctagcccgtcctcggcaagatggataatactaaaacaactgatgaaggaaaccaaaaacaaaaacaagagaataggttgattagttagccgccagcttgacctctttatcatatatatcgtctctctactcaaatacagtgcaattagggaaaattgtttggcttctttttgttatatgattcttactattatgtttttaatcaagatgcagattatatatatagacaagtattccataccttttaatgaattcttccttatgc

SEQ ID NO: 101605 - protein, 417 aa, Arabidopsis thaliana
  peptide (1)..(417): Ceres Seq. ID no. 13608253
  misc_feature (115)..(171): Pfam Name: bZIP transcription factor Pfam Description: bZIP transcription factor
  misc_feature (1)..(417): Homolog of NCBI NO: 30681632 NR Description: bZIP transcription factor family protein
  misc_feature (1)..(417): Homolog of NCBI NO: 14329655 NR Description: bZIP transcription factor [Arabidopsis thaliana]
  misc_feature (97)..(417): Homolog of NCBI NO: 9759540 NR Description: bZIP transcription factor-like protein
  misc_feature (106)..(414): Homolog of NCBI NO: 15148924 NR Description: TGA-type basic leucine zipper protein TGA2.1
  misc_feature (103)..(415): Homolog of NCBI NO: 6288682 NR Description: bZIP transcription factor [Nicotiana tabacum]
  misc_feature (106)..(415): Homolog of NCBI NO: 422029 NR Description: transcription factor OBF3.2 - maize
  misc_feature (106)..(415): Homolog of NCBI NO: 34921538 NR Description: Transcription factor HBP-1b(c1)
  misc_feature (51)..(416): Homolog of NCBI NO: 7489717 NR Description: basic leucine zipper protein - maize basic leucine zipper protein [Zea mays]
  misc_feature (106)..(415): Homolog of NCBI NO: 15148926 NR Description: TGA-type basic leucine zipper protein TGA2.2
  misc_feature (105)..(415): Homolog of NCBI NO: 34909110 NR Description: putative transcription factor HBP-1b [Oryza
MQGHHQNHHQHLSSSSATSSHGNFMNKDGYDIGEIDPSLFLYLDGQGHHDPPSTAPSPLHHHHTTQNLAMRPPTSTLNIFPSQPMHIEPPPSSTHNKEGNRKGLASSDHDIPKSSDPKTLRRLAQNREAARKSRLRKKAYVQQLESCRIKLTQLEQEIQRARSQGVFFGGSLIGGDQQQGGLPIGPGNISSEAAVFDMEYARWLEEQQRLLNELRVATQEHLSENELRMFVDTCLAHYDHLINLKAMVAKTDVFHLISGAWKTPAERCFLWMGGFRPSEIIKVIVNQIEPLTEQQIVGICGLQQSTQEAEEALSQGLEALNQSLSDSIVSDSLPPASAPLPPHLSNFMSHMSLALNKLSALEGFVLQADNLRHQTIHRLNQLLTTRQEARCLLAVAEYFHRLQALSSLWLARPRQDG

SEQ ID NO: 101606 - protein, 393 aa, Arabidopsis thaliana
  peptide (1)..(393): Ceres Seq. ID no. 13608254
  misc_feature (91)..(147): Pfam Name: bZIP transcription factor Pfam Description: bZIP transcription factor
  misc_feature (1)..(393): Homolog of NCBI NO: 30681632 NR Description: bZIP transcription factor family protein
  misc_feature (1)..(393): Homolog of NCBI NO: 14329655 NR Description: bZIP transcription factor [Arabidopsis thaliana]
  misc_feature (73)..(393): Homolog of NCBI NO: 9759540 NR Description: bZIP transcription factor-like protein
  misc_feature (82)..(390): Homolog of NCBI NO: 15148924 NR Description: TGA-type basic leucine zipper protein TGA2.1
  misc_feature (79)..(391): Homolog of NCBI NO: 6288682 NR Description: bZIP transcription factor [Nicotiana tabacum]
  misc_feature (82)..(391): Homolog of NCBI NO: 422029 NR Description: transcription factor OBF3.2 - maize
  misc_feature (82)..(391): Homolog of NCBI NO: 34921538 NR Description: Transcription factor HBP-1b(c1)
  misc_feature (27)..(392): Homolog of NCBI NO: 7489717 NR Description: basic leucine zipper protein - maize basic leucine zipper protein [Zea mays]
  misc_feature (82)..(391): Homolog of NCBI NO: 15148926 NR Description: TGA-type basic leucine zipper protein TGA2.2
  misc_feature (81)..(391): Homolog of NCBI NO: 34909110 NR Description: putative transcription factor HBP-1b [Oryza
MNKDGYDIGEIDPSLFLYLDGQGHHDPPSTAPSPLHHHHTTQNLAMRPPTSTLNIFPSQPMHIEPPPSSTHNKEGNRKGLASSDHDIPKSSDPKTLRRLAQNREAARKSRLRKKAYVQQLESCRIKLTQLEQEIQRARSQGVFFGGSLIGGDQQQGGLPIGPGNISSEAAVFDMEYARWLEEQQRLLNELRVATQEHLSENELRMFVDTCLAHYDHLINLKAMVAKTDVFHLISGAWKTPAERCFLWMGGFRPSEIIKVIVNQIEPLTEQQIVGICGLQQSTQEAEEALSQGLEALNQSLSDSIVSDSLPPASAPLPPHLSNFMSHMSLALNKLSALEGFVLQADNLRHQTIHRLNQLLTTRQEARCLLAVAEYFHRLQALSSLWLARPRQDG

SEQ ID NO: 101607 - protein, 348 aa, Arabidopsis thaliana
  peptide (1)..(348): Ceres Seq. ID no. 13608255
  misc_feature (46)..(102): Pfam Name: bZIP transcription factor Pfam Description: bZIP transcription factor
  misc_feature (1)..(348): Homolog of NCBI NO: 30681632 NR Description: bZIP transcription factor family protein
  misc_feature (1)..(348): Homolog of NCBI NO: 14329655 NR Description: bZIP transcription factor [Arabidopsis thaliana]
  misc_feature (28)..(348): Homolog of NCBI NO: 9759540 NR Description: bZIP transcription factor-like protein
  misc_feature (37)..(345): Homolog of NCBI NO: 15148924 NR Description: TGA-type basic leucine zipper protein TGA2.1
  misc_feature (34)..(346): Homolog of NCBI NO: 6288682 NR Description: bZIP transcription factor [Nicotiana tabacum]
  misc_feature (37)..(346): Homolog of NCBI NO: 422029 NR Description: transcription factor OBF3.2 - maize
  misc_feature (37)..(346): Homolog of NCBI NO: 34921538 NR Description: Transcription factor HBP-1b(c1)
  misc_feature (1)..(347): Homolog of NCBI NO: 7489717 NR Description: basic leucine zipper protein - maize basic leucine zipper protein [Zea mays]
  misc_feature (37)..(346): Homolog of NCBI NO: 15148926 NR Description: TGA-type basic leucine zipper protein TGA2.2
  misc_feature (36)..(346): Homolog of NCBI NO: 34909110 NR Description: putative transcription factor HBP-1b [Oryza
MRPPTSTLNIFPSQPMHIEPPPSSTHNKEGNRKGLASSDHDIPKSSDPKTLRRLAQNREAARKSRLRKKAYVQQLESCRIKLTQLEQEIQRARSQGVFFGGSLIGGDQQQGGLPIGPGNISSEAAVFDMEYARWLEEQQRLLNELRVATQEHLSENELRMFVDTCLAHYDHLINLKAMVAKTDVFHLISGAWKTPAERCFLWMGGFRPSEIIKVIVNQIEPLTEQQIVGICGLQQSTQEAEEALSQGLEALNQSLSDSIVSDSLPPASAPLPPHLSNFMSHMSLALNKLSALEGFVLQADNLRHQTIHRLNQLLTTRQEARCLLAVAEYFHRLQALSSLWLARPRQDG

SEQ ID NO: 101608 - DNA, 3716 bp, Arabidopsis thaliana
  misc_feature (1)..(3716): Ceres Seq. ID no. 13608262
  misc_feature: MA Experiment ID: 20000088 Result: Up-regulated in Transcription
  misc_feature: MA Experiment 20000088 PARAMETER Experiment Name: At_100uM_ABA_Mutants_cDNA_P Parameter: Plant Line Value: Landsberg
  misc_feature: MA Experiment 20000088 PARAMETER Experiment Name: At_100uM_ABA_Mutants_cDNA_P Parameter: Timepoint (hr) Value: 6
  misc_feature: MA Experiment 20000088 PARAMETER Experiment Name: At_100uM_ABA_Mutants_cDNA_P Parameter: Tissue Value: Aerial
  misc_feature: MA Experiment 20000088 PARAMETER Experiment Name: At_100uM_ABA_Mutants_cDNA_P Parameter: Treatment Value: 100uM ABA vs. No Treatment
  misc_feature: MA Experiment ID: 20000090 Result: Up-regulated in Transcription
atgtctcgcaatcggcaaatcatcatccccgacgacgtgatggaaacagaagcggtggttaataccgtcgccggcgtcgactgtttcgtctcactccctcgtcaattactacacgcgcttcaatccaccagctcctctcctctccctccgcttctccctgtcgagctacgctccggtgaccgccgttggtcagttgcttggtccggctctagctcctcctcttctgcgatcgagatcgctcgagtgtttgcggaaagcatttcgttgccggatggtacagttgttaaagttcgtgttcttcctaatgtgcccaaggctactttagtaacagtcgaaccagagactgaagatgactgggaagttcttgagctcaatgctgaacttgccgaggcagctatacttagtcaggtgaggatactacatgagaccatgaaattccctttgtggttgcatgaccgaactgtgataagattttctgtggtttcaacatttccatcaaaaggggtggtacaacttgtgccaggaactgaagtggctgtggctccaaagagacgtgacagaaatctcaaagcaaaaaagagtcaggaaaaagaatgtaacaatgtgaaggctctactacgtgtacaagagactgatagatcagcctttcatgaagctgatgtcaaaggatttgagctaagggtagccctcacgtctattgcctatattcatccagaaactgccaagaaacactctctagaatctcttcagttgatttctgtatcccctagaatacctttgaaaggtagtgcaaagaaggatgaagccttaaatatgaaaaacagtgaagcttcaaaggtggccgagaatggtacttcaagcgccaagaaagagcctcgtcaagcaattcttcgtcttgtcttttcagatttagctgctaaaggacatctaatgatggtcgagtctcttcgtctctatctaggagcaggcctacactcatgggtttacttaaggggatgcaatgtgaatgaagacaaagaaattcctgctctttcactttctccttgtgtcttcaagatttctgaaaatgaaaaggtgctggataagggtacggataggcttggtaataacaattctgttagaaaaagcagtcatccaccgtctggcttgagcacctatgtggatgttgtcgactggtctgtgcacgataaggttgttacagctctttcatctgagggtttgcatgacgaaggaaatcatgataagaataagaaaggattggaataccttactcgcctgtggtcattggcacagcttgatgctatggcgtcagtcacaggagttgatgttagttcgttaattgtgggaagagaaacgtttttccatttcgaagtaagagggctcgaatcttataaatccatagacgggcagccttctgttaatgatcgttgggaaagtgggaagaaggataaacacactcctttagaaattttgtacgtcatgacggtctctgatgagtctttgcttggtgataaattcgctgggtatgatcttagcctggatagaagtgagaagagcgacaatgtggtgcatattgagccagtgcttgagaagatgaatcttggcgagcctatatatttaaagtcggctaaagagacacactgcaataaaggtgtttccccagatatatcctccttgacgtggatgggcccaatcgtgtcggatgttatcaagagaatgaccgtgttgttgtctcctgcagctggaatgtggtttagcaagttcaagattccatcacctggacatattctcatatatgggcctcctggttcaggaaagacaatattggcaagagctgctgcaaagtatttcgaagaacagaaagacttgttggcacatgtgattttagtatcctgttctacacttgccttggagaaggttcaacacatccatcatgtcctttctagtgtaatagctgaggggttggaacatgcaccatctgtcatcattttggatgatcttgatagcattatctcatcgtcttctgatactgaaggaacacaagcttcggttggggttacaatgcttacaaaattcctaacagatgttatagatgattatggggaatacaggaattcctcttgtggaattggcccacttgcattcgttgcttctgtccagtctctagagcaaattccacagacattgagctcatcaggaaggtttgacttccatgtgcaactggctgctcctgctacctcggaacgtggggccatactgaagcatgagatacagaaacgccttttagactgttcagaagacattttacttaacttagctgctaaatgtgaaggatatgatgcatatgacctggaaatattggttgatagagctgttcatgctgccattggccggcatctacctttagaatcaaatatatccaaatataatttggtcaaagaagactttactcgagctatgcatgattttgtgcctgttgccatgcgtgacatcacaaaatctgcctctgaaggtggtcgtttggggtgggaagatgtgggaggtgtgactgatattaaaaatgctatcaaagagatgattgagctgccatcaaaatttccaaaaatctttgcaaaatctcctctgcgtttgagatcgaatgttctcttgtatggcccacccggttgtgggaagactcacattgttggtgcagctgctgcagcgtgttccctacggtttatatcggtgaaggggcctgagctgttaaacaaatacattggtgcatctgaacaagcggtccgtgatatattttcgaaagcagcagctgcagctccatgcatactctttttcgatgaattcgattcaattgctcccaaaagaggacatgataatactggtgtaactgatcgagttgttaatcaatttttgacagaactggatggagttgaagttctaacaggggtctttgtatttgctgcaaccagtagaccagatttacttgatcctgccctcctaaggcctggccggcttgatcgtcttcttttgtgcgactttccttccccaccagaacgattagagattcttacagttctttctagaaagcttctgatggctgatgatattgacctagagcctatagctttgatgactgaaggcttcagtggagctgatcttcaagctcttctctcagatgcgcaacttgcagctgtacacgagtatctgaacagagaagataaacccgagaccggaactacaccaataataactgatcctcttctgaagtcgattgcttctaaaactaaaccatcggtttccgaaaccgagaaacaaaagctctatgacatatatagccagtttctggattcaagaaaatcgtcaagagaagcaaagggcaaaagagcaaccttagcataatcaaaggtattacaaagacacaaaaaggaatggttacattgtagaaatcacatcatgttgtaaaatttgctttatgatagatatgcccagttgttagcattagagtaaaagtggttgaagtttggaataaagatagttagatactagagagacacatggtaagttctacaagattcaaacgactatagacatctctacagtaataagattaatacatttcttttggcaattttagaattttaaaagctgtaatatttttggtcaaaacaagataaaaatggtattcaagttccgtaattttgtgtatgaaatgaaataaaaac

SEQ ID NO: 101609 - protein, 1130 aa, Arabidopsis thaliana
  peptide (1)..(1130): Ceres Seq. ID no. 13608263
  misc_feature (595)..(797): Pfam Name: ATPase family associated with various cellular Pfam Description: ATPase family associated with various cellular
  misc_feature (626)..(1087): Homolog of NCBI NO: 6636328 NR Description: peroxisome assembly protein Pex1p [Yarrowia
  misc_feature (72)..(297): Homolog of NCBI NO: 6636328 NR Description: peroxisome assembly protein Pex1p [Yarrowia
  misc_feature (1068)..(1130): Homolog of NCBI NO: 6636328 NR Description: peroxisome assembly protein Pex1p [Yarrowia
  misc_feature (494)..(1067): Homolog of NCBI NO: 4505725 NR Description: peroxisome biogenesis factor 1 [Homo sapiens]
  misc_feature (27)..(185): Homolog of NCBI NO: 4505725 NR Description: peroxisome biogenesis factor 1 [Homo sapiens]
  misc_feature (494)..(1067): Homolog of NCBI NO: 14289173 NR Description: Pex1pL664P [Homo sapiens]
  misc_feature (494)..(1067): Homolog of NCBI NO: 14289175 NR Description: Pex1pG843D [Homo sapiens]
  misc_feature (27)..(185): Homolog of NCBI NO: 14289173 NR Description: Pex1pL664P [Homo sapiens]
  misc_feature (27)..(185): Homolog of NCBI NO: 14289175 NR Description: Pex1pG843D [Homo sapiens]
  misc_feature (630)..(1078): Homolog of NCBI NO: 5817536 NR Description: peroxin-1 [Pichia angusta]
MSRNRQIIIPDDVMETEAVVNTVAGVDCFVSLPRQLLHALQSTSSSPLPPLLPVELRSGDRRWSVAWSGSSSSSSAIEIARVFAESISLPDGTVVKVRVLPNVPKATLVTVEPETEDDWEVLELNAELAEAAILSQVRILHETMKFPLWLHDRTVIRFSVVSTFPSKGVVQLVPGTEVAVAPKRRDRNLKAKKSQEKECNNVKALLRVQETDRSAFHEADVKGFELRVALTSIAYIHPETAKKHSLESLQLISVSPRIPLKGSAKKDEALNMKNSEASKVAENGTSSAKKEPRQAILRLVFSDLAAKGHLMMVESLRLYLGAGLHSWVYLRGCNVNEDKEIPALSLSPCVFKISENEKVLDKGTDRLGNNNSVRKSSHPPSGLSTYVDVVDWSVHDKVVTALSSEGLHDEGNHDKNKKGLEYLTRLWSLAQLDAMASVTGVDVSSLIVGRETFFHFEVRGLESYKSIDGQPSVNDRWESGKKDKHTPLEILYVMTVSDESLLGDKFAGYDLSLDRSEKSDNVVHIEPVLEKMNLGEPIYLKSAKETHCNKGVSPDISSLTWMGPIVSDVIKRMTVLLSPAAGMWFSKFKIPSPGHILIYGPPGSGKTILARAAAKYFEEQKDLLAHVILVSCSTLALEKVQHIHHVLSSVIAEGLEHAPSVIILDDLDSIISSSSDTEGTQASVGVTMLTKFLTDVIDDYGEYRNSSCGIGPLAFVASVQSLEQIPQTLSSSGRFDFHVQLAAPATSERGAILKHEIQKRLLDCSEDILLNLAAKCEGYDAYDLEILVDRAVHAAIGRHLPLESNISKYNLVKEDFTRAMHDFVPVAMRDITKSASEGGRLGWEDVGGVTDIKNAIKEMIELPSKFPKIFAKSPLRLRSNVLLYGPPGCGKTHIVGAAAAACSLRFISVKGPELLNKYIGASEQAVRDIFSKAAAAAPCILFFDEFDSIAPKRGHDNTGVTDRVVNQFLTELDGVEVLTGVFVFAATSRPDLLDPALLRPGRLDRLLLCDFPSPPERLEILTVLSRKLLMADDIDLEPIALMTEGFSGADLQALLSDAQLAAVHEYLNREDKPETGTTPIITDPLLKSIASKTKPSVSETEKQKLYDIYSQFLDSRKSSREAKGKRATLA

SEQ ID NO: 101610 - protein, 1117 aa, Arabidopsis thaliana
  peptide (1)..(1117): Ceres Seq. ID no. 13608264
  misc_feature (582)..(784): Pfam Name: ATPase family associated with various cellular Pfam Description: ATPase family associated with various cellular
  misc_feature (613)..(1074): Homolog of NCBI NO: 6636328 NR Description: peroxisome assembly protein Pex1p [Yarrowia
  misc_feature (59)..(284): Homolog of NCBI NO: 6636328 NR Description: peroxisome assembly protein Pex1p [Yarrowia
  misc_feature (1055)..(1117): Homolog of NCBI NO: 6636328 NR Description: peroxisome assembly protein Pex1p [Yarrowia
  misc_feature (481)..(1054): Homolog of NCBI NO: 4505725 NR Description: peroxisome biogenesis factor 1 [Homo sapiens]
  misc_feature (14)..(172): Homolog of NCBI NO: 4505725 NR Description: peroxisome biogenesis factor 1 [Homo sapiens]
  misc_feature (481)..(1054): Homolog of NCBI NO: 14289173 NR Description: Pex1pL664P [Homo sapiens]
  misc_feature (481)..(1054): Homolog of NCBI NO: 14289175 NR Description: Pex1pG843D [Homo sapiens]
  misc_feature (14)..(172): Homolog of NCBI NO: 14289173 NR Description: Pex1pL664P [Homo sapiens]
  misc_feature (14)..(172): Homolog of NCBI NO: 14289175 NR Description: Pex1pG843D [Homo sapiens]
  misc_feature (617)..(1065): Homolog of NCBI NO: 5817536 NR Description: peroxin-1 [Pichia angusta]
METEAVVNTVAGVDCFVSLPRQLLHALQSTSSSPLPPLLPVELRSGDRRWSVAWSGSSSSSSAIEIARVFAESISLPDGTVVKVRVLPNVPKATLVTVEPETEDDWEVLELNAELAEAAILSQVRILHETMKFPLWLHDRTVIRFSVVSTFPSKGVVQLVPGTEVAVAPKRRDRNLKAKKSQEKECNNVKALLRVQETDRSAFHEADVKGFELRVALTSIAYIHPETAKKHSLESLQLISVSPRIPLKGSAKKDEALNMKNSEASKVAENGTSSAKKEPRQAILRLVFSDLAAKGHLMMVESLRLYLGAGLHSWVYLRGCNVNEDKEIPALSLSPCVFKISENEKVLDKGTDRLGNNNSVRKSSHPPSGLSTYVDVVDWSVHDKVVTALSSEGLHDEGNHDKNKKGLEYLTRLWSLAQLDAMASVTGVDVSSLIVGRETFFHFEVRGLESYKSIDGQPSVNDRWESGKKDKHTPLEILYVMTVSDESLLGDKFAGYDLSLDRSEKSDNVVHIEPVLEKMNLGEPIYLKSAKETHCNKGVSPDISSLTWMGPIVSDVIKRMTVLLSPAAGMWFSKFKIPSPGHILIYGPPGSGKTILARAAAKYFEEQKDLLAHVILVSCSTLALEKVQHIHHVLSSVIAEGLEHAPSVIILDDLDSIISSSSDTEGTQASVGVTMLTKFLTDVIDDYGEYRNSSCGIGPLAFVASVQSLEQIPQTLSSSGRFDFHVQLAAPATSERGAILKHEIQKRLLDCSEDILLNLAAKCEGYDAYDLEILVDRAVHAAIGRHLPLESNISKYNLVKEDFTRAMHDFVPVAMRDITKSASEGGRLGWEDVGGVTDIKNAIKEMIELPSKFPKIFAKSPLRLRSNVLLYGPPGCGKTHIVGAAAAACSLRFISVKGPELLNKYIGASEQAVRDIFSKAAAAAPCILFFDEFDSIAPKRGHDNTGVTDRVVNQFLTELDGVEVLTGVFVFAATSRPDLLDPALLRPGRLDRLLLCDFPSPPERLEILTVLSRKLLMADDIDLEPIALMTEGFSGADLQALLSDAQLAAVHEYLNREDKPETGTTPIITDPLLKSIASKTKPSVSETEKQKLYDIYSQFLDSRKSSREAKGKRATLA

SEQ ID NO: 101611 - protein, 987 aa, Arabidopsis thaliana
  peptide (1)..(987): Ceres Seq. ID no. 13608265
  misc_feature (452)..(654): Pfam Name: ATPase family associated with various cellular Pfam Description: ATPase family associated with various cellular
  misc_feature (483)..(944): Homolog of NCBI NO: 6636328 NR Description: peroxisome assembly protein Pex1p [Yarrowia
  misc_feature (1)..(154): Homolog of NCBI NO: 6636328 NR Description: peroxisome assembly protein Pex1p [Yarrowia
  misc_feature (925)..(987): Homolog of NCBI NO: 6636328 NR Description: peroxisome assembly protein Pex1p [Yarrowia
  misc_feature (351)..(924): Homolog of NCBI NO: 4505725 NR Description: peroxisome biogenesis factor 1 [Homo sapiens]
  misc_feature (1)..(42): Homolog of NCBI NO: 4505725 NR Description: peroxisome biogenesis factor 1 [Homo sapiens]
  misc_feature (351)..(924): Homolog of NCBI NO: 14289173 NR Description: Pex1pL664P [Homo sapiens]
  misc_feature (351)..(924): Homolog of NCBI NO: 14289175 NR Description: Pex1pG843D [Homo sapiens]
  misc_feature (1)..(42): Homolog of NCBI NO: 14289173 NR Description: Pex1pL664P [Homo sapiens]
  misc_feature (1)..(42): Homolog of NCBI NO: 14289175 NR Description: Pex1pG843D [Homo sapiens]
  misc_feature (487)..(935): Homolog of NCBI NO: 5817536 NR Description: peroxin-1 [Pichia angusta]
MKFPLWLHDRTVIRFSVVSTFPSKGVVQLVPGTEVAVAPKRRDRNLKAKKSQEKECNNVKALLRVQETDRSAFHEADVKGFELRVALTSIAYIHPETAKKHSLESLQLISVSPRIPLKGSAKKDEALNMKNSEASKVAENGTSSAKKEPRQAILRLVFSDLAAKGHLMMVESLRLYLGAGLHSWVYLRGCNVNEDKEIPALSLSPCVFKISENEKVLDKGTDRLGNNNSVRKSSHPPSGLSTYVDVVDWSVHDKVVTALSSEGLHDEGNHDKNKKGLEYLTRLWSLAQLDAMASVTGVDVSSLIVGRETFFHFEVRGLESYKSIDGQPSVNDRWESGKKDKHTPLEILYVMTVSDESLLGDKFAGYDLSLDRSEKSDNVVHIEPVLEKMNLGEPIYLKSAKETHCNKGVSPDISSLTWMGPIVSDVIKRMTVLLSPAAGMWFSKFKIPSPGHILIYGPPGSGKTILARAAAKYFEEQKDLLAHVILVSCSTLALEKVQHIHHVLSSVIAEGLEHAPSVIILDDLDSIISSSSDTEGTQASVGVTMLTKFLTDVIDDYGEYRNSSCGIGPLAFVASVQSLEQIPQTLSSSGRFDFHVQLAAPATSERGAILKHEIQKRLLDCSEDILLNLAAKCEGYDAYDLEILVDRAVHAAIGRHLPLESNISKYNLVKEDFTRAMHDFVPVAMRDITKSASEGGRLGWEDVGGVTDIKNAIKEMIELPSKFPKIFAKSPLRLRSNVLLYGPPGCGKTHIVGAAAAACSLRFISVKGPELLNKYIGASEQAVRDIFSKAAAAAPCILFFDEFDSIAPKRGHDNTGVTDRVVNQFLTELDGVEVLTGVFVFAATSRPDLLDPALLRPGRLDRLLLCDFPSPPERLEILTVLSRKLLMADDIDLEPIALMTEGFSGADLQALLSDAQLAAVHEYLNREDKPETGTTPIITDPLLKSIASKTKPSVSETEKQKLYDIYSQFLDSRKSSREAKGKRATLA

SEQ ID NO: 101612 - DNA, 1709 bp, Arabidopsis thaliana
  misc_feature (1)..(1709): Ceres Seq. ID no. 13608276
  misc_feature: MA Experiment ID: 108572 Result: Up-regulated in Transcription
  misc_feature: MA Experiment 108572 PARAMETER Experiment Name: At_Drought_cDNA_P Parameter: Timepoint (hr) Value: 1
  misc_feature: MA Experiment 108572 PARAMETER Experiment Name: At_Drought_cDNA_P Parameter: Tissue Value: Aerial
  misc_feature: MA Experiment 108572 PARAMETER Experiment Name: At_Drought_cDNA_P Parameter: Treatment Value: Drought vs. No Drought
  misc_feature: MA Experiment ID: 108607 Result: Up-regulated in Transcription
  misc_feature: MA Experiment 108607 PARAMETER Experiment Name: At_100uM_ABA_cDNA_P Parameter: Timepoint (hr) Value: 4
  misc_feature: MA Experiment 108607 PARAMETER Experiment Name: At_100uM_ABA_cDNA_P Parameter: Tissue Value: Aerial
  misc_feature: MA Experiment 108607 PARAMETER Experiment Name: At_100uM_ABA_cDNA_P Parameter: Treatment Value: 100uM ABA vs. No Treatment
  misc_feature: MA Experiment ID: 20000089 Result: Down-regulated in Transcription
  misc_feature: MA Experiment ID: 20000111 Result: Down-regulated in Transcription
  misc_feature: MA Experiment 20000111 PARAMETER Experiment Name: At_42deg_Heat_cDNA_P Parameter: Temperature (deg C) Value: 42 vs. 22
  misc_feature: MA Experiment 20000111 PARAMETER Experiment Name: At_42deg_Heat_cDNA_P Parameter: Timepoint (hr) Value: 6
  misc_feature: MA Experiment 20000111 PARAMETER Experiment Name: At_42deg_Heat_cDNA_P Parameter: Tissue Value: Aerial
  misc_feature: MA Experiment ID: 20000227 Result: Up-regulated in Transcription
  misc_feature: MA Experiment 20000227 PARAMETER Experiment Name: At_Root-Tips-vs-Tops_P Parameter: Tissue Value: Root Tips vs. Root Tops
atttaactgtctcttcttcaaaaccaaaaccaaaaccaaaaccttctattgtttccctcccacgctataattcatagacataagagaatgaggaaaggacagggctactcctactctgtaatcgcatcggtgttggtgttactgtgtgtggtggtgtctcgaatcgaatgcagcagccaagtgcacgccctgagccgtctttacctgtctaagcgaggggttggtggttcgtccaccatggacacaagccatttcaaggcggttaaggatttgaaaccgtcttcgctgcggagtgctgctaatcaggaggggctaagaaagagagatctgatacggagattgcccggacagcctcccgttagtttcgatcagtacggcggctatgttaccgtcaacgaatccgccgggcgttcctttttctactatttcgtggaagcctctaagtctaaagattcttctcctctgcttctctggctcaacggcggaccgggatgctcgtcactggcgtatggagcattacaagagcttgggccgttcagagtacacagcgacggcaaaacgctttttagaaaccgatatgcatggaacaatgctgcgaatgtcttgttcttagaatcgccggcgggagtggggttctcgtacaccaacacgacgtcggacctggagaagcacggggacaggaataccgcagctgataactacatcttcctggttaactggctggagaggttcccggagtacaaaggcagggacttgtacatcgccggtgagagctatgccggccactatgttccgcaacttgcccatactatccttctccatcaccggagcttcttcaatctcaagggcattctgataggaaatgcggtgatcaacgacgagaccgacttgatgggtatgtacgactttttcgagagtcatgctttgatctccgaagattctttggctagactcaagagcaactgcgatctcaagacggagtctgcgagtgtaatgactgaggagtgcgcggtggtgtccgaccaaatagacatggatacatattacctcgacatctacaacatatacgctcccttgtgcctcaactccacgctcactcgcaggcccaagcgaggaaccacaataagggagtttgacccctgcagtgaccattacgtgcaggcctacctgaacagacctgaagtccaagcggccctgcacgcaaacgctacgaagctgccttacgagtggcagccgtgcagcagtgtgataaagaagtggaacgacagtcctaccacagtgattcctctcatcaaggagctgatgggtcagggcgtccgcgtctgggtgttcagcggagacacagacgggagaattccagtgacgtccaccaaatactccctcaagaagatgaatctaacggccaaaacggcctggcatccatggtacctagggggtgaggtgggtggatacacagaggagtacaaagggaaattgacatttgccacagtgagaggggctggtcatcaagttcccagcttccagccaaagcgctctctttcactcttcattcacttcctcaatgacactcctctccctgacacctctcgttactaaatattctatctgagattgtaatttctctcttaattagcttttattcatcctcccatccattttttatctactatttcattacatacctttgaatgttaatatctgttttgctc

SEQ ID NO: 101613 - protein, 502 aa, Arabidopsis thaliana
  peptide (1)..(502): Ceres Seq. ID no. 13608277
  misc_feature (1)..(502): Homolog of NCBI NO: 15229439 NR Description: serine carboxypeptidase, putative [Arabidopsis
  misc_feature (10)..(497): Homolog of NCBI NO: 11967861 NR Description: putative serine carboxypeptidase [Pisum sativum]
  misc_feature (4)..(499): Homolog of NCBI NO: 15231103 NR Description: serine carboxypeptidase family [Arabidopsis
  misc_feature (4)..(500): Homolog of NCBI NO: 15231099 NR Description: serine carboxypeptidase family [Arabidopsis
  misc_feature (63)..(498): Homolog of NCBI NO: 1706082 NR Description: Serine carboxypeptidase II-3 precursor (CP-MII.3)
  misc_feature (13)..(501): Homolog of NCBI NO: 34899032 NR Description: putative serine carboxypeptidase II-3 precursor
  misc_feature (10)..(491): Homolog of NCBI NO: 34329345 NR Description: putative serine carboxypeptidase [Medicago
  misc_feature (4)..(499): Homolog of NCBI NO: 15224995 NR Description: serine carboxypeptidase family [Arabidopsis
  misc_feature (9)..(500): Homolog of NCBI NO: 15231101 NR Description: serine carboxypeptidase family [Arabidopsis
  misc_feature (269)..(502): Homolog of NCBI NO: 27808556 NR Description: At3g63470 [Arabidopsis thaliana]
MRKGQGYSYSVIASVLVLLCVVVSRIECSSQVHALSRLYLSKRGVGGSSTMDTSHFKAVKDLKPSSLRSAANQEGLRKRDLIRRLPGQPPVSFDQYGGYVTVNESAGRSFFYYFVEASKSKDSSPLLLWLNGGPGCSSLAYGALQELGPFRVHSDGKTLFRNRYAWNNAANVLFLESPAGVGFSYTNTTSDLEKHGDRNTAADNYIFLVNWLERFPEYKGRDLYIAGESYAGHYVPQLAHTILLHHRSFFNLKGILIGNAVINDETDLMGMYDFFESHALISEDSLARLKSNCDLKTESASVMTEECAVVSDQIDMDTYYLDIYNIYAPLCLNSTLTRRPKRGTTIREFDPCSDHYVQAYLNRPEVQAALHANATKLPYEWQPCSSVIKKWNDSPTTVIPLIKELMGQGVRVWVFSGDTDGRIPVTSTKYSLKKMNLTAKTAWHPWYLGGEVGGYTEEYKGKLTFATVRGAGHQVPSFQPKRSLSLFIHFLNDTPLPDTSRY

SEQ ID NO: 101614 - protein, 452 aa, Arabidopsis thaliana
  peptide (1)..(452): Ceres Seq. ID no. 13608278
  misc_feature (1)..(452): Homolog of NCBI NO: 15229439 NR Description: serine carboxypeptidase, putative [Arabidopsis
  misc_feature (1)..(447): Homolog of NCBI NO: 11967861 NR Description: putative serine carboxypeptidase [Pisum sativum]
  misc_feature (1)..(449): Homolog of NCBI NO: 15231103 NR Description: serine carboxypeptidase family [Arabidopsis
  misc_feature (1)..(450): Homolog of NCBI NO: 15231099 NR Description: serine carboxypeptidase family [Arabidopsis
  misc_feature (13)..(448): Homolog of NCBI NO: 1706082 NR Description: Serine carboxypeptidase II-3 precursor (CP-MII.3)
  misc_feature (1)..(451): Homolog of NCBI NO: 34899032 NR Description: putative serine carboxypeptidase II-3 precursor
  misc_feature (1)..(441): Homolog of NCBI NO: 34329345 NR Description: putative serine carboxypeptidase [Medicago
  misc_feature (1)..(449): Homolog of NCBI NO: 15224995 NR Description: serine carboxypeptidase family [Arabidopsis
  misc_feature (1)..(450): Homolog of NCBI NO: 15231101 NR Description: serine carboxypeptidase family [Arabidopsis
  misc_feature (219)..(452): Homolog of NCBI NO: 27808556 NR Description: At3g63470 [Arabidopsis thaliana]
MDTSHFKAVKDLKPSSLRSAANQEGLRKRDLIRRLPGQPPVSFDQYGGYVTVNESAGRSFFYYFVEASKSKDSSPLLLWLNGGPGCSSLAYGALQELGPFRVHSDGKTLFRNRYAWNNAANVLFLESPAGVGFSYTNTTSDLEKHGDRNTAADNYIFLVNWLERFPEYKGRDLYIAGESYAGHYVPQLAHTILLHHRSFFNLKGILIGNAVINDETDLMGMYDFFESHALISEDSLARLKSNCDLKTESASVMTEECAVVSDQIDMDTYYLDIYNIYAPLCLNSTLTRRPKRGTTIREFDPCSDHYVQAYLNRPEVQAALHANATKLPYEWQPCSSVIKKWNDSPTTVIPLIKELMGQGVRVWVFSGDTDGRIPVTSTKYSLKKMNLTAKTAWHPWYLGGEVGGYTEEYKGKLTFATVRGAGHQVPSFQPKRSLSLFIHFLNDTPLPDTSRY

SEQ ID NO: 101615 - DNA, 1359 bp, Arabidopsis thaliana
  misc_feature (1)..(1359): Ceres Seq. ID no. 13608287
  misc_feature: MA Experiment ID: 108434 Result: Down-regulated in Transcription
  misc_feature: MA Experiment 108434 PARAMETER Experiment Name: At_Root_Tips_cDNA_P Parameter: Tissue Value: Root Tips
  misc_feature: MA Experiment ID: 108435 Result: Up-regulated in Transcription
  misc_feature: MA Experiment 108435 PARAMETER Experiment Name: At_stm_Mutants_cDNA_P Parameter: Plant Line Value: wt Landsburg vs stm
  misc_feature: MA Experiment 108435 PARAMETER Experiment Name: At_stm_Mutants_cDNA_P Parameter: Tissue Value: Shoot Apical Meristem Region
  misc_feature: MA Experiment ID: 108461 Result: Down-regulated in Transcription
  misc_feature: MA Experiment 108461 PARAMETER Experiment Name: At_Germinating_Seeds_cDNA_P Parameter: Age (day) Value: 1 vs. 0
  misc_feature: MA Experiment 108461 PARAMETER Experiment Name: At_Germinating_Seeds_cDNA_P Parameter: Tissue Value: Germinating Seeds
  misc_feature: MA Experiment ID: 108462 Result: Down-regulated in Transcription
  misc_feature: MA Experiment 108462 PARAMETER Experiment Name: At_Germinating_Seeds_cDNA_P Parameter: Age (day) Value: 2 vs. 0
  misc_feature: MA Experiment 108462 PARAMETER Experiment Name: At_Germinating_Seeds_cDNA_P Parameter: Tissue Value: Germinating Seeds
  misc_feature: MA Experiment ID: 108463 Result: Down-regulated in Transcription
  misc_feature: MA Experiment 108463 PARAMETER Experiment Name: At_Germinating_Seeds_cDNA_P Parameter: Age (day) Value: 3 vs. 0
  misc_feature: MA Experiment 108463 PARAMETER Experiment Name: At_Germinating_Seeds_cDNA_P Parameter: Tissue Value: Germinating Seeds
  misc_feature: MA Experiment ID: 108464 Result: Down-regulated in Transcription
  misc_feature: MA Experiment 108464 PARAMETER Experiment Name: At_Germinating_Seeds_cDNA_P Parameter: Age (day) Value: 4 vs. 0
  misc_feature: MA Experiment 108464 PARAMETER Experiment Name: At_Germinating_Seeds_cDNA_P Parameter: Tissue Value: Germinating Seeds
  misc_feature: MA Experiment ID: 108501 Result: Up-regulated in Transcription
  misc_feature: MA Experiment 108501 PARAMETER Experiment Name: At_ap2_floral_buds_cDNA_P Parameter: Plant Line Value: ap2 (Ler.)
  misc_feature: MA Experiment 108501 PARAMETER Experiment Name: At_ap2_floral_buds_cDNA_P Parameter: Tissue Value: Closed Flower
  misc_feature: MA Experiment ID: 20000111 Result: Down-regulated in Transcription
  misc_feature: MA Experiment 20000111 PARAMETER Experiment Name: At_42deg_Heat_cDNA_P Parameter: Temperature (deg C) Value: 42 vs. 22
  misc_feature: MA Experiment 20000111 PARAMETER Experiment Name: At_42deg_Heat_cDNA_P Parameter: Timepoint (hr) Value: 6
  misc_feature: MA Experiment 20000111 PARAMETER Experiment Name: At_42deg_Heat_cDNA_P Parameter: Tissue Value: Aerial
  misc_feature: MA Experiment ID: 20000112 Result: Down-regulated in Transcription
  misc_feature: MA Experiment 20000112 PARAMETER Experiment Name: At_42deg_Heat_cDNA_P Parameter: Temperature (deg C) Value: 42 vs. 22
  misc_feature: MA Experiment 20000112 PARAMETER Experiment Name: At_42deg_Heat_cDNA_P Parameter: Timepoint (hr) Value: 2
  misc_feature: MA Experiment 20000112 PARAMETER Experiment Name: At_42deg_Heat_cDNA_P Parameter: Tissue Value: Aerial
  misc_feature: MA Experiment ID: 20000173 Result: Down-regulated in Transcription
  misc_feature: MA Experiment 20000173 PARAMETER Experiment Name: At_42deg_Heat_P Parameter: Age (day) Value: 14
  misc_feature: MA Experiment 20000173 PARAMETER Experiment Name: At_42deg_Heat_P Parameter: Organism Value: A. thaliana
  misc_feature: MA Experiment 20000173 PARAMETER Experiment Name: At_42deg_Heat_P Parameter: Plant Line Value: WS
  misc_feature: MA Experiment 20000173 PARAMETER Experiment Name: At_42deg_Heat_P Parameter: Temperature (deg C) Value: 42 vs. 22
  misc_feature: MA Experiment 20000173 PARAMETER Experiment Name: At_42deg_Heat_P Parameter: Timepoint (hr) Value: 6
  misc_feature: MA Experiment 20000173 PARAMETER Experiment Name: At_42deg_Heat_P Parameter: Tissue Value: Aerial
  misc_feature: MA Experiment ID: 20000184 Result: Down-regulated in Transcription
  misc_feature: MA Experiment 20000184 PARAMETER Experiment Name: At_Shoots__P Parameter: Age (day) Value: 7
  misc_feature: MA Experiment 20000184 PARAMETER Experiment Name: At_Shoots__P Parameter: Tissue Value: Shoots vs. Whole Plant
  misc_feature: MA Experiment ID: 20000265 Result: Up-regulated in Transcription
  misc_feature: MA Experiment 20000265 PARAMETER Experiment Name: At_Open_Flower_P Parameter: Age (day) Value: 21
  misc_feature: MA Experiment 20000265 PARAMETER Experiment Name: At_Open_Flower_P Parameter: Plant Line Value: WS
  misc_feature: MA Experiment 20000265 PARAMETER Experiment Name: At_Open_Flower_P Parameter: Tissue Value: Closed Flower vs. Whole Plant
  misc_feature: MA Experiment ID: 20000286 Result: Up-regulated in Transcription
  misc_feature: MA Experiment 20000286 PARAMETER Experiment Name: At_Open_Flower_P Parameter: Age (day) Value: 21
  misc_feature: MA Experiment 20000286 PARAMETER Experiment Name: At_Open_Flower_P Parameter: Plant Line Value: WS
  misc_feature: MA Experiment 20000286 PARAMETER Experiment Name: At_Open_Flower_P Parameter: Tissue Value: Half Open vs. Whole Plant
  misc_feature: MA Experiment ID: 20000439 Result: Up-regulated in Transcription
  misc_feature: MA Experiment 20000439 PARAMETER Experiment Name: At_Roots__P Parameter: Age (day) Value: 14 vs. 21
  misc_feature: MA Experiment 20000439 PARAMETER Experiment Name: At_Roots__P Parameter: Organism Value: A. thaliana
  misc_feature: MA Experiment 20000439 PARAMETER Experiment Name: At_Roots__P Parameter: Tissue Value: Roots vs. Whole Plant
  misc_feature: MA Experiment ID: 20000495 Result: Up-regulated in Transcription
  misc_feature: MA Experiment 20000495 PARAMETER Experiment Name: At_Guard_Cells_P Parameter: Harvest Date Value: 8/2/2002
  misc_feature: MA Experiment 20000495 PARAMETER Experiment Name: At_Guard_Cells_P Parameter: Organism Value: A. thaliana
  misc_feature: MA Experiment 20000495 PARAMETER Experiment Name: At_Guard_Cells_P Parameter: Tissue Value: Guard Cells vs. Leaves
  misc_feature: MA Experiment ID: 20000794 Result: Up-regulated in Transcription
  misc_feature: MA Experiment 20000794 PARAMETER Experiment Name: At_Petals_P Parameter: Age (day) Value: 23-25 days
  misc_feature: MA Experiment 20000794 PARAMETER Experiment Name: At_Petals_P Parameter: Plant Line Value: WS
  misc_feature: MA Experiment 20000794 PARAMETER Experiment Name: At_Petals_P Parameter: Tissue Value: Petals vs. Whole plant
  misc_feature: MA Experiment ID: 20001451 Result: Up-regulated in Transcription
  misc_feature: MA Experiment 20001451 PARAMETER Experiment Name: At_Far-red-induction_P Parameter: Age (day) Value: 7
  misc_feature: MA Experiment 20001451 PARAMETER Experiment Name: At_Far-red-induction_P Parameter: Light Value: Far-red vs. White
  misc_feature: MA Experiment 20001451 PARAMETER Experiment Name: At_Far-red-induction_P Parameter: Organism Value: A. thaliana
  misc_feature: MA Experiment 20001451 PARAMETER Experiment Name: At_Far-red-induction_P Parameter: Plant Line Value: Columbia
  misc_feature: MA Experiment 20001451 PARAMETER Experiment Name: At_Far-red-induction_P Parameter: Timepoint (hr) Value: 24
  misc_feature: MA Experiment 20001451 PARAMETER Experiment Name: At_Far-red-induction_P Parameter: Tissue Value: Whole Plant
  misc_feature: MA Experiment ID: 20001757 Result: Down-regulated in Transcription
  misc_feature: MA Experiment 20001757 PARAMETER Experiment Name: At_50mM_NH4NO3_L-to-H_P Parameter: Timepoint (hr) Value: 6
  misc_feature: MA Experiment 20001757 PARAMETER Experiment Name: At_50mM_NH4NO3_L-to-H_P Parameter: Tissue Value: Leaf
  misc_feature: MA Experiment 20001757 PARAMETER Experiment Name: At_50mM_NH4NO3_L-to-H_P Parameter: Treatment Value: 50mM NH4NO3 vs 100mM Mannitol
tttcattgtgaactcacaaagatgttggtgtccgcaagggtagagaaacaaaagcgtgttgcttatcaggggaaggcgacagtgcttgctctcggtaaggccttgccgagcaatgttgtttcccaggagaatctcgtggaggagtatctccgtgaaatcaaatgcgataacctttctatcaaagacaagctgcaacacttgtgcaaaagcacaactgtcaagacacgctacacagtcatgtcacgggagacgctgcacaaataccctgaactagcaaccgagggttccccaaccatcaaacagaggcttgagattgcaaacgatgcggttgtgcagatggcatatgaagcgagcttggtttgcatcaaggaatggggaagggcagtggaagatatcactcatcttgtctacgtttcctccagtgagttccgtttgcccggaggtgatctttacctctcggcacagctgggccttagcaacgaggttcagagagtgatgctgtattttcttggatgctatggaggtttgagtgggctgcgcgtggccaaagacattgctgagaacaacccagggagccgtgtgttgctcaccacctctgagactaccgttctggggttccgcccacccaacaaagctcgtccttacaacttagtcggggctgcactctttggagatggagcagctgccctgatcatcggagcagaccctacagagtcggaatctcctttcatggagcttcactgtgctatgcagcagttcctgccccaaacacagggggtgatcgacgggcggctgtcagaagagggcataaccttcaagctaggaagagacctccctcagaagatcgaagacaacgtggaggagttctgcaagaagctagtggcaaaggctggctctggtgcgttggagttgaatgaccttttctgggcagttcatcctggtggaccagccatcctgagcgggctggagacaaagctgaagctgaagccggaaaagctggaatgcagcagaagggcgttgatggattatgggaacgtaagcagcaacaccatcttctacataatggacaaagtcagagatgagcttgagaagaaaggcacagagggagaagagtggggtctgggcttagctttcggaccgggaatcactttcgaaggctttctcatgaggaacctctaaatgtatatgaactggacatttctcaacaaataaaatatacaggaaccgatgctaacacacatacatcatgtaatggttgcattagttttgttctttaatggtaaatcacagaaatacatcaatacagtaagtttatatacataattgaagtattcttcaatggcatcttacttcatgcat

SEQ ID NO: 101616 - protein, 392 aa, Arabidopsis thaliana
  peptide (1)..(392): Ceres Seq. ID no. 13608288
  misc_feature (10)..(236): Pfam Name: Chalcone and stilbene synthases, N-terminal domain Pfam Description: Chalcone and stilbene synthases, N-terminal
  misc_feature (8)..(392): Homolog of NCBI NO: 15236691 NR Description: chalcone and stilbene synthase family
  misc_feature (8)..(392): Homolog of NCBI NO: 21554288 NR Description: putative chalcone synthase [Arabidopsis thaliana]
  misc_feature (18)..(392): Homolog of NCBI NO: 15217605 NR Description: chalcone and stilbene synthase family
  misc_feature (31)..(392): Homolog of NCBI NO: 7433783 NR Description: anther-specific protein - wood tobacco
  misc_feature (10)..(392): Homolog of NCBI NO: 18418528 NR Description: chalcone and stilbene synthase family
  misc_feature (10)..(392): Homolog of NCBI NO: 7433787 NR Description: anther-specific protein homolog T11I11.90 -
  misc_feature (16)..(392): Homolog of NCBI NO: 7433790 NR Description: chalcone synthase homolog ChS1 - Monterey pine
  misc_feature (23)..(392): Homolog of NCBI NO: 37535500 NR Description: anther-specific protein YY2 [Oryza sativa
  misc_feature (24)..(392): Homolog of NCBI NO: 34902722 NR Description: putative chalcone synthase [Oryza sativa cultivar- group)] >gi|24060090|dbj|BAC21541.1| putative chalcone
  misc_feature (23)..(392): Homolog of NCBI NO: 7433785 NR Description: chalcone synthase homolog - rice
FHCELTKMLVSARVEKQKRVAYQGKATVLALGKALPSNVVSQENLVEEYLREIKCDNLSIKDKLQHLCKSTTVKTRYTVMSRETLHKYPELATEGSPTIKQRLEIANDAVVQMAYEASLVCIKEWGRAVEDITHLVYVSSSEFRLPGGDLYLSAQLGLSNEVQRVMLYFLGCYGGLSGLRVAKDIAENNPGSRVLLTTSETTVLGFRPPNKARPYNLVGAALFGDGAAALIIGADPTESESPFMELHCAMQQFLPQTQGVIDGRLSEEGITFKLGRDLPQKIEDNVEEFCKKLVAKAGSGALELNDLFWAVHPGGPAILSGLETKLKLKPEKLECSRRALMDYGNVSSNTIFYIMDKVRDELEKKGTEGEEWGLGLAFGPGITFEGFLMRNL

SEQ ID NO: 101617 - protein, 385 aa, Arabidopsis thaliana; identical to SEQ ID NO: 35194
  peptide (1)..(385): Ceres Seq. ID no. 13608289
  misc_feature (3)..(229): Pfam Name: Chalcone and stilbene synthases, N-terminal domain Pfam Description: Chalcone and stilbene synthases, N-terminal
  misc_feature (1)..(385): Homolog of NCBI NO: 15236691 NR Description: chalcone and stilbene synthase family
  misc_feature (1)..(385): Homolog of NCBI NO: 21554288 NR Description: putative chalcone synthase [Arabidopsis thaliana]
  misc_feature (11)..(385): Homolog of NCBI NO: 15217605 NR Description: chalcone and stilbene synthase family
  misc_feature (24)..(385): Homolog of NCBI NO: 7433783 NR Description: anther-specific protein - wood tobacco
  misc_feature (3)..(385): Homolog of NCBI NO: 18418528 NR Description: chalcone and stilbene synthase family
  misc_feature (3)..(385): Homolog of NCBI NO: 7433787 NR Description: anther-specific protein homolog T11I11.90 -
  misc_feature (9)..(385): Homolog of NCBI NO: 7433790 NR Description: chalcone synthase homolog ChS1 - Monterey pine
  misc_feature (16)..(385): Homolog of NCBI NO: 37535500 NR Description: anther-specific protein YY2 [Oryza sativa
  misc_feature (17)..(385): Homolog of NCBI NO: 34902722 NR Description: putative chalcone synthase [Oryza sativa cultivar- group)] >gi|24060090|dbj|BAC21541.1| putative chalcone
  misc_feature (16)..(385): Homolog of NCBI NO: 7433785 NR Description: chalcone synthase homolog - rice

SEQ ID NO: 101618 - protein, 313 aa, Arabidopsis thaliana; identical to SEQ ID NO: 35195
  peptide (1)..(313): Ceres Seq. ID no. 13608290
  misc_feature (1)..(157): Pfam Name: Chalcone and stilbene synthases, N-terminal domain Pfam Description: Chalcone and stilbene synthases, N-terminal
  misc_feature (1)..(313): Homolog of NCBI NO: 15236691 NR Description: chalcone and stilbene synthase family
  misc_feature (1)..(313): Homolog of NCBI NO: 21554288 NR Description: putative chalcone synthase [Arabidopsis thaliana]
  misc_feature (1)..(313): Homolog of NCBI NO: 15217605 NR Description: chalcone and stilbene synthase family
  misc_feature (1)..(313): Homolog of NCBI NO: 7433783 NR Description: anther-specific protein - wood tobacco
  misc_feature (1)..(313): Homolog of NCBI NO: 18418528 NR Description: chalcone and stilbene synthase family
  misc_feature (1)..(313): Homolog of NCBI NO: 7433787 NR Description: anther-specific protein homolog T11I11.90 -
  misc_feature (1)..(313): Homolog of NCBI NO: 7433790 NR Description: chalcone synthase homolog ChS1 - Monterey pine
  misc_feature (1)..(313): Homolog of NCBI NO: 37535500 NR Description: anther-specific protein YY2 [Oryza sativa
  misc_feature (1)..(313): Homolog of NCBI NO: 34902722 NR Description: putative chalcone synthase [Oryza sativa cultivar- group)] >gi|24060090|dbj|BAC21541.1| putative chalcone
  misc_feature (1)..(313): Homolog of NCBI NO: 7433785 NR Description: chalcone synthase homolog - rice

SEQ ID NO: 101619 - DNA, 712 bp, Arabidopsis thaliana
  misc_feature (1)..(712): Ceres Seq. ID no. 13608302
  misc_feature: MA Experiment ID: 108434 Result: Down-regulated in Transcription
  misc_feature: MA Experiment 108434 PARAMETER Experiment Name: At_Root_Tips_cDNA_P Parameter: Tissue Value: Root Tips
  misc_feature: MA Experiment ID: 108595 Result: Up-regulated in Transcription
  misc_feature: MA Experiment 108595 PARAMETER Experiment Name: At_Ler-pi_Ovule_cDNA_P Parameter: Plant Line Value: null
  misc_feature: MA Experiment ID: 20000224 Result: Down-regulated in Transcription
  misc_feature: MA Experiment ID: 20001905 Result: Up-regulated in Transcription
  misc_feature: MA Experiment 20001905 PARAMETER Experiment Name: At_Drought_Reproduction_P Parameter: Age (day) Value: 40
  misc_feature: MA Experiment 20001905 PARAMETER Experiment Name: At_Drought_Reproduction_P Parameter: Organism Value: A. thaliana
  misc_feature: MA Experiment 20001905 PARAMETER Experiment Name: At_Drought_Reproduction_P Parameter: Plant Line Value: WS
  misc_feature: MA Experiment 20001905 PARAMETER Experiment Name: At_Drought_Reproduction_P Parameter: Timepoint (day) Value: 10
  misc_feature: MA Experiment 20001905 PARAMETER Experiment Name: At_Drought_Reproduction_P Parameter: Tissue Value: Rosettes
  misc_feature: MA Experiment 20001905 PARAMETER Experiment Name: At_Drought_Reproduction_P Parameter: Treatment Value: Drought vs. No Drought
  misc_feature: MA Experiment ID: 20001910 Result: Up-regulated in Transcription
  misc_feature: MA Experiment 20001910 PARAMETER Experiment Name: At_Drought_Reproduction_P Parameter: Age (day) Value: 37
  misc_feature: MA Experiment 20001910 PARAMETER Experiment Name: At_Drought_Reproduction_P Parameter: Organism Value: A. thaliana
  misc_feature: MA Experiment 20001910 PARAMETER Experiment Name: At_Drought_Reproduction_P Parameter: Plant Line Value: WS
  misc_feature: MA Experiment 20001910 PARAMETER Experiment Name: At_Drought_Reproduction_P Parameter: Timepoint (day) Value: 7
  misc_feature: MA Experiment 20001910 PARAMETER Experiment Name: At_Drought_Reproduction_P Parameter: Tissue Value: Flowers
  misc_feature: MA Experiment 20001910 PARAMETER Experiment Name: At_Drought_Reproduction_P Parameter: Treatment Value: Drought vs. No Drought
aaacaacgtttcgtcttctcagattctttacctttcttaaggaaaaatcccaaaagagagaagataaaaatctcgcattcagattttagggtttctgacaaattctccgatgaaattcaagatccgaatctcggcaatgtcgacaatctcgccgtcattagccgtaattgcgtttctttttctgattcttctgaatctatcttcggttttcgctgatccttcgacggaaggaggagagattattaggttaccttcggagaagatcaacggtgaaaaaaacagaggcgaattctgtgaaggaattgctaaaccggcttcgtgtccggttcagtgtttcaggcctgatccggtttgcggtgaagacagcgttacttactggtgcggttgtgcagatgctttgtgccatggtgttcgtgttgtgaaacaaggagcttgtgatgttggtaatggtgttggtttgtctgttcctggacaagctctgcttttgatacacattgtctggatgatgcttcttgggttttctattctctttgggctcttttgattttggttctaatttctctgaatcaaaacaacatatagaagattgtttaggttttcagattgcaaatgacgaatcttttttgtttatactcttctttttttctttatattgctctgtattcatattacattaaaactatgaggaaatattattattatttggtttgtt

SEQ ID NO: 101620 - protein, 144 aa, Arabidopsis thaliana
  peptide (1)..(144): Ceres Seq. ID no. 13608303
  misc_feature (62)..(109): Pfam Name: Kazal-type serine protease inhibitor domain Pfam Description: Kazal-type serine protease inhibitor domain
  misc_feature (1)..(144): Homolog of NCBI NO: 18411677 NR Description: expressed protein [Arabidopsis thaliana]
  misc_feature (10)..(144): Homolog of NCBI NO: 21555759 NR Description: unknown [Arabidopsis thaliana]
  misc_feature (15)..(144): Homolog of NCBI NO: 18412211 NR Description: expressed protein [Arabidopsis thaliana]
  misc_feature (15)..(144): Homolog of NCBI NO: 21554106 NR Description: unknown [Arabidopsis thaliana]
  misc_feature (18)..(142): Homolog of NCBI NO: 34909170 NR Description: P0468B07.28 [Oryza sativa (japonica
MKFKIRISAMSTISPSLAVIAFLFLILLNLSSVFADPSTEGGEIIRLPSEKINGEKNRGEFCEGIAKPASCPVQCFRPDPVCGEDSVTYWCGCADALCHGVRVVKQGACDVGNGVGLSVPGQALLLIHIVWMMLLGFSILFGLF

SEQ ID NO: 101621 - protein, 135 aa, Arabidopsis thaliana; identical to SEQ ID NO: 21178
  peptide (1)..(135): Ceres Seq. ID no. 13608304
  misc_feature (53)..(100): Pfam Name: Kazal-type serine protease inhibitor domain Pfam Description: Kazal-type serine protease inhibitor domain
  misc_feature (1)..(135): Homolog of NCBI NO: 18411677 NR Description: expressed protein [Arabidopsis thaliana]
  misc_feature (1)..(135): Homolog of NCBI NO: 21555759 NR Description: unknown [Arabidopsis thaliana]
  misc_feature (6)..(135): Homolog of NCBI NO: 18412211 NR Description: expressed protein [Arabidopsis thaliana]
  misc_feature (6)..(135): Homolog of NCBI NO: 21554106 NR Description: unknown [Arabidopsis thaliana]
  misc_feature (9)..(133): Homolog of NCBI NO: 34909170 NR Description: P0468B07.28 [Oryza sativa (japonica

SEQ ID NO: 101622 - DNA, 1302 bp, Arabidopsis thaliana
  misc_feature (1)..(1302): Ceres Seq. ID no. 13608305
  misc_feature: MA Experiment ID: 108434 Result: Up-regulated in Transcription
  misc_feature: MA Experiment 108434 PARAMETER Experiment Name: At_Root_Tips_cDNA_P Parameter: Tissue Value: Root Tips
  misc_feature: MA Experiment ID: 108461 Result: Down-regulated in Transcription
  misc_feature: MA Experiment 108461 PARAMETER Experiment Name: At_Germinating_Seeds_cDNA_P Parameter: Age (day) Value: 1 vs. 0
  misc_feature: MA Experiment 108461 PARAMETER Experiment Name: At_Germinating_Seeds_cDNA_P Parameter: Tissue Value: Germinating Seeds
  misc_feature: MA Experiment ID: 108462 Result: Down-regulated in Transcription
  misc_feature: MA Experiment 108462 PARAMETER Experiment Name: At_Germinating_Seeds_cDNA_P Parameter: Age (day) Value: 2 vs. 0
  misc_feature: MA Experiment 108462 PARAMETER Experiment Name: At_Germinating_Seeds_cDNA_P Parameter: Tissue Value: Germinating Seeds
  misc_feature: MA Experiment ID: 108463 Result: Down-regulated in Transcription
  misc_feature: MA Experiment 108463 PARAMETER Experiment Name: At_Germinating_Seeds_cDNA_P Parameter: Age (day) Value: 3 vs. 0
  misc_feature: MA Experiment 108463 PARAMETER Experiment Name: At_Germinating_Seeds_cDNA_P Parameter: Tissue Value: Germinating Seeds
  misc_feature: MA Experiment ID: 108464 Result: Down-regulated in Transcription
  misc_feature: MA Experiment 108464 PARAMETER Experiment Name: At_Germinating_Seeds_cDNA_P Parameter: Age (day) Value: 4 vs. 0
  misc_feature: MA Experiment 108464 PARAMETER Experiment Name: At_Germinating_Seeds_cDNA_P Parameter: Tissue Value: Germinating Seeds
  misc_feature: MA Experiment ID: 108488 Result: Up-regulated in Transcription
  misc_feature: MA Experiment ID: 108489 Result: Up-regulated in Transcription
  misc_feature: MA Experiment ID: 108573 Result: Down-regulated in Transcription
  misc_feature: MA Experiment 108573 PARAMETER Experiment Name: At_Drought_cDNA_P Parameter: Timepoint (hr) Value: 6
  misc_feature: MA Experiment 108573 PARAMETER Experiment Name: At_Drought_cDNA_P Parameter: Tissue Value: Aerial
  misc_feature: MA Experiment 108573 PARAMETER Experiment Name: At_Drought_cDNA_P Parameter: Treatment Value: Drought vs. No Drought
  misc_feature: MA Experiment ID: 108577 Result: Down-regulated in Transcription
  misc_feature: MA Experiment 108577 PARAMETER Experiment Name: At_42deg_Heat_cDNA_P Parameter: Temperature (deg C) Value: 42 vs. 22
  misc_feature: MA Experiment 108577 PARAMETER Experiment Name: At_42deg_Heat_cDNA_P Parameter: Timepoint (hr) Value: 6
  misc_feature: MA Experiment 108577 PARAMETER Experiment Name: At_42deg_Heat_cDNA_P Parameter: Tissue Value: Aerial
  misc_feature: MA Experiment ID: 20000090 Result: Up-regulated in Transcription
  misc_feature: MA Experiment ID: 20000180 Result: Down-regulated in Transcription
  misc_feature: MA Experiment 20000180 PARAMETER Experiment Name: At_Germinating_Seeds_P Parameter: Age (hr) Value: 24 vs. 0
  misc_feature: MA Experiment 20000180 PARAMETER Experiment Name: At_Germinating_Seeds_P Parameter: Tissue Value: Germinating Seeds
  misc_feature: MA Experiment ID: 20001451 Result: Down-regulated in Transcription
  misc_feature: MA Experiment 20001451 PARAMETER Experiment Name: At_Far-red-induction_P Parameter: Age (day) Value: 7
  misc_feature: MA Experiment 20001451 PARAMETER Experiment Name: At_Far-red-induction_P Parameter: Light Value: Far-red vs. White
  misc_feature: MA Experiment 20001451 PARAMETER Experiment Name: At_Far-red-induction_P Parameter: Organism Value: A. thaliana
  misc_feature: MA Experiment 20001451 PARAMETER Experiment Name: At_Far-red-induction_P Parameter: Plant Line Value: Columbia
  misc_feature: MA Experiment 20001451 PARAMETER Experiment Name: At_Far-red-induction_P Parameter: Timepoint (hr) Value: 24
  misc_feature: MA Experiment 20001451 PARAMETER Experiment Name: At_Far-red-induction_P Parameter: Tissue Value: Whole Plant
  misc_feature: MA Experiment ID: 20001458 Result: Up-regulated in Transcription
  misc_feature: MA Experiment 20001458 PARAMETER Experiment Name: At_50mM_NH4NO3_L-to-H_P Parameter: Age (day) Value: Undefined
  misc_feature: MA Experiment 20001458 PARAMETER Experiment Name: At_50mM_NH4NO3_L-to-H_P Parameter: Organism Value: Undefined
  misc_feature: MA Experiment 20001458 PARAMETER Experiment Name: At_50mM_NH4NO3_L-to-H_P Parameter: Plant Line Value: Undefined
  misc_feature: MA Experiment 20001458 PARAMETER Experiment Name: At_50mM_NH4NO3_L-to-H_P Parameter: Timepoint (hr) Value: 2
  misc_feature: MA Experiment 20001458 PARAMETER Experiment Name: At_50mM_NH4NO3_L-to-H_P Parameter: Tissue Value: Siliques
  misc_feature: MA Experiment 20001458 PARAMETER Experiment Name: At_50mM_NH4NO3_L-to-H_P Parameter: Treatment Value: 50mM NH4NO3 vs. 100mM Manitol
  misc_feature: MA Experiment ID: 20001557 Result: Up-regulated in Transcription
  misc_feature: MA Experiment 20001557 PARAMETER Experiment Name: At_Drought_Soil_Dry_P Parameter: Age (day) Value: 27
  misc_feature: MA Experiment 20001557 PARAMETER Experiment Name: At_Drought_Soil_Dry_P Parameter: Organism Value: A. thaliana
  misc_feature: MA Experiment 20001557 PARAMETER Experiment Name: At_Drought_Soil_Dry_P Parameter: Plant Line Value: WS
  misc_feature: MA Experiment 20001557 PARAMETER Experiment Name: At_Drought_Soil_Dry_P Parameter: Post Timepoint (hr) Value: 3
  misc_feature: MA Experiment 20001557 PARAMETER Experiment Name: At_Drought_Soil_Dry_P Parameter: Post-Treatment Value: Re-Water vs. No Drought
  misc_feature: MA Experiment 20001557 PARAMETER Experiment Name: At_Drought_Soil_Dry_P Parameter: Timepoint (day) Value: 13
  misc_feature: MA Experiment 20001557 PARAMETER Experiment Name: At_Drought_Soil_Dry_P Parameter: Treatment Value: Drought vs. No Drought
  misc_feature: MA Experiment ID: 20001558 Result: Up-regulated in Transcription
  misc_feature: MA Experiment 20001558 PARAMETER Experiment Name: At_Drought_Soil_Dry_P Parameter: Age (day) Value: 27
  misc_feature: MA Experiment 20001558 PARAMETER Experiment Name: At_Drought_Soil_Dry_P Parameter: Organism Value: A. thaliana
  misc_feature: MA Experiment 20001558 PARAMETER Experiment Name: At_Drought_Soil_Dry_P Parameter: Plant Line Value: WS
  misc_feature: MA Experiment 20001558 PARAMETER Experiment Name: At_Drought_Soil_Dry_P Parameter: Post Timepoint (hr) Value: 6
  misc_feature: MA Experiment 20001558 PARAMETER Experiment Name: At_Drought_Soil_Dry_P Parameter: Post-Treatment Value: Re-Water vs. No Drought
  misc_feature: MA Experiment 20001558 PARAMETER Experiment Name: At_Drought_Soil_Dry_P Parameter: Timepoint (day) Value: 13
  misc_feature: MA Experiment 20001558 PARAMETER Experiment Name: At_Drought_Soil_Dry_P Parameter: Treatment Value: Drought vs. No Drought
  misc_feature: MA Experiment ID: 20001757 Result: Up-regulated in Transcription
  misc_feature: MA Experiment 20001757 PARAMETER Experiment Name: At_50mM_NH4NO3_L-to-H_P Parameter: Timepoint (hr) Value: 6
  misc_feature: MA Experiment 20001757 PARAMETER Experiment Name: At_50mM_NH4NO3_L-to-H_P Parameter: Tissue Value: Leaf
  misc_feature: MA Experiment 20001757 PARAMETER Experiment Name: At_50mM_NH4NO3_L-to-H_P Parameter: Treatment Value: 50mM NH4NO3 vs 100mM Mannitol
attctcagctttgccgttttcatcgattaaagagagagaggcttcgttcgccgtccgtcgtaaaaatggggttcaagaggaagaaagatgatggtgatggtgaggaaatggaatctgatgttcgtggaaagtctactttcagtgggggtgagaagaggaatgtgatacttccttcgatgattaagaacaaagataagagatcaaaagtgtatgcgaagcagaagcatgagaagaaattggagaagcagaagaagattagagctcgtgatgctgctgagaaacgagctttagagcttggagaagagcctccacaaaagatgattccgaagacgattgagaatacaagagaatctgatgaaactgtttgcagacctgacgatgaagaattgtttgcggatattgatgctgatgagtttaatccagttctgagacgtgagattgcacctaaggtcttgctcacaacatgtcgtttcaattccactagaggacctgctttaatatctgagttgctttcggtgataccaaactctcattatcaaaagagaggaacctatgatttgaagaagattgtagaatacgcaacgaagaaagattttacatctcttattgttgttcatacaaatcgtagagaacctgatgcgcttcttatcatcggtttgccaaatggtcctactgctcatttcaaattgtcaaatcttgttctaaggaaggatattaagaatcacggaaatcctacaagccatcaaccagaactggttttgaataactttacaacgcgtttagggaatcgtgttgggagattttttcaatcactcttccctccggatcctaatttccgtggtaggagagttgtaacattccacaaccagcgtgactttatatttttcagacatcaccgttacatatttgagacaaaggaaagcaagagtgataaaggaaaagaagagacaataaaacctcgtcttcaggaatgcggtcctcgattcacgcttaagctagttactctacagcatggaacttttgacaccaaaggtggagaatttgaatgggttcataagcctgaaatggacacgagcaggagaaggttcttcttataaattctgctgtcttccgagtttcaccaagttttgtgtttattttgcattttcgaattttccctacctccgtccaaaattgtatgtctttaaaacttctcatttcttttttcaatatagccatgagccatcgaaacaatcgtaagagtacttgtttcaacaatataggccctcgttttttactaagctatatatagttggttaaact

SEQ ID NO: 101623 - protein, 364 aa, Arabidopsis thaliana
  peptide (1)..(364): Ceres Seq. ID no. 13608306
  misc_feature (22)..(364): Homolog of NCBI NO: 18411672 NR Description: expressed protein [Arabidopsis thaliana]
  misc_feature (26)..(364): Homolog of NCBI NO: 7485389 NR Description: hypothetical protein F11O4.6 - Arabidopsis >gi|3695379|gb|AAC62782.1| contains similarity to a C. elegans protein F44G4.1 (GB:Z49910) and several yeast hypothetical
  misc_feature (22)..(211): Homolog of NCBI NO: 7485389 NR Description: hypothetical protein F11O4.6 - Arabidopsis >gi|3695379|gb|AAC62782.1| contains similarity to a C. elegans protein F44G4.1 (GB:Z49910) and several yeast hypothetical
  misc_feature (25)..(364): Homolog of NCBI NO: 27371215 NR Description: Similar to RNA processing factor 1 [Xenopus
  misc_feature (21)..(364): Homolog of NCBI NO: 33440502 NR Description: Unknown (protein for IMAGE:5694049) [Mus musculus]
  misc_feature (58)..(364): Homolog of NCBI NO: 13376605 NR Description: RNA processing factor 1 [Homo sapiens] unnamed protein product [Homo sapiens]
  misc_feature (58)..(364): Homolog of NCBI NO: 17225079 NR Description: RNA processing factor 1 [Homo sapiens]
  misc_feature (77)..(364): Homolog of NCBI NO: 21312560 NR Description: RIKEN cDNA 2310066N05 [Mus musculus]
  misc_feature (100)..(364): Homolog of NCBI NO: 11360239 NR Description: hypothetical protein DKFZp761G0415.1 - human
  misc_feature (50)..(364): Homolog of NCBI NO: 17534031 NR Description: IMP4 family (45.2 kD) [Caenorhabditis elegans] Hypothetical protein F44G4.1 in chromosome II
SQLCRFHRLKRERLRSPSVVKMGFKRKKDDGDGEEMESDVRGKSTFSGGEKRNVILPSMIKNKDKRSKVYAKQKHEKKLEKQKKIRARDAAEKRALELGEEPPQKMIPKTIENTRESDETVCRPDDEELFADIDADEFNPVLRREIAPKVLLTTCRFNSTRGPALISELLSVIPNSHYQKRGTYDLKKIVEYATKKDFTSLIVVHTNRREPDALLIIGLPNGPTAHFKLSNLVLRKDIKNHGNPTSHQPELVLNNFTTRLGNRVGRFFQSLFPPDPNFRGRRVVTFHNQRDFIFFRHHRYIFETKESKSDKGKEETIKPRLQECGPRFTLKLVTLQHGTFDTKGGEFEWVHKPEMDTSRRRFFL

SEQ ID NO: 101624 - protein, 343 aa, Arabidopsis thaliana; identical to SEQ ID NO: 35833
  peptide (1)..(343): Ceres Seq. ID no. 13608307
  misc_feature (1)..(343): Homolog of NCBI NO: 18411672 NR Description: expressed protein [Arabidopsis thaliana]
  misc_feature (5)..(343): Homolog of NCBI NO: 7485389 NR Description: hypothetical protein F11O4.6 - Arabidopsis >gi|3695379|gb|AAC62782.1| contains similarity to a C. elegans protein F44G4.1 (GB:Z49910) and several yeast hypothetical
  misc_feature (1)..(190): Homolog of NCBI NO: 7485389 NR Description: hypothetical protein F11O4.6 - Arabidopsis >gi|3695379|gb|AAC62782.1| contains similarity to a C. elegans protein F44G4.1 (GB:Z49910) and several yeast hypothetical
  misc_feature (4)..(343): Homolog of NCBI NO: 27371215 NR Description: Similar to RNA processing factor 1 [Xenopus
  misc_feature (1)..(343): Homolog of NCBI NO: 33440502 NR Description: Unknown (protein for IMAGE:5694049) [Mus musculus]
  misc_feature (37)..(343): Homolog of NCBI NO: 13376605 NR Description: RNA processing factor 1 [Homo sapiens] unnamed protein product [Homo sapiens]
  misc_feature (37)..(343): Homolog of NCBI NO: 17225079 NR Description: RNA processing factor 1 [Homo sapiens]
  misc_feature (56)..(343): Homolog of NCBI NO: 21312560 NR Description: RIKEN cDNA 2310066N05 [Mus musculus]
  misc_feature (79)..(343): Homolog of NCBI NO: 11360239 NR Description: hypothetical protein DKFZp761G0415.1 - human
  misc_feature (29)..(343): Homolog of NCBI NO: 17534031 NR Description: IMP4 family (45.2 kD) [Caenorhabditis elegans] Hypothetical protein F44G4.1 in chromosome II

SEQ ID NO: 101625 - protein, 329 aa, Arabidopsis thaliana; identical to SEQ ID NO: 35834
  peptide (1)..(329): Ceres Seq. ID no. 13608308
  misc_feature (1)..(329): Homolog of NCBI NO: 18411672 NR Description: expressed protein [Arabidopsis thaliana]
  misc_feature (1)..(329): Homolog of NCBI NO: 7485389 NR Description: hypothetical protein F11O4.6 - Arabidopsis >gi|3695379|gb|AAC62782.1| contains similarity to a C. elegans protein F44G4.1 (GB:Z49910) and several yeast hypothetical
  misc_feature (1)..(176): Homolog of NCBI NO: 7485389 NR Description: hypothetical protein F11O4.6 - Arabidopsis >gi|3695379|gb|AAC62782.1| contains similarity to a C. elegans protein F44G4.1 (GB:Z49910) and several yeast hypothetical
  misc_feature (1)..(329): Homolog of NCBI NO: 27371215 NR Description: Similar to RNA processing factor 1 [Xenopus
  misc_feature (1)..(329): Homolog of NCBI NO: 33440502 NR Description: Unknown (protein for IMAGE:5694049) [Mus musculus]
  misc_feature (23)..(329): Homolog of NCBI NO: 13376605 NR Description: RNA processing factor 1 [Homo sapiens] unnamed protein product [Homo sapiens]
  misc_feature (23)..(329): Homolog of NCBI NO: 17225079 NR Description: RNA processing factor 1 [Homo sapiens]
  misc_feature (42)..(329): Homolog of NCBI NO: 21312560 NR Description: RIKEN cDNA 2310066N05 [Mus musculus]
  misc_feature (65)..(329): Homolog of NCBI NO: 11360239 NR Description: hypothetical protein DKFZp761G0415.1 - human
  misc_feature (15)..(329): Homolog of NCBI NO: 17534031 NR Description: IMP4 family (45.2 kD) [Caenorhabditis elegans] Hypothetical protein F44G4.1 in chromosome II

SEQ ID NO: 101626 - DNA, 953 bp, Arabidopsis thaliana
  misc_feature (1)..(953): Ceres Seq. ID no. 13608313
  misc_feature: MA Experiment ID: 108434 Result: Down-regulated in Transcription
  misc_feature: MA Experiment 108434 PARAMETER Experiment Name: At_Root_Tips_cDNA_P Parameter: Tissue Value: Root Tips
  misc_feature: MA Experiment ID: 108461 Result: Down-regulated in Transcription
  misc_feature: MA Experiment 108461 PARAMETER Experiment Name: At_Germinating_Seeds_cDNA_P Parameter: Age (day) Value: 1 vs. 0
  misc_feature: MA Experiment 108461 PARAMETER Experiment Name: At_Germinating_Seeds_cDNA_P Parameter: Tissue Value: Germinating Seeds
  misc_feature: MA Experiment ID: 108462 Result: Down-regulated in Transcription
  misc_feature: MA Experiment 108462 PARAMETER Experiment Name: At_Germinating_Seeds_cDNA_P Parameter: Age (day) Value: 2 vs. 0
  misc_feature: MA Experiment 108462 PARAMETER Experiment Name: At_Germinating_Seeds_cDNA_P Parameter: Tissue Value: Germinating Seeds
  misc_feature: MA Experiment ID: 108463 Result: Down-regulated in Transcription
  misc_feature: MA Experiment 108463 PARAMETER Experiment Name: At_Germinating_Seeds_cDNA_P Parameter: Age (day) Value: 3 vs. 0
  misc_feature: MA Experiment 108463 PARAMETER Experiment Name: At_Germinating_Seeds_cDNA_P Parameter: Tissue Value: Germinating Seeds
  misc_feature: MA Experiment ID: 108469 Result: Up-regulated in Transcription
  misc_feature: MA Experiment ID: 108501 Result: Down-regulated in Transcription
  misc_feature: MA Experiment 108501 PARAMETER Experiment Name: At_ap2_floral_buds_cDNA_P Parameter: Plant Line Value: ap2 (Ler.)
  misc_feature: MA Experiment 108501 PARAMETER Experiment Name: At_ap2_floral_buds_cDNA_P Parameter: Tissue Value: Closed Flower
  misc_feature: MA Experiment ID: 108574 Result: Down-regulated in Transcription
  misc_feature: MA Experiment 108574 PARAMETER Experiment Name: At_Wounding__cDNA_P Parameter: Timepoint (hr) Value: 1
  misc_feature: MA Experiment 108574 PARAMETER Experiment Name: At_Wounding__cDNA_P Parameter: Tissue Value: Aerial
  misc_feature: MA Experiment 108574 PARAMETER Experiment Name: At_Wounding__cDNA_P Parameter: Treatment Value: Wounding vs. No Wounding
  misc_feature: MA Experiment ID: 108579 Result: Down-regulated in Transcription
  misc_feature: MA Experiment 108579 PARAMETER Experiment Name: At_4deg_Cold_cDNA_P Parameter: Temperature (deg C) Value: 4 vs. 22
  misc_feature: MA Experiment 108579 PARAMETER Experiment Name: At_4deg_Cold_cDNA_P Parameter: Timepoint (hr) Value: 6
  misc_feature: MA Experiment 108579 PARAMETER Experiment Name: At_4deg_Cold_cDNA_P Parameter: Tissue Value: Aerial
  misc_feature: MA Experiment ID: 108585 Result: Up-regulated in Transcription
  misc_feature: MA Experiment 108585 PARAMETER Experiment Name: At_5mM_NaNP_cDNA_P Parameter: Timepoint (hr) Value: 6
  misc_feature: MA Experiment 108585 PARAMETER Experiment Name: At_5mM_NaNP_cDNA_P Parameter: Tissue Value: Aerial
  misc_feature: MA Experiment 108585 PARAMETER Experiment Name: At_5mM_NaNP_cDNA_P Parameter: Treatment Value: null
  misc_feature: MA Experiment ID: 108595 Result: Down-regulated in Transcription
  misc_feature: MA Experiment 108595 PARAMETER Experiment Name: At_Ler-pi_Ovule_cDNA_P Parameter: Plant Line Value: null
  misc_feature: MA Experiment ID: 108605 Result: Down-regulated in Transcription
  misc_feature: MA Experiment 108605 PARAMETER Experiment Name: At_100uM_ABA_cDNA_P Parameter: Timepoint (hr) Value: 6
  misc_feature: MA Experiment 108605 PARAMETER Experiment Name: At_100uM_ABA_cDNA_P Parameter: Tissue Value: Aerial
  misc_feature: MA Experiment 108605 PARAMETER Experiment Name: At_100uM_ABA_cDNA_P Parameter: Treatment Value: 100uM ABA vs. No Treatment
  misc_feature: MA Experiment ID: 108607 Result: Down-regulated in Transcription
  misc_feature: MA Experiment 108607 PARAMETER Experiment Name: At_100uM_ABA_cDNA_P Parameter: Timepoint (hr) Value: 4
  misc_feature: MA Experiment 108607 PARAMETER Experiment Name: At_100uM_ABA_cDNA_P Parameter: Tissue Value: Aerial
  misc_feature: MA Experiment 108607 PARAMETER Experiment Name: At_100uM_ABA_cDNA_P Parameter: Treatment Value: 100uM ABA vs. No Treatment
  misc_feature: MA Experiment ID: 108667 Result: Up-regulated in Transcription
  misc_feature: MA Experiment 108667 PARAMETER Experiment Name: At_2mM_SA_cDNA_P Parameter: Plant Line Value: WS
  misc_feature: MA Experiment 108667 PARAMETER Experiment Name: At_2mM_SA_cDNA_P Parameter: Timepoint (hr) Value: 1
  misc_feature: MA Experiment 108667 PARAMETER Experiment Name: At_2mM_SA_cDNA_P Parameter: Treatment Value: 2mM SA vs. No Treatment
  misc_feature: MA Experiment ID: 108668 Result: Up-regulated in Transcription
  misc_feature: MA Experiment 108668 PARAMETER Experiment Name: At_2mM_SA_cDNA_P Parameter: Plant Line Value: WS
  misc_feature: MA Experiment 108668 PARAMETER Experiment Name: At_2mM_SA_cDNA_P Parameter: Timepoint (hr) Value: 6
  misc_feature: MA Experiment 108668 PARAMETER Experiment Name: At_2mM_SA_cDNA_P Parameter: Treatment Value: 2mM SA vs. No Treatment
  misc_feature: MA Experiment ID: 20000069 Result: Up-regulated in Transcription
  misc_feature: MA Experiment 20000069 PARAMETER Experiment Name: At_100uM_ABA_Mutants_cDNA_P Parameter: Plant Line Value: CS23
  misc_feature: MA Experiment 20000069 PARAMETER Experiment Name: At_100uM_ABA_Mutants_cDNA_P Parameter: Timepoint (hr) Value: 6
  misc_feature: MA Experiment 20000069 PARAMETER Experiment Name: At_100uM_ABA_Mutants_cDNA_P Parameter: Tissue Value: Aerial
  misc_feature: MA Experiment 20000069 PARAMETER Experiment Name: At_100uM_ABA_Mutants_cDNA_P Parameter: Treatment Value: 100uM ABA vs. No Treatment
  misc_feature: MA Experiment ID: 20000070 Result: Up-regulated in Transcription
  misc_feature: MA Experiment 20000070 PARAMETER Experiment Name: At_100uM_ABA_Mutants_cDNA_P Parameter: Plant Line Value: CS24
  misc_feature: MA Experiment 20000070 PARAMETER Experiment Name: At_100uM_ABA_Mutants_cDNA_P Parameter: Timepoint (hr) Value: 6
  misc_feature: MA Experiment 20000070 PARAMETER Experiment Name: At_100uM_ABA_Mutants_cDNA_P Parameter: Tissue Value: Aerial
  misc_feature: MA Experiment 20000070 PARAMETER Experiment Name: At_100uM_ABA_Mutants_cDNA_P Parameter: Treatment Value: 100uM ABA vs. No Treatment
  misc_feature: MA Experiment ID: 20000086 Result: Up-regulated in Transcription
  misc_feature: MA Experiment 20000086 PARAMETER Experiment Name: At_100uM_ABA_Mutants_cDNA_P Parameter: Plant Line Value: CS22
  misc_feature: MA Experiment 20000086 PARAMETER Experiment Name: At_100uM_ABA_Mutants_cDNA_P Parameter: Timepoint (hr) Value: 6
  misc_feature: MA Experiment 20000086 PARAMETER Experiment Name: At_100uM_ABA_Mutants_cDNA_P Parameter: Tissue Value: Aerial
  misc_feature: MA Experiment 20000086 PARAMETER Experiment Name: At_100uM_ABA_Mutants_cDNA_P Parameter: Treatment Value: 100uM ABA vs. No Treatment
  misc_feature: MA Experiment ID: 20000087 Result: Up-regulated in Transcription
  misc_feature: MA Experiment 20000087 PARAMETER Experiment Name: At_100uM_ABA_Mutants_cDNA_P Parameter: Plant Line Value: WS
  misc_feature: MA Experiment 20000087 PARAMETER Experiment Name: At_100uM_ABA_Mutants_cDNA_P Parameter: Timepoint (hr) Value: 6
  misc_feature: MA Experiment 20000087 PARAMETER Experiment Name: At_100uM_ABA_Mutants_cDNA_P Parameter: Tissue Value: Aerial
  misc_feature: MA Experiment 20000087 PARAMETER Experiment Name: At_100uM_ABA_Mutants_cDNA_P Parameter: Treatment Value: 100uM ABA vs. No Treatment
  misc_feature: MA Experiment ID: 20000088 Result: Up-regulated in Transcription
  misc_feature: MA Experiment 20000088 PARAMETER Experiment Name: At_100uM_ABA_Mutants_cDNA_P Parameter: Plant Line Value: Landsberg
  misc_feature: MA Experiment 20000088 PARAMETER Experiment Name: At_100uM_ABA_Mutants_cDNA_P Parameter: Timepoint (hr) Value: 6
  misc_feature: MA Experiment 20000088 PARAMETER Experiment Name: At_100uM_ABA_Mutants_cDNA_P Parameter: Tissue Value: Aerial
  misc_feature: MA Experiment 20000088 PARAMETER Experiment Name: At_100uM_ABA_Mutants_cDNA_P Parameter: Treatment Value: 100uM ABA vs. No Treatment
  misc_feature: MA Experiment ID: 20000089 Result: Up-regulated in Transcription
  misc_feature: MA Experiment ID: 20000090 Result: Up-regulated in Transcription
  misc_feature: MA Experiment ID: 20000113 Result: Down-regulated in Transcription
  misc_feature: MA Experiment 20000113 PARAMETER Experiment Name: At_42deg_Heat_cDNA_P Parameter: Temperature (deg C) Value: 42 vs. 22
  misc_feature: MA Experiment 20000113 PARAMETER Experiment Name: At_42deg_Heat_cDNA_P Parameter: Timepoint (hr) Value: 8
  misc_feature: MA Experiment 20000113 PARAMETER Experiment Name: At_42deg_Heat_cDNA_P Parameter: Tissue Value: Aerial
  misc_feature: MA Experiment ID: 20000355 Result: Down-regulated in Transcription
  misc_feature: MA Experiment 20000355 PARAMETER Experiment Name: At_Siliques_Sub_P Parameter: Age (day) Value: 21
  misc_feature: MA Experiment 20000355 PARAMETER Experiment Name: At_Siliques_Sub_P Parameter: Organism Value: A. thaliana
  misc_feature: MA Experiment 20000355 PARAMETER Experiment Name: At_Siliques_Sub_P Parameter: Plant Line Value: WS
  misc_feature: MA Experiment 20000355 PARAMETER Experiment Name: At_Siliques_Sub_P Parameter: Tissue Value: Less Than 5mm Siliques vs. Whole Plant
  misc_feature: MA Experiment ID: 20000440 Result: Down-regulated in Transcription
  misc_feature: MA Experiment 20000440 PARAMETER Experiment Name: At_Closed-Flower__Sub_P Parameter: Tissue Value: Closed Flower vs. Whole Plant
catcaccttcaccttcaacatcaaacatcacatttcttcctcttttctctcttttttctcagtcttcaaagagtttcttagtaacccaaatcaatggcaggtatcaaagttttcggacacccagcttccattgccaccaggagagtcctcatcgccctccacgagaaaaacctcgactttgagctcgttcatgtcgaactcaaagacggtgagcacaagaaggagcctttcctctcccgcaacccttttggtcaggttccagcctttgaagatggagacctcaagctcttcgaatcaagagcgattactcagtacatagctcaccgatatgaaaaccaaggaaccaaccttctccaaaccgactccaagaacatatctcagtacgcaatcatggccattggaatgcaagtagaagatcaccagttcgacccagtggcttcaaagcttgcttttgaacaaatattcaagtccatctacggcttgaccacagacgaagccgttgttgcagaagaggaggctaagttagccaaggtccttgatgtctacgaggctaggctcaaggagttcaagtatttggctggtgaaactttcactttgactgatcttcaccacattcccgcgattcaatacctgctcggaactcccaccaagaagctcttcaccgagcgtccacgtgtcaatgagtgggtggctgaaatcaccaagaggccagcttccgagaaggttcagtgagaaatttctaaaaggaaaatatggttttgcttcagtcacagtaataatgctaagattaaataagcggctttctcattgcccaatttctcagtactttctttctgttgtatcctctgttttctttcagttatgtgagtgtgtgtgtatgctcttgagagtatctttggcaaaaactatttatctaatcttcaagctattctaaaataaatcaattagttaac

SEQ ID NO: 101627 - protein, 212 aa, Arabidopsis thaliana; identical to SEQ ID NO: 20959
  peptide (1)..(212): Ceres Seq. ID no. 13608314
  misc_feature (98)..(206): Pfam Name: Glutathione S-transferase, C-terminal domain Pfam Description: Glutathione S-transferase, C-terminal domain
  misc_feature (1)..(212): Homolog of NCBI NO: 15235401 NR Description: glutathione transferase, putative [Arabidopsis
  misc_feature (2)..(212): Homolog of NCBI NO: 2554769 NR Description: Chain A, Structure Of Glutathione S-Transferase
  misc_feature (1)..(212): Homolog of NCBI NO: 21555418 NR Description: Atpm24.1 glutathione S transferase [Arabidopsis
  misc_feature (1)..(211): Homolog of NCBI NO: 15227063 NR Description: glutathione transferase, putative [Arabidopsis
  misc_feature (1)..(211): Homolog of NCBI NO: 31790099 NR Description: glutathione S-transferase 4 [Brassica juncea]
  misc_feature (1)..(211): Homolog of NCBI NO: 31790097 NR Description: glutathione S-transferase 3 [Brassica juncea]
  misc_feature (1)..(211): Homolog of NCBI NO: 31790093 NR Description: glutathione S-transferase 1 [Brassica juncea]
  misc_feature (1)..(211): Homolog of NCBI NO: 31790095 NR Description: glutathione S-transferase 2 [Brassica juncea]
  misc_feature (1)..(211): Homolog of NCBI NO: 31790105 NR Description: glutathione S-transferase 6 [Brassica juncea]
  misc_feature (1)..(211): Homolog of NCBI NO: 31790103 NR Description: glutathione S-transferase 5 [Brassica juncea]

SEQ ID NO: 101628 - protein, 113 aa, Arabidopsis thaliana; identical to SEQ ID NO: 20960
  peptide (1)..(113): Ceres Seq. ID no. 13608315
  misc_feature (1)..(107): Pfam Name: Glutathione S-transferase, C-terminal domain Pfam Description: Glutathione S-transferase, C-terminal domain
  misc_feature (1)..(113): Homolog of NCBI NO: 15235401 NR Description: glutathione transferase, putative [Arabidopsis
  misc_feature (1)..(113): Homolog of NCBI NO: 2554769 NR Description: Chain A, Structure Of Glutathione S-Transferase
  misc_feature (1)..(113): Homolog of NCBI NO: 21555418 NR Description: Atpm24.1 glutathione S transferase [Arabidopsis
  misc_feature (1)..(112): Homolog of NCBI NO: 15227063 NR Description: glutathione transferase, putative [Arabidopsis
  misc_feature (1)..(112): Homolog of NCBI NO: 31790099 NR Description: glutathione S-transferase 4 [Brassica juncea]
  misc_feature (1)..(112): Homolog of NCBI NO: 31790097 NR Description: glutathione S-transferase 3 [Brassica juncea]
  misc_feature (1)..(112): Homolog of NCBI NO: 31790093 NR Description: glutathione S-transferase 1 [Brassica juncea]
  misc_feature (1)..(112): Homolog of NCBI NO: 31790095 NR Description: glutathione S-transferase 2 [Brassica juncea]
  misc_feature (1)..(112): Homolog of NCBI NO: 31790105 NR Description: glutathione S-transferase 6 [Brassica juncea]
  misc_feature (1)..(112): Homolog of NCBI NO: 31790103 NR Description: glutathione S-transferase 5 [Brassica juncea]

SEQ ID NO: 101629 - protein, 109 aa, Arabidopsis thaliana; identical to SEQ ID NO: 20961
  peptide (1)..(109): Ceres Seq. ID no. 13608316
  misc_feature (1)..(103): Pfam Name: Glutathione S-transferase, C-terminal domain Pfam Description: Glutathione S-transferase, C-terminal domain
  misc_feature (1)..(109): Homolog of NCBI NO: 15235401 NR Description: glutathione transferase, putative [Arabidopsis
  misc_feature (1)..(109): Homolog of NCBI NO: 2554769 NR Description: Chain A, Structure Of Glutathione S-Transferase
  misc_feature (1)..(109): Homolog of NCBI NO: 21555418 NR Description: Atpm24.1 glutathione S transferase [Arabidopsis
  misc_feature (1)..(108): Homolog of NCBI NO: 15227063 NR Description: glutathione transferase, putative [Arabidopsis
  misc_feature (1)..(108): Homolog of NCBI NO: 31790099 NR Description: glutathione S-transferase 4 [Brassica juncea]
  misc_feature (1)..(108): Homolog of NCBI NO: 31790097 NR Description: glutathione S-transferase 3 [Brassica juncea]
  misc_feature (1)..(108): Homolog of NCBI NO: 31790093 NR Description: glutathione S-transferase 1 [Brassica juncea]
  misc_feature (1)..(108): Homolog of NCBI NO: 31790095 NR Description: glutathione S-transferase 2 [Brassica juncea]
  misc_feature (1)..(108): Homolog of NCBI NO: 31790105 NR Description: glutathione S-transferase 6 [Brassica juncea]
  misc_feature (1)..(108): Homolog of NCBI NO: 31790103 NR Description: glutathione S-transferase 5 [Brassica juncea]

SEQ ID NO: 101630 - DNA, 1154 bp, Arabidopsis thaliana
  misc_feature (1)..(1154): Ceres Seq. ID no. 13608324
  misc_feature: MA Experiment ID: 108569 Result: Up-regulated in Transcription
  misc_feature: MA Experiment 108569 PARAMETER Experiment Name: At_0.001%_MeJA__cDNA_P Parameter: Timepoint (hr) Value: 6
  misc_feature: MA Experiment 108569 PARAMETER Experiment Name: At_0.001%_MeJA__cDNA_P Parameter: Tissue Value: Aerial
  misc_feature: MA Experiment 108569 PARAMETER Experiment Name: At_0.001%_MeJA__cDNA_P Parameter: Treatment Value: 0.001% MeJA vs. No Treatment
  misc_feature: MA Experiment ID: 108573 Result: Up-regulated in Transcription
  misc_feature: MA Experiment 108573 PARAMETER Experiment Name: At_Drought_cDNA_P Parameter: Timepoint (hr) Value: 6
  misc_feature: MA Experiment 108573 PARAMETER Experiment Name: At_Drought_cDNA_P Parameter: Tissue Value: Aerial
  misc_feature: MA Experiment 108573 PARAMETER Experiment Name: At_Drought_cDNA_P Parameter: Treatment Value: Drought vs. No Drought
  misc_feature: MA Experiment ID: 108577 Result: Down-regulated in Transcription
  misc_feature: MA Experiment 108577 PARAMETER Experiment Name: At_42deg_Heat_cDNA_P Parameter: Temperature (deg C) Value: 42 vs. 22
  misc_feature: MA Experiment 108577 PARAMETER Experiment Name: At_42deg_Heat_cDNA_P Parameter: Timepoint (hr) Value: 6
  misc_feature: MA Experiment 108577 PARAMETER Experiment Name: At_42deg_Heat_cDNA_P Parameter: Tissue Value: Aerial
  misc_feature: MA Experiment ID: 20001451 Result: Down-regulated in Transcription
  misc_feature: MA Experiment 20001451 PARAMETER Experiment Name: At_Far-red-induction_P Parameter: Age (day) Value: 7
  misc_feature: MA Experiment 20001451 PARAMETER Experiment Name: At_Far-red-induction_P Parameter: Light Value: Far-red vs. White
  misc_feature: MA Experiment 20001451 PARAMETER Experiment Name: At_Far-red-induction_P Parameter: Organism Value: A. thaliana
  misc_feature: MA Experiment 20001451 PARAMETER Experiment Name: At_Far-red-induction_P Parameter: Plant Line Value: Columbia
  misc_feature: MA Experiment 20001451 PARAMETER Experiment Name: At_Far-red-induction_P Parameter: Timepoint (hr) Value: 24
  misc_feature: MA Experiment 20001451 PARAMETER Experiment Name: At_Far-red-induction_P Parameter: Tissue Value: Whole Plant
aaaattgaaattcgaaaacagaacaaaaaaaaaaatctctctcaatctctctcagatctgaatccatccatcaccgatctctaatggcggcaccaccagcatcatcctcggcgagggaagagttcgtgtacctcgcaaagctcgcagagcaagcggaacgttacgaagaaatggttgaattcatggaaaaagtcgctgaagccgttgacaaagacgaactcaccgtcgaagaacgtaatctcctctccgtcgcttacaaaaacgtaatcggcgctcgtcgtgcttcctggagaatcatctcttccattgaacaaaaagaagagagtcgtggtaacgatgaccatgtgaccacgatccgtgattacagaagcaagatcgaatctgagttatcgaaaatctgtgacggtattcttaagcttcttgatactagacttgttcctgcttctgctaatggagattctaaggttttttaccttaagatgaagggagattatcataggtatttggctgagtttaagactggtcaagagaggaaagatgctgctgaacatactctcaccgcttacaaagctgctcaggatattgctaatgctgaattggctccaacgcatccgattcgtcttggtttggctttgaatttctctgtgttttactatgagattcttaattctccagatcgtgcttgtaatctcgctaagcaggcgtttgatgaagccattgctgagttagatactcttggagaggagtcatacaaggatagtaccttgatcatgcagcttcttcgtgacaatcttactctctggacttctgacatgcaggacgaaagtccggaggagattaaagaagcagcagcaccaaagcctgctgaagaacagaaggagatctaagtttgtggtttcttttttcagtattcttaagttatgcaattataattatgtttctgcttggtgtttattttctaatctttcctttgctatccccgaagcttctaaggccgtctaattcttgtcctttgtttgcttttctcaatcgtggatgctactggatttctgttttgttttacttcttctcttgattgattgcatttcccggcttatgccttgtacttgaaactcagttttctctcttattaatgatttgccattcacctggtt

SEQ ID NO: 101631 - protein, 267 aa, Arabidopsis thaliana; identical to SEQ ID NO: 39219
  peptide (1)..(267): Ceres Seq. ID no. 13608325
  misc_feature (11)..(248): Pfam Name: 14-3-3 protein Pfam Description: 14-3-3 protein
  misc_feature (1)..(267): Homolog of NCBI NO: 18399524 NR Description: 14-3-3 protein GF14 phi (grf4) [Arabidopsis
  misc_feature (1)..(267): Homolog of NCBI NO: 14532442 NR Description: At1g35160/T32G9_30 [Arabidopsis thaliana]
  misc_feature (3)..(265): Homolog of NCBI NO: 18413181 NR Description: 14-3-3 protein GF14 chi (grf1) [Arabidopsis
  misc_feature (8)..(265): Homolog of NCBI NO: 18411901 NR Description: 14-3-3 protein GF14 omega (grf2) [Arabidopsis
  misc_feature (3)..(265): Homolog of NCBI NO: 1702986 NR Description: 14-3-3-like protein GF14 chi (General regulatory
  misc_feature (8)..(265): Homolog of NCBI NO: 487791 NR Description: GF14omega isoform
  misc_feature (4)..(266): Homolog of NCBI NO: 20340229 NR Description: 14-3-3-like protein [Thellungiella halophila]
  misc_feature (9)..(265): Homolog of NCBI NO: 13447104 NR Description: GF14 omega [Brassica napus]
  misc_feature (8)..(265): Homolog of NCBI NO: 1361987 NR Description: 14-3-3 protein homolog GF14 chi chain -
  misc_feature (1)..(265): Homolog of NCBI NO: 8099063 NR Description: 14-3-3 protein [Populus x canescens]

SEQ ID NO: 101632 - protein, 238 aa, Arabidopsis thaliana; identical to SEQ ID NO: 39220
  peptide (1)..(238): Ceres Seq. ID no. 13608326
  misc_feature (1)..(219): Pfam Name: 14-3-3 protein Pfam Description: 14-3-3 protein
  misc_feature (1)..(238): Homolog of NCBI NO: 18399524 NR Description: 14-3-3 protein GF14 phi (grf4) [Arabidopsis
  misc_feature (1)..(238): Homolog of NCBI NO: 14532442 NR Description: At1g35160/T32G9_30 [Arabidopsis thaliana]
  misc_feature (1)..(236): Homolog of NCBI NO: 18413181 NR Description: 14-3-3 protein GF14 chi (grf1) [Arabidopsis
  misc_feature (1)..(236): Homolog of NCBI NO: 18411901 NR Description: 14-3-3 protein GF14 omega (grf2) [Arabidopsis
  misc_feature (1)..(236): Homolog of NCBI NO: 1702986 NR Description: 14-3-3-like protein GF14 chi (General regulatory
  misc_feature (1)..(236): Homolog of NCBI NO: 487791 NR Description: GF14omega isoform
  misc_feature (1)..(237): Homolog of NCBI NO: 20340229 NR Description: 14-3-3-like protein [Thellungiella halophila]
  misc_feature (1)..(236): Homolog of NCBI NO: 13447104 NR Description: GF14 omega [Brassica napus]
  misc_feature (1)..(236): Homolog of NCBI NO: 1361987 NR Description: 14-3-3 protein homolog GF14 chi chain -
  misc_feature (1)..(236): Homolog of NCBI NO: 8099063 NR Description: 14-3-3 protein [Populus x canescens]

SEQ ID NO: 101633 - protein, 234 aa, Arabidopsis thaliana; identical to SEQ ID NO: 39221
  peptide (1)..(234): Ceres Seq. ID no. 13608327
  misc_feature (1)..(215): Pfam Name: 14-3-3 protein Pfam Description: 14-3-3 protein
  misc_feature (1)..(234): Homolog of NCBI NO: 18399524 NR Description: 14-3-3 protein GF14 phi (grf4) [Arabidopsis
  misc_feature (1)..(234): Homolog of NCBI NO: 14532442 NR Description: At1g35160/T32G9_30 [Arabidopsis thaliana]
  misc_feature (1)..(232): Homolog of NCBI NO: 18413181 NR Description: 14-3-3 protein GF14 chi (grf1) [Arabidopsis
  misc_feature (1)..(232): Homolog of NCBI NO: 18411901 NR Description: 14-3-3 protein GF14 omega (grf2) [Arabidopsis
  misc_feature (1)..(232): Homolog of NCBI NO: 1702986 NR Description: 14-3-3-like protein GF14 chi (General regulatory
  misc_feature (1)..(232): Homolog of NCBI NO: 487791 NR Description: GF14omega isoform
  misc_feature (1)..(233): Homolog of NCBI NO: 20340229 NR Description: 14-3-3-like protein [Thellungiella halophila]
  misc_feature (1)..(232): Homolog of NCBI NO: 13447104 NR Description: GF14 omega [Brassica napus]
  misc_feature (1)..(232): Homolog of NCBI NO: 1361987 NR Description: 14-3-3 protein homolog GF14 chi chain -
  misc_feature (1)..(232): Homolog of NCBI NO: 8099063 NR Description: 14-3-3 protein [Populus x canescens]

SEQ ID NO: 101634 - DNA, 825 bp, Arabidopsis thaliana
  misc_feature (1)..(825): Ceres Seq. ID no. 13608328
  misc_feature: MA Experiment ID: 20000171 Result: Up-regulated in Transcription
  misc_feature: MA Experiment 20000171 PARAMETER Experiment Name: At_42deg_Heat_P Parameter: Age (day) Value: 14
  misc_feature: MA Experiment 20000171 PARAMETER Experiment Name: At_42deg_Heat_P Parameter: Organism Value: A. thaliana
  misc_feature: MA Experiment 20000171 PARAMETER Experiment Name: At_42deg_Heat_P Parameter: Plant Line Value: WS
  misc_feature: MA Experiment 20000171 PARAMETER Experiment Name: At_42deg_Heat_P Parameter: Temperature (deg C) Value: 42 vs. 22
  misc_feature: MA Experiment 20000171 PARAMETER Experiment Name: At_42deg_Heat_P Parameter: Timepoint (hr) Value: 1
  misc_feature: MA Experiment 20000171 PARAMETER Experiment Name: At_42deg_Heat_P Parameter: Tissue Value: Aerial
aacaaagttgtgtctctctgaagtctgaaccaaaaagataagacgaaaaggagatcaatggaggaagaatacgtaagagtaataagcataacaacaataggagtaatctcatggggtctcattttcatccttgtaagacgaatcttctcaagctactcgttcgacttcagcacccgtatagtctcaacgcttcacgcaacaatcgctgtcactttagcaactctctcgattcaagattggtcttgtcctgtttgtcccattgcttctacatcgtctctccggcagatggaaacgttggcgttttcattgtcgtacatgatctacgatctcatttgtagccactttgatcaagtccttagcattgataatgcggttcatcattctgtttgcattcttggttttgtagctggacttttctaccaaaagtgtggatccgagatggtggcagcactttggataacagagatctcaagtccgtttcttcacctcagggagattcttaaagagattggttatagagacaccgacctaaatcttgcagccgatgtgtgttttgcaacaattttctcgttggccagaatggtgggtggaccttacctagtttacgtaacaatatcagccgataatcccattctcatcaaggcaatggcgttggggttacaacttgtgagcgcattctggttctataaaatcctcaaaatgatgagatacaaatttatcaaaagatcaatgtccaacaaaaaatcggcttagttgaaattccaaaaactctatcatgtaacatttgactcatccttttctatatgtaagttaaatgtgaggaat

SEQ ID NO: 101635 - protein, 231 aa, Arabidopsis thaliana
  peptide (1)..(231): Ceres Seq. ID no. 13608329
  misc_feature (1)..(231): Homolog of NCBI NO: 30693154 NR Description: expressed protein [Arabidopsis thaliana]
  misc_feature (1)..(224): Homolog of NCBI NO: 15219511 NR Description: hypothetical protein [Arabidopsis thaliana]
  misc_feature (1)..(230): Homolog of NCBI NO: 22330031 NR Description: expressed protein [Arabidopsis thaliana] unknown protein [Arabidopsis thaliana] unknown protein [Arabidopsis thaliana]
  misc_feature (1)..(164): Homolog of NCBI NO: 25518603 NR Description: hypothetical protein T32G9.28 - Arabidopsis >gi|12320960|gb|AAG50605.1|AC079605_10 hypothetical protein
  misc_feature (15)..(228): Homolog of NCBI NO: 34903030 NR Description: unnamed protein product [Oryza sativa (japonica group)] >gi|7228458|dbj|BAA92418.1| unnamed protein product
  misc_feature (1)..(76): Homolog of NCBI NO: 25405881 NR Description: protein F27F5.9 [imported] - Arabidopsis thaliana
  misc_feature (121)..(164): Homolog of NCBI NO: 25405881 NR Description: protein F27F5.9 [imported] - Arabidopsis thaliana
  misc_feature (19)..(223): Homolog of NCBI NO: 34535216 NR Description: unnamed protein product [Homo sapiens]
  misc_feature (34)..(223): Homolog of NCBI NO: 27661880 NR Description: hypothetical protein XP_236191 [Rattus norvegicus]
MEEEYVRVISITTIGVISWGLIFILVRRIFSSYSFDFSTRIVSTLHATIAVTLATLSIQDWSCPVCPIASTSSLRQMETLAFSLSYMIYDLICSHFDQVLSIDNAVHHSVCILGFVAGLFYQKCGSEMVAALWITEISSPFLHLREILKEIGYRDTDLNLAADVCFATIFSLARMVGGPYLVYVTISADNPILIKAMALGLQLVSAFWFYKILKMMRYKFIKRSMSNKKSA

SEQ ID NO: 101636 - protein, 155 aa, Arabidopsis thaliana
  peptide (1)..(155): Ceres Seq. ID no. 13608330
  misc_feature (1)..(155): Homolog of NCBI NO: 30693154 NR Description: expressed protein [Arabidopsis thaliana]
  misc_feature (1)..(148): Homolog of NCBI NO: 15219511 NR Description: hypothetical protein [Arabidopsis thaliana]
  misc_feature (1)..(154): Homolog of NCBI NO: 22330031 NR Description: expressed protein [Arabidopsis thaliana] unknown protein [Arabidopsis thaliana] unknown protein [Arabidopsis thaliana]
  misc_feature (1)..(88): Homolog of NCBI NO: 25518603 NR Description: hypothetical protein T32G9.28 - Arabidopsis >gi|12320960|gb|AAG50605.1|AC079605_10 hypothetical protein
  misc_feature (1)..(152): Homolog of NCBI NO: 34903030 NR Description: unnamed protein product [Oryza sativa (japonica group)] >gi|7228458|dbj|BAA92418.1| unnamed protein product
  misc_feature (45)..(88): Homolog of NCBI NO: 25405881 NR Description: protein F27F5.9 [imported] - Arabidopsis thaliana
  misc_feature (1)..(147): Homolog of NCBI NO: 34535216 NR Description: unnamed protein product [Homo sapiens]
  misc_feature (1)..(147): Homolog of NCBI NO: 27661880 NR Description: hypothetical protein XP_236191 [Rattus norvegicus]
METLAFSLSYMIYDLICSHFDQVLSIDNAVHHSVCILGFVAGLFYQKCGSEMVAALWITEISSPFLHLREILKEIGYRDTDLNLAADVCFATIFSLARMVGGPYLVYVTISADNPILIKAMALGLQLVSAFWFYKILKMMRYKFIKRSMSNKKSA

SEQ ID NO: 101637 - protein, 145 aa, Arabidopsis thaliana
  peptide (1)..(145): Ceres Seq. ID no. 13608331
  misc_feature (1)..(145): Homolog of NCBI NO: 30693154 NR Description: expressed protein [Arabidopsis thaliana]
  misc_feature (1)..(138): Homolog of NCBI NO: 15219511 NR Description: hypothetical protein [Arabidopsis thaliana]
  misc_feature (1)..(144): Homolog of NCBI NO: 22330031 NR Description: expressed protein [Arabidopsis thaliana] unknown protein [Arabidopsis thaliana] unknown protein [Arabidopsis thaliana]
  misc_feature (1)..(78): Homolog of NCBI NO: 25518603 NR Description: hypothetical protein T32G9.28 - Arabidopsis >gi|12320960|gb|AAG50605.1|AC079605_10 hypothetical protein
  misc_feature (1)..(142): Homolog of NCBI NO: 34903030 NR Description: unnamed protein product [Oryza sativa (japonica group)] >gi|7228458|dbj|BAA92418.1| unnamed protein product
  misc_feature (35)..(78): Homolog of NCBI NO: 25405881 NR Description: protein F27F5.9 [imported] - Arabidopsis thaliana
  misc_feature (1)..(137): Homolog of NCBI NO: 34535216 NR Description: unnamed protein product [Homo sapiens]
  misc_feature (1)..(137): Homolog of NCBI NO: 27661880 NR Description: hypothetical protein XP_236191 [Rattus norvegicus]
MIYDLICSHFDQVLSIDNAVHHSVCILGFVAGLFYQKCGSEMVAALWITEISSPFLHLREILKEIGYRDTDLNLAADVCFATIFSLARMVGGPYLVYVTISADNPILIKAMALGLQLVSAFWFYKILKMMRYKFIKRSMSNKKSA

SEQ ID NO: 101638 - DNA, 3082 bp, Arabidopsis thaliana
  misc_feature (1)..(3082): Ceres Seq. ID no. 13608348
  misc_feature: MA Experiment ID: 108464 Result: Up-regulated in Transcription
  misc_feature: MA Experiment 108464 PARAMETER Experiment Name: At_Germinating_Seeds_cDNA_P Parameter: Age (day) Value: 4 vs. 0
  misc_feature: MA Experiment 108464 PARAMETER Experiment Name: At_Germinating_Seeds_cDNA_P Parameter: Tissue Value: Germinating Seeds
  misc_feature: MA Experiment ID: 108573 Result: Up-regulated in Transcription
  misc_feature: MA Experiment 108573 PARAMETER Experiment Name: At_Drought_cDNA_P Parameter: Timepoint (hr) Value: 6
  misc_feature: MA Experiment 108573 PARAMETER Experiment Name: At_Drought_cDNA_P Parameter: Tissue Value: Aerial
  misc_feature: MA Experiment 108573 PARAMETER Experiment Name: At_Drought_cDNA_P Parameter: Treatment Value: Drought vs. No Drought
  misc_feature: MA Experiment ID: 108667 Result: Up-regulated in Transcription
  misc_feature: MA Experiment 108667 PARAMETER Experiment Name: At_2mM_SA_cDNA_P Parameter: Plant Line Value: WS
  misc_feature: MA Experiment 108667 PARAMETER Experiment Name: At_2mM_SA_cDNA_P Parameter: Timepoint (hr) Value: 1
  misc_feature: MA Experiment 108667 PARAMETER Experiment Name: At_2mM_SA_cDNA_P Parameter: Treatment Value: 2mM SA vs. No Treatment
  misc_feature: MA Experiment ID: 108668 Result: Up-regulated in Transcription
  misc_feature: MA Experiment 108668 PARAMETER Experiment Name: At_2mM_SA_cDNA_P Parameter: Plant Line Value: WS
  misc_feature: MA Experiment 108668 PARAMETER Experiment Name: At_2mM_SA_cDNA_P Parameter: Timepoint (hr) Value: 6
  misc_feature: MA Experiment 108668 PARAMETER Experiment Name: At_2mM_SA_cDNA_P Parameter: Treatment Value: 2mM SA vs. No Treatment
  misc_feature: MA Experiment ID: 20000111 Result: Up-regulated in Transcription
  misc_feature: MA Experiment 20000111 PARAMETER Experiment Name: At_42deg_Heat_cDNA_P Parameter: Temperature (deg C) Value: 42 vs. 22
  misc_feature: MA Experiment 20000111 PARAMETER Experiment Name: At_42deg_Heat_cDNA_P Parameter: Timepoint (hr) Value: 6
  misc_feature: MA Experiment 20000111 PARAMETER Experiment Name: At_42deg_Heat_cDNA_P Parameter: Tissue Value: Aerial
  misc_feature: MA Experiment ID: 20000185 Result: Up-regulated in Transcription
  misc_feature: MA Experiment 20000185 PARAMETER Experiment Name: At_Roots__P Parameter: Age (day) Value: 7 vs. 21
  misc_feature: MA Experiment 20000185 PARAMETER Experiment Name: At_Roots__P Parameter: Organism Value: A. thaliana
  misc_feature: MA Experiment 20000185 PARAMETER Experiment Name: At_Roots__P Parameter: Tissue Value: Roots vs. Whole Plant
  misc_feature: MA Experiment ID: 20000227 Result: Down-regulated in Transcription
  misc_feature: MA Experiment 20000227 PARAMETER Experiment Name: At_Root-Tips-vs-Tops_P Parameter: Tissue Value: Root Tips vs. Root Tops
  misc_feature: MA Experiment ID: 20000264 Result: Up-regulated in Transcription
  misc_feature: MA Experiment 20000264 PARAMETER Experiment Name: At_Open_Flower_P Parameter: Age (day) Value: 21
  misc_feature: MA Experiment 20000264 PARAMETER Experiment Name: At_Open_Flower_P Parameter: Plant Line Value: WS
  misc_feature: MA Experiment 20000264 PARAMETER Experiment Name: At_Open_Flower_P Parameter: Tissue Value: Open Flower vs. Whole Plant
  misc_feature: MA Experiment ID: 20000265 Result: Up-regulated in Transcription
  misc_feature: MA Experiment 20000265 PARAMETER Experiment Name: At_Open_Flower_P Parameter: Age (day) Value: 21
  misc_feature: MA Experiment 20000265 PARAMETER Experiment Name: At_Open_Flower_P Parameter: Plant Line Value: WS
  misc_feature: MA Experiment 20000265 PARAMETER Experiment Name: At_Open_Flower_P Parameter: Tissue Value: Closed Flower vs. Whole Plant
  misc_feature: MA Experiment ID: 20000286 Result: Up-regulated in Transcription
  misc_feature: MA Experiment 20000286 PARAMETER Experiment Name: At_Open_Flower_P Parameter: Age (day) Value: 21
  misc_feature: MA Experiment 20000286 PARAMETER Experiment Name: At_Open_Flower_P Parameter: Plant Line Value: WS
  misc_feature: MA Experiment 20000286 PARAMETER Experiment Name: At_Open_Flower_P Parameter: Tissue Value: Half Open vs. Whole Plant
  misc_feature: MA Experiment ID: 20000436 Result: Up-regulated in Transcription
  misc_feature: MA Experiment 20000436 PARAMETER Experiment Name: At_Drought_P Parameter: Age (day) Value: 7
  misc_feature: MA Experiment 20000436 PARAMETER Experiment Name: At_Drought_P Parameter: Organism Value: A. thaliana
  misc_feature: MA Experiment 20000436 PARAMETER Experiment Name: At_Drought_P Parameter: Plant Line Value: WS
  misc_feature: MA Experiment 20000436 PARAMETER Experiment Name: At_Drought_P Parameter: Timepoint (hr) Value: 12
  misc_feature: MA Experiment 20000436 PARAMETER Experiment Name: At_Drought_P Parameter: Tissue Value: Whole Plant
  misc_feature: MA Experiment 20000436 PARAMETER Experiment Name: At_Drought_P Parameter: Treatment Value: Drought vs. No Drought
  misc_feature: MA Experiment ID: 20000437 Result: Up-regulated in Transcription
  misc_feature: MA Experiment 20000437 PARAMETER Experiment Name: At_Drought_P Parameter: Age (day) Value: 8
  misc_feature: MA Experiment 20000437 PARAMETER Experiment Name: At_Drought_P Parameter: Organism Value: A. thaliana
  misc_feature: MA Experiment 20000437 PARAMETER Experiment Name: At_Drought_P Parameter: Plant Line Value: WS
  misc_feature: MA Experiment 20000437 PARAMETER Experiment Name: At_Drought_P Parameter: Timepoint (hr) Value: 24
  misc_feature: MA Experiment 20000437 PARAMETER Experiment Name: At_Drought_P Parameter: Tissue Value: Whole Plant
  misc_feature: MA Experiment 20000437 PARAMETER Experiment Name: At_Drought_P Parameter: Treatment Value: Drought vs. No Drought
  misc_feature: MA Experiment ID: 20000439 Result: Up-regulated in Transcription
  misc_feature: MA Experiment 20000439 PARAMETER Experiment Name: At_Roots__P Parameter: Age (day) Value: 14 vs. 21
  misc_feature: MA Experiment 20000439 PARAMETER Experiment Name: At_Roots__P Parameter: Organism Value: A. thaliana
  misc_feature: MA Experiment 20000439 PARAMETER Experiment Name: At_Roots__P Parameter: Tissue Value: Roots vs. Whole Plant
  misc_feature: MA Experiment ID: 20000573 Result: Up-regulated in Transcription
  misc_feature: MA Experiment 20000573 PARAMETER Experiment Name: At_100uM_ABA_Mutants__P Parameter: Organism Value: A. thaliana
  misc_feature: MA Experiment 20000573 PARAMETER Experiment Name: At_100uM_ABA_Mutants__P Parameter: Plant Line Value: CS22 vs. Ler wt
  misc_feature: MA Experiment 20000573 PARAMETER Experiment Name: At_100uM_ABA_Mutants__P Parameter: Timepoint (hr) Value: N/A
  misc_feature: MA Experiment 20000573 PARAMETER Experiment Name: At_100uM_ABA_Mutants__P Parameter: Tissue Value: Whole Plant
  misc_feature: MA Experiment 20000573 PARAMETER Experiment Name: At_100uM_ABA_Mutants__P Parameter: Treatment Value: None
  misc_feature: MA Experiment ID: 20000574 Result: Up-regulated in Transcription
  misc_feature: MA Experiment 20000574 PARAMETER Experiment Name: At_100uM_ABA_Mutants__P Parameter: Organism Value: A. thaliana
  misc_feature: MA Experiment 20000574 PARAMETER Experiment Name: At_100uM_ABA_Mutants__P Parameter: Plant Line Value: CS23 vs. Ler wt
  misc_feature: MA Experiment 20000574 PARAMETER Experiment Name: At_100uM_ABA_Mutants__P Parameter: Timepoint (hr) Value: N/A
  misc_feature: MA Experiment 20000574 PARAMETER Experiment Name: At_100uM_ABA_Mutants__P Parameter: Tissue Value: Whole Plant
  misc_feature: MA Experiment 20000574 PARAMETER Experiment Name: At_100uM_ABA_Mutants__P Parameter: Treatment Value: None
  misc_feature: MA Experiment ID: 20000794 Result: Up-regulated in Transcription
  misc_feature: MA Experiment 20000794 PARAMETER Experiment Name: At_Petals_P Parameter: Age (day) Value: 23-25 days
  misc_feature: MA Experiment 20000794 PARAMETER Experiment Name: At_Petals_P Parameter: Plant Line Value: WS
  misc_feature: MA Experiment 20000794 PARAMETER Experiment Name: At_Petals_P Parameter: Tissue Value: Petals vs. Whole plant
  misc_feature: MA Experiment ID: 20001247 Result: Up-regulated in Transcription
  misc_feature: MA Experiment 20001247 PARAMETER Experiment Name: At_Far-red-induction_P Parameter: Age (day) Value: 7
  misc_feature: MA Experiment 20001247 PARAMETER Experiment Name: At_Far-red-induction_P Parameter: Light Value: Far-red vs. White
  misc_feature: MA Experiment 20001247 PARAMETER Experiment Name: At_Far-red-induction_P Parameter: Organism Value: A. thaliana
  misc_feature: MA Experiment 20001247 PARAMETER Experiment Name: At_Far-red-induction_P Parameter: Plant Line Value: Columbia
  misc_feature: MA Experiment 20001247 PARAMETER Experiment Name: At_Far-red-induction_P Parameter: Timepoint (hr) Value: 1
  misc_feature: MA Experiment 20001247 PARAMETER Experiment Name: At_Far-red-induction_P Parameter: Tissue Value: Whole Plant
  misc_feature: MA Experiment ID: 20001557 Result: Down-regulated in Transcription
  misc_feature: MA Experiment 20001557 PARAMETER Experiment Name: At_Drought_Soil_Dry_P Parameter: Age (day) Value: 27
  misc_feature: MA Experiment 20001557 PARAMETER Experiment Name: At_Drought_Soil_Dry_P Parameter: Organism Value: A. thaliana
  misc_feature: MA Experiment 20001557 PARAMETER Experiment Name: At_Drought_Soil_Dry_P Parameter: Plant Line Value: WS
  misc_feature: MA Experiment 20001557 PARAMETER Experiment Name: At_Drought_Soil_Dry_P Parameter: Post Timepoint (hr) Value: 3
  misc_feature: MA Experiment 20001557 PARAMETER Experiment Name: At_Drought_Soil_Dry_P Parameter: Post-Treatment Value: Re-Water vs. No Drought
  misc_feature: MA Experiment 20001557 PARAMETER Experiment Name: At_Drought_Soil_Dry_P Parameter: Timepoint (day) Value: 13
  misc_feature: MA Experiment 20001557 PARAMETER Experiment Name: At_Drought_Soil_Dry_P Parameter: Treatment Value: Drought vs. No Drought
  misc_feature: MA Experiment ID: 20001558 Result: Down-regulated in Transcription
  misc_feature: MA Experiment 20001558 PARAMETER Experiment Name: At_Drought_Soil_Dry_P Parameter: Age (day) Value: 27
  misc_feature: MA Experiment 20001558 PARAMETER Experiment Name: At_Drought_Soil_Dry_P Parameter: Organism Value: A. thaliana
  misc_feature: MA Experiment 20001558 PARAMETER Experiment Name: At_Drought_Soil_Dry_P Parameter: Plant Line Value: WS
  misc_feature: MA Experiment 20001558 PARAMETER Experiment Name: At_Drought_Soil_Dry_P Parameter: Post Timepoint (hr) Value: 6
  misc_feature: MA Experiment 20001558 PARAMETER Experiment Name: At_Drought_Soil_Dry_P Parameter: Post-Treatment Value: Re-Water vs. No Drought
  misc_feature: MA Experiment 20001558 PARAMETER Experiment Name: At_Drought_Soil_Dry_P Parameter: Timepoint (day) Value: 13
  misc_feature: MA Experiment 20001558 PARAMETER Experiment Name: At_Drought_Soil_Dry_P Parameter: Treatment Value: Drought vs. No Drought
  misc_feature: MA Experiment ID: 20001560 Result: Down-regulated in Transcription
  misc_feature: MA Experiment 20001560 PARAMETER Experiment Name: At_Drought_Soil_Dry_P Parameter: Age (day) Value: 28
  misc_feature: MA Experiment 20001560 PARAMETER Experiment Name: At_Drought_Soil_Dry_P Parameter: Organism Value: A. thaliana
  misc_feature: MA Experiment 20001560 PARAMETER Experiment Name: At_Drought_Soil_Dry_P Parameter: Plant Line Value: WS
  misc_feature: MA Experiment 20001560 PARAMETER Experiment Name: At_Drought_Soil_Dry_P Parameter: Post Timepoint (hr) Value: None
  misc_feature: MA Experiment 20001560 PARAMETER Experiment Name: At_Drought_Soil_Dry_P Parameter: Post-Treatment Value: None
  misc_feature: MA Experiment 20001560 PARAMETER Experiment Name: At_Drought_Soil_Dry_P Parameter: Timepoint (day) Value: 14
  misc_feature: MA Experiment 20001560 PARAMETER Experiment Name: At_Drought_Soil_Dry_P Parameter: Treatment Value: Drought vs. No Drought
acttgacaaaattgaaaaacgcgtctccgagaggaaaatttagagaaaagcttctcgcgatcgcatcgggctcgtagatcgatctcctcctccatccaatcttccgttttcgtattcaccgtccggtaagaccttccggtacttgtgaatcggagaagaggaaggagaaaaattatcgcgttcctggaaattgaatttctagggtttcgtttttttctgaattattctgattctgatttcgtcaagggtgtttttcttaattggttgattgatcgtctttctagttcaattgttgaaaagtaattgaacatctattgaaatctgcttctcgtgatttgattctgggtttcgttgattggtttttttcgaggggtttgtttgttttatccttttttatttctataagatcaatttctcattgagaagaatacgatggcagcagggggtgttgatgtttccagaagttccgttgctgtcaaaaaagactacgacttttacaggaatggttctcgtgatgtgtatgttcgacagagtggtagagatgacgagaggcgtcaaatcaaaaggcctagtgaccatgatctcaggaggaatgatgggcgtcaccgatcacggttggcatatgagaaaggggaactacgggaggaagcagaggttcagagaccctctgagaaaaggaggaagttttcacccatcgtgtggaatgcagaaaaagtgggtagagctccatctagggagaagaccaagtctcctttccctgttccgactacaactgtgatatccaatcaggctgttgctggtaagactacttcaaacgatcaagtgaatgccttgatgtcgccagaacctagttatcttgctccagtgcagccttcagaagccctgctggctgtgaaacatcctgttgatgatttggaggagggtcagttggaggaagaacaggtgatgcaggaggatgtaaaggagggtctgttggaggaagaacaagtgatgcaggaaccaaatataaagacatctaggtgggggacaggtttgacttccccaaaggaggagttaatatctgttaacgtttccaagactaatagatggaacaggagcagtttgacaccggagtgcgaggaagtaatggtgtctgaagaacagcagtgctattcgtctggatctggcagtggacatctcagcgtagagaagcttagtgcagatggaaattctggtcgtgagtattatagttctgatcatgatgagttagaacatgaagatcaagattctttaactccgggagagatgaacatgatgtttgggagcaggtctgtgaatgaatttcagaagctaaacaagataaatgaaggaacatatggaattgtttacaaagcaagggatgagaaaacaaaagagattgttgcgctcaaaaagatcaagatgaaggaagataggttcgaagaagagtatggattccctttgacatcattgagggaaattaacatacttttgtcatgcaatcaccctgcgattgtgaacgtgaaggaggttgtggttggagggaaaaacgataatgatgtttatatggtcatggaacacttagaacacgacctgaggggagtaatggatagaaggaaggaaccttttagcactagcgaagtcaagtgcttgatgatgcagctgttggatggtttgaaatacctccacacaaattggattatccacagggatctgaagccatctaatcttctgatgaacaattgtggggagttaaaaatatgtgattttgggatggcgcgccagtatgggagccctatcaagccttacacccagatggttattacccagtggtacaggccacctgaacttcttctaggagcaaaagagtactctacagcagttgatatgtggtcagtgggttgcattatggctgaactgttgtctcaaaagcctttgttcccgggtaagagtgagcttgaccaacttcagaagatctttgcggtccttggaacaccaaacgaagcaatatggcctgggttctcatcatttccgaatgctaaagccaagtttcctacacagccttacaatatgttacgtaagaagtttccagctatttcatttgtaggtggtcaaattctttctgaacgtggatttgatttgctgaacagtctactaactttggaccctgagaaacgtctaacagtggaagatgctctcaaccatggttggttccatgaagtcccgttaccaaaatccaaagatttcatgccgacatatcctccaaagcggtaactgagaaaaaacgtgctatcatttggacgagaggatgtcaacaaatacacagggaagtcgactggtcgtattttggtattttcctttttactcaaaagacttgctttcatctattcttaactcagttgcgttgctttgttgcctggagattcagggcattctagtgtaccatttattcggattcatgtgtaaatatgagtggtccgtaaaactgaaaggtgtgtttctctcttttcgttaggaccctaatgttattgctatcaagagttgtacacactattgactcacatgctttaatggaagagatctcagtattcactttctctctctagtaattgggttgggatggttattgtttatgtcctcatatttcttctgtgcattgtttttattcacgaggtaaacgcaaagagtttatcacaaacgtgagaatggaagttgacatcagtaagtttattttgattacttatttaccacgctctgttatcaatgttggtttgttgttcgacgtccctttgtctttgaggtgctcgtatttggtctgttggcagtgagaaaaagatgattcatgatgagtttctgtggacataggaggtatggcagtggtttttttcatgttaatccgagaattaagggatttgggataaaaagctatatagaaagaagctaaaataagtttgtcttcaacactataaccctttgtcctcctttctttttaacttctgtaaacagctaagctaaatcaagttcatttcaataacgaataaactagaatcagcattacctttgacgaggccataaacagaaagga

SEQ ID NO: 101639 - protein, 612 aa, Arabidopsis thaliana; identical to SEQ ID NO: 39029
  peptide (1)..(612): Ceres Seq. ID no. 13608349
  misc_feature (297)..(593): Pfam Name: Protein kinase domain Pfam Description: Protein kinase domain
  misc_feature (45)..(609): Homolog of NCBI NO: 38344237 NR Description: OJ991113_30.14 [Oryza sativa (japonica
  misc_feature (267)..(609): Homolog of NCBI NO: 15220477 NR Description: protein kinase family [Arabidopsis thaliana]
  misc_feature (267)..(609): Homolog of NCBI NO: 17064846 NR Description: putative protein kinase [Arabidopsis thaliana]
  misc_feature (25)..(611): Homolog of NCBI NO: 3978441 NR Description: PITSLRE protein kinase alpha SV9 isoform [Homo
  misc_feature (26)..(611): Homolog of NCBI NO: 507427 NR Description: PITSLRE isoform PBETA21
  misc_feature (26)..(611): Homolog of NCBI NO: 1082285 NR Description: protein kinase (EC 2.7.1.37) cdc2-related PITSLRE
  misc_feature (26)..(611): Homolog of NCBI NO: 16357492 NR Description: cell division cycle 2-like 2 isoform 1; cell
  misc_feature (26)..(611): Homolog of NCBI NO: 3978440 NR Description: PITSLRE protein kinase alpha SV5 isoform [Homo
  misc_feature (26)..(611): Homolog of NCBI NO: 16332358 NR Description: cell division cycle 2-like 1 (PITSLRE proteins)
  misc_feature (26)..(611): Homolog of NCBI NO: 16332362 NR Description: cell division cycle 2-like 1 (PITSLRE proteins)

SEQ ID NO: 101640 - protein, 478 aa, Arabidopsis thaliana; identical to SEQ ID NO: 39030
  peptide (1)..(478): Ceres Seq. ID no. 13608350
  misc_feature (163)..(459): Pfam Name: Protein kinase domain Pfam Description: Protein kinase domain
  misc_feature (1)..(475): Homolog of NCBI NO: 38344237 NR Description: OJ991113_30.14 [Oryza sativa (japonica
  misc_feature (133)..(475): Homolog of NCBI NO: 15220477 NR Description: protein kinase family [Arabidopsis thaliana]
  misc_feature (133)..(475): Homolog of NCBI NO: 17064846 NR Description: putative protein kinase [Arabidopsis thaliana]
  misc_feature (1)..(477): Homolog of NCBI NO: 3978441 NR Description: PITSLRE protein kinase alpha SV9 isoform [Homo
  misc_feature (1)..(477): Homolog of NCBI NO: 507427 NR Description: PITSLRE isoform PBETA21
  misc_feature (1)..(477): Homolog of NCBI NO: 1082285 NR Description: protein kinase (EC 2.7.1.37) cdc2-related PITSLRE
  misc_feature (1)..(477): Homolog of NCBI NO: 16357492 NR Description: cell division cycle 2-like 2 isoform 1; cell
  misc_feature (1)..(477): Homolog of NCBI NO: 3978440 NR Description: PITSLRE protein kinase alpha SV5 isoform [Homo
  misc_feature (1)..(477): Homolog of NCBI NO: 16332362 NR Description: cell division cycle 2-like 1 (PITSLRE proteins)
  misc_feature (1)..(477): Homolog of NCBI NO: 16332364 NR Description: cell division cycle 2-like 1 (PITSLRE proteins)

SEQ ID NO: 101641 - protein, 441 aa, Arabidopsis thaliana; identical to SEQ ID NO: 39031
  peptide (1)..(441): Ceres Seq. ID no. 13608351
  misc_feature (126)..(422): Pfam Name: Protein kinase domain Pfam Description: Protein kinase domain
  misc_feature (1)..(438): Homolog of NCBI NO: 38344237 NR Description: OJ991113_30.14 [Oryza sativa (japonica
  misc_feature (96)..(438): Homolog of NCBI NO: 15220477 NR Description: protein kinase family [Arabidopsis thaliana]
  misc_feature (96)..(438): Homolog of NCBI NO: 17064846 NR Description: putative protein kinase [Arabidopsis thaliana]
  misc_feature (1)..(440): Homolog of NCBI NO: 3978441 NR Description: PITSLRE protein kinase alpha SV9 isoform [Homo
  misc_feature (1)..(440): Homolog of NCBI NO: 507427 NR Description: PITSLRE isoform PBETA21
  misc_feature (1)..(440): Homolog of NCBI NO: 16357492 NR Description: cell division cycle 2-like 2 isoform 1; cell
  misc_feature (1)..(440): Homolog of NCBI NO: 1082285 NR Description: protein kinase (EC 2.7.1.37) cdc2-related PITSLRE
  misc_feature (1)..(440): Homolog of NCBI NO: 3978440 NR Description: PITSLRE protein kinase alpha SV5 isoform [Homo
  misc_feature (1)..(440): Homolog of NCBI NO: 16332358 NR Description: cell division cycle 2-like 1 (PITSLRE proteins)
  misc_feature (1)..(440): Homolog of NCBI NO: 16332362 NR Description: cell division cycle 2-like 1 (PITSLRE proteins)

SEQ ID NO: 101642 - DNA, 1503 bp, Arabidopsis thaliana
  misc_feature (1)..(1503): Ceres Seq. ID no. 13608352
  misc_feature: MA Experiment ID: 20001905 Result: Down-regulated in Transcription
  misc_feature: MA Experiment 20001905 PARAMETER Experiment Name: At_Drought_Reproduction_P Parameter: Age (day) Value: 40
  misc_feature: MA Experiment 20001905 PARAMETER Experiment Name: At_Drought_Reproduction_P Parameter: Organism Value: A. thaliana
  misc_feature: MA Experiment 20001905 PARAMETER Experiment Name: At_Drought_Reproduction_P Parameter: Plant Line Value: WS
  misc_feature: MA Experiment 20001905 PARAMETER Experiment Name: At_Drought_Reproduction_P Parameter: Timepoint (day) Value: 10
  misc_feature: MA Experiment 20001905 PARAMETER Experiment Name: At_Drought_Reproduction_P Parameter: Tissue Value: Rosettes
  misc_feature: MA Experiment 20001905 PARAMETER Experiment Name: At_Drought_Reproduction_P Parameter: Treatment Value: Drought vs. No Drought
  misc_feature: MA Experiment ID: 20001911 Result: Down-regulated in Transcription
  misc_feature: MA Experiment 20001911 PARAMETER Experiment Name: At_Drought_Reproduction_P Parameter: Age (day) Value: 40
  misc_feature: MA Experiment 20001911 PARAMETER Experiment Name: At_Drought_Reproduction_P Parameter: Organism Value: A. thaliana
  misc_feature: MA Experiment 20001911 PARAMETER Experiment Name: At_Drought_Reproduction_P Parameter: Plant Line Value: WS
  misc_feature: MA Experiment 20001911 PARAMETER Experiment Name: At_Drought_Reproduction_P Parameter: Timepoint (day) Value: 10
  misc_feature: MA Experiment 20001911 PARAMETER Experiment Name: At_Drought_Reproduction_P Parameter: Tissue Value: Flowers
  misc_feature: MA Experiment 20001911 PARAMETER Experiment Name: At_Drought_Reproduction_P Parameter: Treatment Value: Drought vs. No Drought
cccgaaagcaaagtaagctagcttagctaggtccaagatccaagctttggaattttgtaaattgtctccactcttagccgttttaatggaaactgttccaccatctcccattacatggccagatgggggagctctcactaacgactgggtacatgggcttatgtcgtgtttcgaatggtcttcatggaatctacctccttcccagttaccttcactattgcctgtcaacgtctttgattccctcgtcctcaccgctcataaaatcctccacaaagaacgtaactgcgttcatatcgatgatcttgactctgtatccaacgttgttgtggttggtgacattcatggtcagcttcatgaccttcttttcctattgaaagatactggctttccttgtcaaaaccggtgttatgttttcaacggagactatgtggatcgcggtgcttggggacttgaaaccttccttgttctcttgtcctggaaggttttgatgccggacagagtctacctactccgtggtaatcatgagtcaaagtattgtacatctatgtatggtttcgagaaggaagtgcttacaaaatacggagacaagggaaaacatgtgtaccggaaatgtttgggttgctttgaaggtcttcctttggcttccataatttctggacgtgtttatacagcacatggagggcttttccgcagcccagtcttgcctaagcgaacaacaagggggaaaaagaaccgtcgggtagttcttctggaacctgagccgagctcaatgaaactcggtaccttagatgagttgatgcaagctcgaagatcagttcttgatcctccttgggaaggttcaaacttgataccaggagacgttttatggtctgatccttcaatgactccgggcctttcaccaaatgaacagagaggcattggtcttctttggggtcccgattgtacagaggattttttgaagaaatatgaactgaagttgatcatcagatcacatgaaggtccagatgctagagagaagagaactggtcttggtggaatggacaatggatatacaatagaccacaatgtcgaatccggaaagcttatcactattttcagtgcacctgactatccgcaattccaagcaacagaagagaggtacaaaaacaaaggagcatatattattttgcaggcgcctgatttctcggatcctcaatttcatagtttcgaagctgttaaaccgcgaccaaaggcgcatccatattatgactttgaaaatgtcattgattctgatgatgagatggataagtcagcaatggacaccaataacgaacaaccaaatagctgaccgaagctgaaaaggagtatcttgaattgatgttttttacagttgttgtgattgctcattatttgcaaacataaaatggaatcaaatgtaaagaaaagagatgaagaaaatcatttgtagaattcacatttaagttatgtatggaagatgaagaaataagaaccatcttaaatctc

SEQ ID NO: 101643 - protein, 413 aa, Arabidopsis thaliana
  peptide (1)..(413): Ceres Seq. ID no. 13608353
  misc_feature (77)..(307): Pfam Name: Calcineurin-like phosphoesterase Pfam Description: Calcineurin-like phosphoesterase
  misc_feature (1)..(413): Homolog of NCBI NO: 30697908 NR Description: ser/thr protein phosphatase catalytic subunit thaliana] >gi|10177675|dbj|BAB11035.1| ser/thr protein
  misc_feature (1)..(413): Homolog of NCBI NO: 11358619 NR Description: phosphoprotein phosphatase (EC 3.1.3.16) PP7 - Arabidopsis thaliana >gi|2791900|emb|CAA03886.1| PP7
  misc_feature (1)..(298): Homolog of NCBI NO: 18424758 NR Description: ser/thr protein phosphatase catalytic subunit thaliana] >gi|30697906|ref|NP_851258.1| ser/thr protein
  misc_feature (1)..(413): Homolog of NCBI NO: 15221080 NR Description: calcineurin-like phosphoesterase family
  misc_feature (1)..(413): Homolog of NCBI NO: 25405918 NR Description: protein F21D18.16 [imported] - Arabidopsis >gi|8778513|gb|AAF79521.1|AC023673_9 F21D18.16 [Arabidopsis
  misc_feature (8)..(278): Homolog of NCBI NO: 15238894 NR Description: serine/threonine protein phosphatase [Arabidopsis
  misc_feature (53)..(201): Homolog of NCBI NO: 19347799 NR Description: putative phosphoprotein phosphatase [Arabidopsis
  misc_feature (246)..(342): Homolog of NCBI NO: 19347799 NR Description: putative phosphoprotein phosphatase [Arabidopsis
  misc_feature (53)..(201): Homolog of NCBI NO: 18406066 NR Description: phospho protein phosphatase -related [Arabidopsis >gi|16930441|gb|AAL31906.1|AF419574_1 At2g42810/F7D19.19 thaliana] >gi|20197966|gb|AAD21727.2| putative phosphoprotein
  misc_feature (246)..(342): Homolog of NCBI NO: 18406066 NR Description: phospho protein phosphatase -related [Arabidopsis >gi|16930441|gb|AAL31906.1|AF419574_1 At2g42810/F7D19.19 thaliana] >gi|20197966|gb|AAD21727.2| putative phosphoprotein
METVPPSPITWPDGGALTNDWVHGLMSCFEWSSWNLPPSQLPSLLPVNVFDSLVLTAHKILHKERNCVHIDDLDSVSNVVVVGDIHGQLHDLLFLLKDTGFPCQNRCYVFNGDYVDRGAWGLETFLVLLSWKVLMPDRVYLLRGNHESKYCTSMYGFEKEVLTKYGDKGKHVYRKCLGCFEGLPLASIISGRVYTAHGGLFRSPVLPKRTTRGKKNRRVVLLEPEPSSMKLGTLDELMQARRSVLDPPWEGSNLIPGDVLWSDPSMTPGLSPNEQRGIGLLWGPDCTEDFLKKYELKLIIRSHEGPDAREKRTGLGGMDNGYTIDHNVESGKLITIFSAPDYPQFQATEERYKNKGAYIILQAPDFSDPQFHSFEAVKPRPKAHPYYDFENVIDSDDEMDKSAMDTNNEQPNS

SEQ ID NO: 101644 - protein, 388 aa, Arabidopsis thaliana
  peptide (1)..(388): Ceres Seq. ID no. 13608354
  misc_feature (52)..(282): Pfam Name: Calcineurin-like phosphoesterase Pfam Description: Calcineurin-like phosphoesterase
  misc_feature (1)..(388): Homolog of NCBI NO: 30697908 NR Description: ser/thr protein phosphatase catalytic subunit thaliana] >gi|10177675|dbj|BAB11035.1| ser/thr protein
  misc_feature (1)..(388): Homolog of NCBI NO: 11358619 NR Description: phosphoprotein phosphatase (EC 3.1.3.16) PP7 - Arabidopsis thaliana >gi|2791900|emb|CAA03886.1| PP7
  misc_feature (1)..(273): Homolog of NCBI NO: 18424758 NR Description: ser/thr protein phosphatase catalytic subunit thaliana] >gi|30697906|ref|NP_851258.1| ser/thr protein
  misc_feature (1)..(388): Homolog of NCBI NO: 15221080 NR Description: calcineurin-like phosphoesterase family
  misc_feature (1)..(388): Homolog of NCBI NO: 25405918 NR Description: protein F21D18.16 [imported] - Arabidopsis >gi|8778513|gb|AAF79521.1|AC023673_9 F21D18.16 [Arabidopsis
  misc_feature (1)..(253): Homolog of NCBI NO: 15238894 NR Description: serine/threonine protein phosphatase [Arabidopsis
  misc_feature (28)..(176): Homolog of NCBI NO: 19347799 NR Description: putative phosphoprotein phosphatase [Arabidopsis
  misc_feature (221)..(317): Homolog of NCBI NO: 19347799 NR Description: putative phosphoprotein phosphatase [Arabidopsis
  misc_feature (28)..(176): Homolog of NCBI NO: 18406066 NR Description: phospho protein phosphatase -related [Arabidopsis >gi|16930441|gb|AAL31906.1|AF419574_1 At2g42810/F7D19.19 thaliana] >gi|20197966|gb|AAD21727.2| putative phosphoprotein
  misc_feature (221)..(317): Homolog of NCBI NO: 18406066 NR Description: phospho protein phosphatase -related [Arabidopsis >gi|16930441|gb|AAL31906.1|AF419574_1 At2g42810/F7D19.19 thaliana] >gi|20197966|gb|AAD21727.2| putative phosphoprotein
MSCFEWSSWNLPPSQLPSLLPVNVFDSLVLTAHKILHKERNCVHIDDLDSVSNVVVVGDIHGQLHDLLFLLKDTGFPCQNRCYVFNGDYVDRGAWGLETFLVLLSWKVLMPDRVYLLRGNHESKYCTSMYGFEKEVLTKYGDKGKHVYRKCLGCFEGLPLASIISGRVYTAHGGLFRSPVLPKRTTRGKKNRRVVLLEPEPSSMKLGTLDELMQARRSVLDPPWEGSNLIPGDVLWSDPSMTPGLSPNEQRGIGLLWGPDCTEDFLKKYELKLIIRSHEGPDAREKRTGLGGMDNGYTIDHNVESGKLITIFSAPDYPQFQATEERYKNKGAYIILQAPDFSDPQFHSFEAVKPRPKAHPYYDFENVIDSDDEMDKSAMDTNNEQPNS

SEQ ID NO: 101645 - protein, 279 aa, Arabidopsis thaliana
  peptide (1)..(279): Ceres Seq. ID no. 13608355
  misc_feature (1)..(173): Pfam Name: Calcineurin-like phosphoesterase Pfam Description: Calcineurin-like phosphoesterase
  misc_feature (1)..(279): Homolog of NCBI NO: 30697908 NR Description: ser/thr protein phosphatase catalytic subunit thaliana] >gi|10177675|dbj|BAB11035.1| ser/thr protein
  misc_feature (1)..(279): Homolog of NCBI NO: 11358619 NR Description: phosphoprotein phosphatase (EC 3.1.3.16) PP7 - Arabidopsis thaliana >gi|2791900|emb|CAA03886.1| PP7
  misc_feature (1)..(164): Homolog of NCBI NO: 18424758 NR Description: ser/thr protein phosphatase catalytic subunit thaliana] >gi|30697906|ref|NP_851258.1| ser/thr protein
  misc_feature (1)..(279): Homolog of NCBI NO: 15221080 NR Description: calcineurin-like phosphoesterase family
  misc_feature (1)..(279): Homolog of NCBI NO: 25405918 NR Description: protein F21D18.16 [imported] - Arabidopsis >gi|8778513|gb|AAF79521.1|AC023673_9 F21D18.16 [Arabidopsis
  misc_feature (1)..(144): Homolog of NCBI NO: 15238894 NR Description: serine/threonine protein phosphatase [Arabidopsis
  misc_feature (1)..(67): Homolog of NCBI NO: 19347799 NR Description: putative phosphoprotein phosphatase [Arabidopsis
  misc_feature (112)..(208): Homolog of NCBI NO: 19347799 NR Description: putative phosphoprotein phosphatase [Arabidopsis
  misc_feature (1)..(67): Homolog of NCBI NO: 18406066 NR Description: phospho protein phosphatase -related [Arabidopsis >gi|16930441|gb|AAL31906.1|AF419574_1 At2g42810/F7D19.19 thaliana] >gi|20197966|gb|AAD21727.2| putative phosphoprotein
  misc_feature (112)..(208): Homolog of NCBI NO: 18406066 NR Description: phospho protein phosphatase -related [Arabidopsis >gi|16930441|gb|AAL31906.1|AF419574_1 At2g42810/F7D19.19 thaliana] >gi|20197966|gb|AAD21727.2| putative phosphoprotein
MPDRVYLLRGNHESKYCTSMYGFEKEVLTKYGDKGKHVYRKCLGCFEGLPLASIISGRVYTAHGGLFRSPVLPKRTTRGKKNRRVVLLEPEPSSMKLGTLDELMQARRSVLDPPWEGSNLIPGDVLWSDPSMTPGLSPNEQRGIGLLWGPDCTEDFLKKYELKLIIRSHEGPDAREKRTGLGGMDNGYTIDHNVESGKLITIFSAPDYPQFQATEERYKNKGAYIILQAPDFSDPQFHSFEAVKPRPKAHPYYDFENVIDSDDEMDKSAMDTNNEQPNS

SEQ ID NO: 101646 - DNA, 1609 bp, Arabidopsis thaliana
  misc_feature (1)..(1609): Ceres Seq. ID no. 13608356
  misc_feature: MA Experiment ID: 108434 Result: Up-regulated in Transcription
  misc_feature: MA Experiment 108434 PARAMETER Experiment Name: At_Root_Tips_cDNA_P Parameter: Tissue Value: Root Tips
  misc_feature: MA Experiment ID: 108463 Result: Down-regulated in Transcription
  misc_feature: MA Experiment 108463 PARAMETER Experiment Name: At_Germinating_Seeds_cDNA_P Parameter: Age (day) Value: 3 vs. 0
  misc_feature: MA Experiment 108463 PARAMETER Experiment Name: At_Germinating_Seeds_cDNA_P Parameter: Tissue Value: Germinating Seeds
  misc_feature: MA Experiment ID: 108595 Result: Down-regulated in Transcription
  misc_feature: MA Experiment 108595 PARAMETER Experiment Name: At_Ler-pi_Ovule_cDNA_P Parameter: Plant Line Value: null
  misc_feature: MA Experiment ID: 20000087 Result: Down-regulated in Transcription
  misc_feature: MA Experiment 20000087 PARAMETER Experiment Name: At_100uM_ABA_Mutants_cDNA_P Parameter: Plant Line Value: WS
  misc_feature: MA Experiment 20000087 PARAMETER Experiment Name: At_100uM_ABA_Mutants_cDNA_P Parameter: Timepoint (hr) Value: 6
  misc_feature: MA Experiment 20000087 PARAMETER Experiment Name: At_100uM_ABA_Mutants_cDNA_P Parameter: Tissue Value: Aerial
  misc_feature: MA Experiment 20000087 PARAMETER Experiment Name: At_100uM_ABA_Mutants_cDNA_P Parameter: Treatment Value: 100uM ABA vs. No Treatment
  misc_feature: MA Experiment ID: 20000234 Result: Up-regulated in Transcription
  misc_feature: MA Experiment 20000234 PARAMETER Experiment Name: At_Siliques_P Parameter: Age (day) Value: 21
  misc_feature: MA Experiment 20000234 PARAMETER Experiment Name: At_Siliques_P Parameter: Organism Value: A. thaliana
  misc_feature: MA Experiment 20000234 PARAMETER Experiment Name: At_Siliques_P Parameter: Plant Line Value: WS
  misc_feature: MA Experiment 20000234 PARAMETER Experiment Name: At_Siliques_P Parameter: Tissue Value: Less Than 5mm Siliques vs. Whole Plant
tctcttttctttcactctctgttttgttctttatcgcctgagaattgatgtggatttttcaaatttcagttaatcttagctaattgacttgaaattcaatgaaaagattcaatttttggtttaattaagcaagttgtgagatagatgaacgaatttgttgaccaattgcgttttacaggatacgtttgttgctctatgaagtcttatagattatctgaacttagttcttcccaagttgatagtttgaagtcacgccctcgcattgacttctcttctattttcgccactgtgaacccgattatcgatgctgttcgtagcaatggggataatgctgtcaaagaatacactgaaagatttgacaaagtccagctgaataaagttgtggaagatatgtctgagctttctgttcctgagctcgattccaatgtcaaagaagcgtttgatgttgcgtatgacaacatatatgcgtttcacttagcccaaaagtcaactgagaaaagcgttgagaatatgaaaggtgtcagatgtaaaagggtgtcaagatctattggctctgtaggtctttatgtgcctggtggaacagctgttttgccatcaacggctttgatgcttgctattcctgctcaaattgctggatgtaaaacagttgttcttgcaactccaccaagtaaggatggaagcatttgtaaggaggttctgtattgcgccaagagggctggtgttactcacatactcaaagctggtggagcgcaggctatagctgccatggcctgggggacagattcttgtccaaaggttgagaagatttttggtcctgggaaccagtatgtcacagctgctaagatgattcttcaaaacagcgaggcaatggtctcaatcgatatgcctgctggtccttcagaagtcctagttattgctgacgaacatgctagtccagtttacattgcagcagacttactttctcaggcggagcatggtccagatagtcaagttgttcttgtagttgtgggcgatagtgtagatctcaacgccatcgaagaagaaattgccaagcagtgcaaaagccttcctagaggagagtttgcttcaaaagcactaagtcacagtttcacagtgtttgctcgagatatgattgaggcaatatctttctcaaatctatatgcacccgaacatttgatcatcaatgtcaaagacgctgagaaatgggagggactgattgagaacgcaggctcggttttcataggaccatggactccagagagtgttggggattatgcgagcgggacaaaccacgttcttccaacatatggatatgcaagaatgtacagtggcgtctctctcgactctttcctaaagttcatgactgtacaatctttgacagaggaaggtctgagaaacctcggcccttatgtagcaactatggctgaaatcgaaggtttagatgcacacaagagagccgttactctcagactcaaggatatcgaagccaaacagcttgcataatccaattgagatttatattcagacaaaagaggcaaaaattctttttgtattgtatgaacatatttggtttcctgagatggaataacaataaaataagagatgttgg

SEQ ID NO: 101647 - protein, 452 aa, Arabidopsis thaliana; identical to SEQ ID NO: 25238
  peptide (1)..(452): Ceres Seq. ID no. 13608357
  misc_feature (31)..(444): Pfam Name: Histidinol dehydrogenase Pfam Description: Histidinol dehydrogenase
  misc_feature (1)..(452): Homolog of NCBI NO: 30697913 NR Description: histidinol dehydrogenase [Arabidopsis thaliana]
  misc_feature (9)..(452): Homolog of NCBI NO: 10177677 NR Description: histidinol dehydrogenase [Arabidopsis thaliana]
  misc_feature (12)..(452): Homolog of NCBI NO: 30697915 NR Description: histidinol dehydrogenase [Arabidopsis thaliana] Histidinol dehydrogenase, chloroplast precursor (HDH) histidinol dehydrogenase [Arabidopsis thaliana]
  misc_feature (18)..(452): Homolog of NCBI NO: 21593566 NR Description: histidinol dehydrogenase [Arabidopsis thaliana]
  misc_feature (12)..(450): Homolog of NCBI NO: 123178 NR Description: Histidinol dehydrogenase, chloroplast precursor >gi|99844|pir||A39358 histidinol dehydrogenase (EC 1.1.1.23)
  misc_feature (4)..(452): Homolog of NCBI NO: 3982577 NR Description: histidinol dehydrogenase [Thlaspi goesingense]
  misc_feature (7)..(448): Homolog of NCBI NO: 34904356 NR Description: unnamed protein product [Oryza sativa (japonica group)] >gi|8467984|dbj|BAA96585.1| unnamed protein product
  misc_feature (18)..(443): Homolog of NCBI NO: 31095443 NR Description: HIS4 [Hebeloma cylindrosporum]
  misc_feature (17)..(444): Homolog of NCBI NO: 32420263 NR Description: HISTIDINE BIOSYNTHESIS TRIFUNCTIONAL PROTEIN
  misc_feature (17)..(444): Homolog of NCBI NO: 2853025 NR Description: histidine-3 protein [Neurospora crassa]

SEQ ID NO: 101648 - protein, 435 aa, Arabidopsis thaliana; identical to SEQ ID NO: 25239
  peptide (1)..(435): Ceres Seq. ID no. 13608358
  misc_feature (14)..(427): Pfam Name: Histidinol dehydrogenase Pfam Description: Histidinol dehydrogenase
  misc_feature (1)..(435): Homolog of NCBI NO: 30697913 NR Description: histidinol dehydrogenase [Arabidopsis thaliana]
  misc_feature (1)..(435): Homolog of NCBI NO: 10177677 NR Description: histidinol dehydrogenase [Arabidopsis thaliana]
  misc_feature (1)..(435): Homolog of NCBI NO: 30697915 NR Description: histidinol dehydrogenase [Arabidopsis thaliana] Histidinol dehydrogenase, chloroplast precursor (HDH) histidinol dehydrogenase [Arabidopsis thaliana]
  misc_feature (1)..(435): Homolog of NCBI NO: 21593566 NR Description: histidinol dehydrogenase [Arabidopsis thaliana]
  misc_feature (1)..(433): Homolog of NCBI NO: 123178 NR Description: Histidinol dehydrogenase, chloroplast precursor >gi|99844|pir||A39358 histidinol dehydrogenase (EC 1.1.1.23)
  misc_feature (1)..(435): Homolog of NCBI NO: 3982577 NR Description: histidinol dehydrogenase [Thlaspi goesingense]
  misc_feature (1)..(431): Homolog of NCBI NO: 34904356 NR Description: unnamed protein product [Oryza sativa (japonica group)] >gi|8467984|dbj|BAA96585.1| unnamed protein product
  misc_feature (1)..(426): Homolog of NCBI NO: 31095443 NR Description: HIS4 [Hebeloma cylindrosporum]
  misc_feature (1)..(427): Homolog of NCBI NO: 32420263 NR Description: HISTIDINE BIOSYNTHESIS TRIFUNCTIONAL PROTEIN
  misc_feature (1)..(427): Homolog of NCBI NO: 2853025 NR Description: histidine-3 protein [Neurospora crassa]

SEQ ID NO: 101649 - protein, 370 aa, Arabidopsis thaliana; identical to SEQ ID NO: 25240
  peptide (1)..(370): Ceres Seq. ID no. 13608359
  misc_feature (1)..(362): Pfam Name: Histidinol dehydrogenase Pfam Description: Histidinol dehydrogenase
  misc_feature (1)..(370): Homolog of NCBI NO: 30697913 NR Description: histidinol dehydrogenase [Arabidopsis thaliana]
  misc_feature (1)..(370): Homolog of NCBI NO: 10177677 NR Description: histidinol dehydrogenase [Arabidopsis thaliana]
  misc_feature (1)..(370): Homolog of NCBI NO: 30697915 NR Description: histidinol dehydrogenase [Arabidopsis thaliana] Histidinol dehydrogenase, chloroplast precursor (HDH) histidinol dehydrogenase [Arabidopsis thaliana]
  misc_feature (1)..(370): Homolog of NCBI NO: 21593566 NR Description: histidinol dehydrogenase [Arabidopsis thaliana]
  misc_feature (1)..(368): Homolog of NCBI NO: 123178 NR Description: Histidinol dehydrogenase, chloroplast precursor >gi|99844|pir||A39358 histidinol dehydrogenase (EC 1.1.1.23)
  misc_feature (1)..(370): Homolog of NCBI NO: 3982577 NR Description: histidinol dehydrogenase [Thlaspi goesingense]
  misc_feature (1)..(366): Homolog of NCBI NO: 34904356 NR Description: unnamed protein product [Oryza sativa (japonica group)] >gi|8467984|dbj|BAA96585.1| unnamed protein product
  misc_feature (1)..(361): Homolog of NCBI NO: 31095443 NR Description: HIS4 [Hebeloma cylindrosporum]
  misc_feature (1)..(362): Homolog of NCBI NO: 32420263 NR Description: HISTIDINE BIOSYNTHESIS TRIFUNCTIONAL PROTEIN
  misc_feature (1)..(362): Homolog of NCBI NO: 2853025 NR Description: histidine-3 protein [Neurospora crassa]

SEQ ID NO: 101650 - DNA, 1466 bp, Arabidopsis thaliana
  misc_feature (1)..(1466): Ceres Seq. ID no. 13608387
  misc_feature: MA Experiment ID: 20000235 Result: Down-regulated in Transcription
  misc_feature: MA Experiment 20000235 PARAMETER Experiment Name: At_Siliques_P Parameter: Age (day) Value: 21
  misc_feature: MA Experiment 20000235 PARAMETER Experiment Name: At_Siliques_P Parameter: Organism Value: A. thaliana
  misc_feature: MA Experiment 20000235 PARAMETER Experiment Name: At_Siliques_P Parameter: Plant Line Value: WS
  misc_feature: MA Experiment 20000235 PARAMETER Experiment Name: At_Siliques_P Parameter: Tissue Value: 5-10mm Siliques vs. Whole Plant
  misc_feature: MA Experiment ID: 20000264 Result: Up-regulated in Transcription
  misc_feature: MA Experiment 20000264 PARAMETER Experiment Name: At_Open_Flower_P Parameter: Age (day) Value: 21
  misc_feature: MA Experiment 20000264 PARAMETER Experiment Name: At_Open_Flower_P Parameter: Plant Line Value: WS
  misc_feature: MA Experiment 20000264 PARAMETER Experiment Name: At_Open_Flower_P Parameter: Tissue Value: Open Flower vs. Whole Plant
  misc_feature: MA Experiment ID: 20000265 Result: Up-regulated in Transcription
  misc_feature: MA Experiment 20000265 PARAMETER Experiment Name: At_Open_Flower_P Parameter: Age (day) Value: 21
  misc_feature: MA Experiment 20000265 PARAMETER Experiment Name: At_Open_Flower_P Parameter: Plant Line Value: WS
  misc_feature: MA Experiment 20000265 PARAMETER Experiment Name: At_Open_Flower_P Parameter: Tissue Value: Closed Flower vs. Whole Plant
  misc_feature: MA Experiment ID: 20000286 Result: Up-regulated in Transcription
  misc_feature: MA Experiment 20000286 PARAMETER Experiment Name: At_Open_Flower_P Parameter: Age (day) Value: 21
  misc_feature: MA Experiment 20000286 PARAMETER Experiment Name: At_Open_Flower_P Parameter: Plant Line Value: WS
  misc_feature: MA Experiment 20000286 PARAMETER Experiment Name: At_Open_Flower_P Parameter: Tissue Value: Half Open vs. Whole Plant
  misc_feature: MA Experiment ID: 20000437 Result: Up-regulated in Transcription
  misc_feature: MA Experiment 20000437 PARAMETER Experiment Name: At_Drought_P Parameter: Age (day) Value: 8
  misc_feature: MA Experiment 20000437 PARAMETER Experiment Name: At_Drought_P Parameter: Organism Value: A. thaliana
  misc_feature: MA Experiment 20000437 PARAMETER Experiment Name: At_Drought_P Parameter: Plant Line Value: WS
  misc_feature: MA Experiment 20000437 PARAMETER Experiment Name: At_Drought_P Parameter: Timepoint (hr) Value: 24
  misc_feature: MA Experiment 20000437 PARAMETER Experiment Name: At_Drought_P Parameter: Tissue Value: Whole Plant
  misc_feature: MA Experiment 20000437 PARAMETER Experiment Name: At_Drought_P Parameter: Treatment Value: Drought vs. No Drought
  misc_feature: MA Experiment ID: 20001910 Result: Down-regulated in Transcription
  misc_feature: MA Experiment 20001910 PARAMETER Experiment Name: At_Drought_Reproduction_P Parameter: Age (day) Value: 37
  misc_feature: MA Experiment 20001910 PARAMETER Experiment Name: At_Drought_Reproduction_P Parameter: Organism Value: A. thaliana
  misc_feature: MA Experiment 20001910 PARAMETER Experiment Name: At_Drought_Reproduction_P Parameter: Plant Line Value: WS
  misc_feature: MA Experiment 20001910 PARAMETER Experiment Name: At_Drought_Reproduction_P Parameter: Timepoint (day) Value: 7
  misc_feature: MA Experiment 20001910 PARAMETER Experiment Name: At_Drought_Reproduction_P Parameter: Tissue Value: Flowers
  misc_feature: MA Experiment 20001910 PARAMETER Experiment Name: At_Drought_Reproduction_P Parameter: Treatment Value: Drought vs. No Drought
actttttttctttctttctgagtgaaaaacactttagtctcccactctttatattttgtagcttcacagcaaaaattctcttttacttatcagacagataagatcatatagcaaatatgttgcaagatagagtttctggttctttgtctagttcgaaaatatctcgatgtgttttgtttctctcactcttttgtttcttcctcttgacgatgcatgcttcagcaaaccgcttacagcgagttccaaatccagggccttccccggcaccagagcctaagccatgtccgagtccagggccaaaccccgcaccagcgacaactaagaggacacataacactacgtttccggcgatcttcgcctttggggattcgatcttagacacaggaaataacgattatattttgaccttgatcaaagctaattttcttccatatggcatgaattttccagataaagttcccaccggcagattttgcaacggcaaaatcccttcggactttatcgcggattatataggagtaaaaccagttgtaccggcatatttgagaccgggactgacccaggaagatttgctcactggtgtatcctttgcttcgggtggttctggctatgatcctttgacaccaatcgtagtaagtgcgataccgatgtcaaaacaattgacatactttcaagaatacatagagaaagtgaaaggctttgtgggaaaagagaaagccgagcacataatatccaaaggcctagccattgtggtagcgggcagcgacgatctggccaatacctactatggtgaacacttagaggaattcttgtatgacatagatacatatacctcttttatggctagctctgctgcaagttttgctatgcaactatatgaatcaggagcaaaaaaaataggatttattggtgtttctccgatcgggtgtataccgatacagagaaccacaagaggaggacttaaaagaaaatgtgctgatgaactcaactttgcagctcagctttttaattccaaactctccacaagtttgaacgaattggctaaaaccatgaaaaataccacattggtgtatattgacatctactcttctttcaatgatatgattcaaaaccccaaaaaatatggatttgatgagattgatagaggatgttgcgggacggggctactcgaattaggtccgctttgcaacaaatatacatcacttctttgcaagaatgtgtcttcttttatgttttgggactcttaccatccaacggaaagagcttataaaatcttaagccaaaagtttgtagagaatgacatgggccctttctatgacaattaaatgtaaaatttaagatgacacatttgagatgaaatttggctaaataaaagctgtatctcatttggattagtgtcttcaaaaacatgtttattgtattatacatataaattgacatggagcgataaattgagttgtttttct

SEQ ID NO: 101651 - protein, 402 aa, Arabidopsis thaliana
  peptide (1)..(402): Ceres Seq. ID no. 13608388
  misc_feature (79)..(260): Pfam Name: GDSL-like Lipase/Acylhydrolase Pfam Description: GDSL-like Lipase/Acylhydrolase
  misc_feature (1)..(402): Homolog of NCBI NO: 18394825 NR Description: lipase, putative [Arabidopsis thaliana]
  misc_feature (1)..(402): Homolog of NCBI NO: 21592372 NR Description: anter-specific proline-rich protein APG
  misc_feature (36)..(260): Homolog of NCBI NO: 25513734 NR Description: T20H2.10 protein - Arabidopsis thaliana
  misc_feature (276)..(402): Homolog of NCBI NO: 25513734 NR Description: T20H2.10 protein - Arabidopsis thaliana
  misc_feature (42)..(393): Homolog of NCBI NO: 99694 NR Description: proline-rich protein APG - Arabidopsis thaliana
  misc_feature (42)..(393): Homolog of NCBI NO: 21431729 NR Description: Anter-specific proline-rich protein APG precursor At1g20130/T20H2_9 [Arabidopsis thaliana]
  misc_feature (43)..(65): Homolog of NCBI NO: 99694 NR Description: proline-rich protein APG - Arabidopsis thaliana
  misc_feature (43)..(65): Homolog of NCBI NO: 21431729 NR Description: Anter-specific proline-rich protein APG precursor At1g20130/T20H2_9 [Arabidopsis thaliana]
  misc_feature (43)..(65): Homolog of NCBI NO: 99694 NR Description: proline-rich protein APG - Arabidopsis thaliana
  misc_feature (43)..(65): Homolog of NCBI NO: 21431729 NR Description: Anter-specific proline-rich protein APG precursor At1g20130/T20H2_9 [Arabidopsis thaliana]
MLQDRVSGSLSSSKISRCVLFLSLFCFFLLTMHASANRLQRVPNPGPSPAPEPKPCPSPGPNPAPATTKRTHNTTFPAIFAFGDSILDTGNNDYILTLIKANFLPYGMNFPDKVPTGRFCNGKIPSDFIADYIGVKPVVPAYLRPGLTQEDLLTGVSFASGGSGYDPLTPIVVSAIPMSKQLTYFQEYIEKVKGFVGKEKAEHIISKGLAIVVAGSDDLANTYYGEHLEEFLYDIDTYTSFMASSAASFAMQLYESGAKKIGFIGVSPIGCIPIQRTTRGGLKRKCADELNFAAQLFNSKLSTSLNELAKTMKNTTLVYIDIYSSFNDMIQNPKKYGFDEIDRGCCGTGLLELGPLCNKYTSLLCKNVSSFMFWDSYHPTERAYKILSQKFVENDMGPFYDN

SEQ ID NO: 101652 - protein, 371 aa, Arabidopsis thaliana
  peptide (1)..(371): Ceres Seq. ID no. 13608389
  misc_feature (48)..(229): Pfam Name: GDSL-like Lipase/Acylhydrolase Pfam Description: GDSL-like Lipase/Acylhydrolase
  misc_feature (1)..(371): Homolog of NCBI NO: 18394825 NR Description: lipase, putative [Arabidopsis thaliana]
  misc_feature (1)..(371): Homolog of NCBI NO: 21592372 NR Description: anter-specific proline-rich protein APG
  misc_feature (5)..(229): Homolog of NCBI NO: 25513734 NR Description: T20H2.10 protein - Arabidopsis thaliana
  misc_feature (245)..(371): Homolog of NCBI NO: 25513734 NR Description: T20H2.10 protein - Arabidopsis thaliana
  misc_feature (11)..(362): Homolog of NCBI NO: 99694 NR Description: proline-rich protein APG - Arabidopsis thaliana
  misc_feature (11)..(362): Homolog of NCBI NO: 21431729 NR Description: Anter-specific proline-rich protein APG precursor At1g20130/T20H2_9 [Arabidopsis thaliana]
  misc_feature (12)..(34): Homolog of NCBI NO: 99694 NR Description: proline-rich protein APG - Arabidopsis thaliana
  misc_feature (12)..(34): Homolog of NCBI NO: 21431729 NR Description: Anter-specific proline-rich protein APG precursor At1g20130/T20H2_9 [Arabidopsis thaliana]
  misc_feature (12)..(34): Homolog of NCBI NO: 99694 NR Description: proline-rich protein APG - Arabidopsis thaliana
  misc_feature (12)..(34): Homolog of NCBI NO: 21431729 NR Description: Anter-specific proline-rich protein APG precursor At1g20130/T20H2_9 [Arabidopsis thaliana]
MHASANRLQRVPNPGPSPAPEPKPCPSPGPNPAPATTKRTHNTTFPAIFAFGDSILDTGNNDYILTLIKANFLPYGMNFPDKVPTGRFCNGKIPSDFIADYIGVKPVVPAYLRPGLTQEDLLTGVSFASGGSGYDPLTPIVVSAIPMSKQLTYFQEYIEKVKGFVGKEKAEHIISKGLAIVVAGSDDLANTYYGEHLEEFLYDIDTYTSFMASSAASFAMQLYESGAKKIGFIGVSPIGCIPIQRTTRGGLKRKCADELNFAAQLFNSKLSTSLNELAKTMKNTTLVYIDIYSSFNDMIQNPKKYGFDEIDRGCCGTGLLELGPLCNKYTSLLCKNVSSFMFWDSYHPTERAYKILSQKFVENDMGPFYDN

SEQ ID NO: 101653 - protein, 295 aa, Arabidopsis thaliana
  peptide (1)..(295): Ceres Seq. ID no. 13608390
  misc_feature (1)..(153): Pfam Name: GDSL-like Lipase/Acylhydrolase Pfam Description: GDSL-like Lipase/Acylhydrolase
  misc_feature (1)..(295): Homolog of NCBI NO: 18394825 NR Description: lipase, putative [Arabidopsis thaliana]
  misc_feature (1)..(295): Homolog of NCBI NO: 21592372 NR Description: anter-specific proline-rich protein APG
  misc_feature (1)..(153): Homolog of NCBI NO: 25513734 NR Description: T20H2.10 protein - Arabidopsis thaliana
  misc_feature (169)..(295): Homolog of NCBI NO: 25513734 NR Description: T20H2.10 protein - Arabidopsis thaliana
  misc_feature (1)..(286): Homolog of NCBI NO: 99694 NR Description: proline-rich protein APG - Arabidopsis thaliana
  misc_feature (1)..(286): Homolog of NCBI NO: 21431729 NR Description: Anter-specific proline-rich protein APG precursor At1g20130/T20H2_9 [Arabidopsis thaliana]
  misc_feature (1)..(286): Homolog of NCBI NO: 18266041 NR Description: anther-specific proline-rich protein [Brassica
  misc_feature (1)..(268): Homolog of NCBI NO: 15223790 NR Description: anther-specific proline-rich protein APG
  misc_feature (1)..(268): Homolog of NCBI NO: 25511649 NR Description: T20H2.9 protein - Arabidopsis thaliana
  misc_feature (1)..(286): Homolog of NCBI NO: 728868 NR Description: ANTER-SPECIFIC PROLINE-RICH PROTEIN APG (PROTEIN
MNFPDKVPTGRFCNGKIPSDFIADYIGVKPVVPAYLRPGLTQEDLLTGVSFASGGSGYDPLTPIVVSAIPMSKQLTYFQEYIEKVKGFVGKEKAEHIISKGLAIVVAGSDDLANTYYGEHLEEFLYDIDTYTSFMASSAASFAMQLYESGAKKIGFIGVSPIGCIPIQRTTRGGLKRKCADELNFAAQLFNSKLSTSLNELAKTMKNTTLVYIDIYSSFNDMIQNPKKYGFDEIDRGCCGTGLLELGPLCNKYTSLLCKNVSSFMFWDSYHPTERAYKILSQKFVENDMGPFYDN

SEQ ID NO: 101654 - DNA, 1061 bp, Arabidopsis thaliana
  misc_feature (1)..(1061): Ceres Seq. ID no. 13608391
  misc_feature: MA Experiment ID: 20000171 Result: Up-regulated in Transcription
  misc_feature: MA Experiment 20000171 PARAMETER Experiment Name: At_42deg_Heat_P Parameter: Age (day) Value: 14
  misc_feature: MA Experiment 20000171 PARAMETER Experiment Name: At_42deg_Heat_P Parameter: Organism Value: A. thaliana
  misc_feature: MA Experiment 20000171 PARAMETER Experiment Name: At_42deg_Heat_P Parameter: Plant Line Value: WS
  misc_feature: MA Experiment 20000171 PARAMETER Experiment Name: At_42deg_Heat_P Parameter: Temperature (deg C) Value: 42 vs. 22
  misc_feature: MA Experiment 20000171 PARAMETER Experiment Name: At_42deg_Heat_P Parameter: Timepoint (hr) Value: 1
  misc_feature: MA Experiment 20000171 PARAMETER Experiment Name: At_42deg_Heat_P Parameter: Tissue Value: Aerial
  misc_feature: MA Experiment ID: 20000436 Result: Up-regulated in Transcription
  misc_feature: MA Experiment 20000436 PARAMETER Experiment Name: At_Drought_P Parameter: Age (day) Value: 7
  misc_feature: MA Experiment 20000436 PARAMETER Experiment Name: At_Drought_P Parameter: Organism Value: A. thaliana
  misc_feature: MA Experiment 20000436 PARAMETER Experiment Name: At_Drought_P Parameter: Plant Line Value: WS
  misc_feature: MA Experiment 20000436 PARAMETER Experiment Name: At_Drought_P Parameter: Timepoint (hr) Value: 12
  misc_feature: MA Experiment 20000436 PARAMETER Experiment Name: At_Drought_P Parameter: Tissue Value: Whole Plant
  misc_feature: MA Experiment 20000436 PARAMETER Experiment Name: At_Drought_P Parameter: Treatment Value: Drought vs. No Drought
  misc_feature: MA Experiment ID: 20000451 Result: Up-regulated in Transcription
  misc_feature: MA Experiment 20000451 PARAMETER Experiment Name: At_CS6879_Shoots-Roots_P Parameter: Age (day) Value: 14
  misc_feature: MA Experiment 20000451 PARAMETER Experiment Name: At_CS6879_Shoots-Roots_P Parameter: Organism Value: A. thaliana
  misc_feature: MA Experiment 20000451 PARAMETER Experiment Name: At_CS6879_Shoots-Roots_P Parameter: Plant Line Value: CS6879 vs. WS
  misc_feature: MA Experiment 20000451 PARAMETER Experiment Name: At_CS6879_Shoots-Roots_P Parameter: Tissue Value: Roots
  misc_feature: MA Experiment ID: 20000452 Result: Up-regulated in Transcription
  misc_feature: MA Experiment 20000452 PARAMETER Experiment Name: At_CS6879_Shoots-Roots_P Parameter: Age (day) Value: 14
  misc_feature: MA Experiment 20000452 PARAMETER Experiment Name: At_CS6879_Shoots-Roots_P Parameter: Organism Value: A. thaliana
  misc_feature: MA Experiment 20000452 PARAMETER Experiment Name: At_CS6879_Shoots-Roots_P Parameter: Plant Line Value: CS6879 vs. WS
  misc_feature: MA Experiment 20000452 PARAMETER Experiment Name: At_CS6879_Shoots-Roots_P Parameter: Tissue Value: Shoots
  misc_feature: MA Experiment ID: 20000495 Result: Down-regulated in Transcription
  misc_feature: MA Experiment 20000495 PARAMETER Experiment Name: At_Guard_Cells_P Parameter: Harvest Date Value: 8/2/2002
  misc_feature: MA Experiment 20000495 PARAMETER Experiment Name: At_Guard_Cells_P Parameter: Organism Value: A. thaliana
  misc_feature: MA Experiment 20000495 PARAMETER Experiment Name: At_Guard_Cells_P Parameter: Tissue Value: Guard Cells vs. Leaves
  misc_feature: MA Experiment ID: 20001757 Result: Down-regulated in Transcription
  misc_feature: MA Experiment 20001757 PARAMETER Experiment Name: At_50mM_NH4NO3_L-to-H_P Parameter: Timepoint (hr) Value: 6
  misc_feature: MA Experiment 20001757 PARAMETER Experiment Name: At_50mM_NH4NO3_L-to-H_P Parameter: Tissue Value: Leaf
  misc_feature: MA Experiment 20001757 PARAMETER Experiment Name: At_50mM_NH4NO3_L-to-H_P Parameter: Treatment Value: 50mM NH4NO3 vs 100mM Mannitol
atggcaaagagaggggaaagcttgagagacaaacctaaatggagtcttgaaggcatgactgctcttgttaccggtggatctaaaggcctcggaaaagctgtggtggaggaactagccatgttgggagcaagagttcacacatgtgccagagacgaaactcagcttcaagaaagcttacgtgaatggcaagcaaaagggttacaagtcaccacttctgtttgcgatgtttcttctcgtgaccagcgagagaaactcatggaaactgtttcctctctcttccaaggaaaactcagcatcctcgtacccaatgtgggaataggtgtactaaagccgacgactgagtgtacagcagaagagttctcatttataatagctacaaatctggagtcaactttccatttctcgcaactcgcgcatcctttattgaaagcctctggttcagggaacattgtgctcatgtcttccgtggctggagttgtaaatttgggtaatacatcaatctatggagcaaccaaaggagccatgaatcagctggcgagaaatttagcatgcgagtgggcgagtgataatataagggctaattctgtttgtccatggttcattacaactccgtcaactaaagatttcctcggtgataaagatgtaaaagaaaaggtggagagtgtgacaccattgagacgtgttggagaggcaaatgaagtatcatcgcttgttgcatttctatgtcttcccgcagcttcttatataacaggtcaaaccatttgcgttgatggaggtttcactattaacggcttctctttgccttaaacacgtatatatgcatatattcatgcttaaatttatgtgattaattagtggtttcactgcatattaattcatacaagttttatatgtaacttatgttgagggagctcactccgttcatgccttctaatgtttggacgaagaactcaatcttttatcttatcggataagaagttacttgtgttcacatttgatgtttgttcgtttccaatcgtattgtgacttttgatatataaaataattattgtatatattct

SEQ ID NO: 101655 - protein, 268 aa, Arabidopsis thaliana
  peptide (1)..(268): Ceres Seq. ID no. 13608392
  misc_feature (1)..(268): Homolog of NCBI NO: 25283134 NR Description: probable tropinone reductase [imported] - thaliana >gi|3980398|gb|AAC95201.1| putative tropinone reductase
  misc_feature (1)..(266): Homolog of NCBI NO: 15227076 NR Description: short-chain dehydrogenase/reductase family (tropinone reductase, putative) [Arabidopsis thaliana]
  misc_feature (1)..(266): Homolog of NCBI NO: 15227040 NR Description: short-chain dehydrogenase/reductase family (tropinone reductase, putative) [Arabidopsis thaliana]
  misc_feature (1)..(266): Homolog of NCBI NO: 21554716 NR Description: putative tropinone reductase [Arabidopsis
  misc_feature (1)..(266): Homolog of NCBI NO: 15227075 NR Description: short-chain dehydrogenase/reductase family (tropinone reductase, putative) [Arabidopsis thaliana]
  misc_feature (1)..(266): Homolog of NCBI NO: 15227043 NR Description: short-chain dehydrogenase/reductase family (tropinone reductase, putative) [Arabidopsis thaliana]
  misc_feature (10)..(266): Homolog of NCBI NO: 15227069 NR Description: short-chain dehydrogenase/reductase family (tropinone reductase, putative) [Arabidopsis thaliana]
  misc_feature (109)..(266): Homolog of NCBI NO: 6457349 NR Description: short chain alcohol dehydrogenase [Arabidopsis
  misc_feature (1)..(101): Homolog of NCBI NO: 6457349 NR Description: short chain alcohol dehydrogenase [Arabidopsis
  misc_feature (86)..(268): Homolog of NCBI NO: 30684212 NR Description: short-chain dehydrogenase/reductase family
MAKRGESLRDKPKWSLEGMTALVTGGSKGLGKAVVEELAMLGARVHTCARDETQLQESLREWQAKGLQVTTSVCDVSSRDQREKLMETVSSLFQGKLSILVPNVGIGVLKPTTECTAEEFSFIIATNLESTFHFSQLAHPLLKASGSGNIVLMSSVAGVVNLGNTSIYGATKGAMNQLARNLACEWASDNIRANSVCPWFITTPSTKDFLGDKDVKEKVESVTPLRRVGEANEVSSLVAFLCLPAASYITGQTICVDGGFTINGFSLP

SEQ ID NO: 101656 - protein, 250 aa, Arabidopsis thaliana
  peptide (1)..(250): Ceres Seq. ID no. 13608393
  misc_feature (1)..(250): Homolog of NCBI NO: 25283134 NR Description: probable tropinone reductase [imported] - thaliana >gi|3980398|gb|AAC95201.1| putative tropinone reductase
  misc_feature (1)..(248): Homolog of NCBI NO: 15227076 NR Description: short-chain dehydrogenase/reductase family (tropinone reductase, putative) [Arabidopsis thaliana]
  misc_feature (1)..(248): Homolog of NCBI NO: 15227040 NR Description: short-chain dehydrogenase/reductase family (tropinone reductase, putative) [Arabidopsis thaliana]
  misc_feature (1)..(248): Homolog of NCBI NO: 21554716 NR Description: putative tropinone reductase [Arabidopsis
  misc_feature (1)..(248): Homolog of NCBI NO: 15227075 NR Description: short-chain dehydrogenase/reductase family (tropinone reductase, putative) [Arabidopsis thaliana]
  misc_feature (1)..(248): Homolog of NCBI NO: 15227043 NR Description: short-chain dehydrogenase/reductase family (tropinone reductase, putative) [Arabidopsis thaliana]
  misc_feature (1)..(248): Homolog of NCBI NO: 15227069 NR Description: short-chain dehydrogenase/reductase family (tropinone reductase, putative) [Arabidopsis thaliana]
  misc_feature (91)..(248): Homolog of NCBI NO: 6457349 NR Description: short chain alcohol dehydrogenase [Arabidopsis
  misc_feature (1)..(83): Homolog of NCBI NO: 6457349 NR Description: short chain alcohol dehydrogenase [Arabidopsis
  misc_feature (68)..(250): Homolog of NCBI NO: 30684212 NR Description: short-chain dehydrogenase/reductase family
MTALVTGGSKGLGKAVVEELAMLGARVHTCARDETQLQESLREWQAKGLQVTTSVCDVSSRDQREKLMETVSSLFQGKLSILVPNVGIGVLKPTTECTAEEFSFIIATNLESTFHFSQLAHPLLKASGSGNIVLMSSVAGVVNLGNTSIYGATKGAMNQLARNLACEWASDNIRANSVCPWFITTPSTKDFLGDKDVKEKVESVTPLRRVGEANEVSSLVAFLCLPAASYITGQTICVDGGFTINGFSLP

SEQ ID NO: 101657 - protein, 229 aa, Arabidopsis thaliana
  peptide (1)..(229): Ceres Seq. ID no. 13608394
  misc_feature (1)..(229): Homolog of NCBI NO: 25283134 NR Description: probable tropinone reductase [imported] - thaliana >gi|3980398|gb|AAC95201.1| putative tropinone reductase
  misc_feature (1)..(227): Homolog of NCBI NO: 15227076 NR Description: short-chain dehydrogenase/reductase family (tropinone reductase, putative) [Arabidopsis thaliana]
  misc_feature (1)..(227): Homolog of NCBI NO: 15227040 NR Description: short-chain dehydrogenase/reductase family (tropinone reductase, putative) [Arabidopsis thaliana]
  misc_feature (1)..(227): Homolog of NCBI NO: 21554716 NR Description: putative tropinone reductase [Arabidopsis
  misc_feature (1)..(227): Homolog of NCBI NO: 15227075 NR Description: short-chain dehydrogenase/reductase family (tropinone reductase, putative) [Arabidopsis thaliana]
  misc_feature (1)..(227): Homolog of NCBI NO: 15227043 NR Description: short-chain dehydrogenase/reductase family (tropinone reductase, putative) [Arabidopsis thaliana]
  misc_feature (1)..(227): Homolog of NCBI NO: 15227069 NR Description: short-chain dehydrogenase/reductase family (tropinone reductase, putative) [Arabidopsis thaliana]
  misc_feature (70)..(227): Homolog of NCBI NO: 6457349 NR Description: short chain alcohol dehydrogenase [Arabidopsis
  misc_feature (1)..(62): Homolog of NCBI NO: 6457349 NR Description: short chain alcohol dehydrogenase [Arabidopsis
  misc_feature (47)..(229): Homolog of NCBI NO: 30684212 NR Description: short-chain dehydrogenase/reductase family
MLGARVHTCARDETQLQESLREWQAKGLQVTTSVCDVSSRDQREKLMETVSSLFQGKLSILVPNVGIGVLKPTTECTAEEFSFIIATNLESTFHFSQLAHPLLKASGSGNIVLMSSVAGVVNLGNTSIYGATKGAMNQLARNLACEWASDNIRANSVCPWFITTPSTKDFLGDKDVKEKVESVTPLRRVGEANEVSSLVAFLCLPAASYITGQTICVDGGFTINGFSLP

SEQ ID NO: 101658 - DNA, 954 bp, Arabidopsis thaliana
  misc_feature (1)..(954): Ceres Seq. ID no. 13608399
  misc_feature: MA Experiment ID: 108435 Result: Down-regulated in Transcription
  misc_feature: MA Experiment 108435 PARAMETER Experiment Name: At_stm_Mutants_cDNA_P Parameter: Plant Line Value: wt Landsburg vs stm
  misc_feature: MA Experiment 108435 PARAMETER Experiment Name: At_stm_Mutants_cDNA_P Parameter: Tissue Value: Shoot Apical Meristem Region
  misc_feature: MA Experiment ID: 108461 Result: Up-regulated in Transcription
  misc_feature: MA Experiment 108461 PARAMETER Experiment Name: At_Germinating_Seeds_cDNA_P Parameter: Age (day) Value: 1 vs. 0
  misc_feature: MA Experiment 108461 PARAMETER Experiment Name: At_Germinating_Seeds_cDNA_P Parameter: Tissue Value: Germinating Seeds
  misc_feature: MA Experiment ID: 108462 Result: Up-regulated in Transcription
  misc_feature: MA Experiment 108462 PARAMETER Experiment Name: At_Germinating_Seeds_cDNA_P Parameter: Age (day) Value: 2 vs. 0
  misc_feature: MA Experiment 108462 PARAMETER Experiment Name: At_Germinating_Seeds_cDNA_P Parameter: Tissue Value: Germinating Seeds
  misc_feature: MA Experiment ID: 108463 Result: Up-regulated in Transcription
  misc_feature: MA Experiment 108463 PARAMETER Experiment Name: At_Germinating_Seeds_cDNA_P Parameter: Age (day) Value: 3 vs. 0
  misc_feature: MA Experiment 108463 PARAMETER Experiment Name: At_Germinating_Seeds_cDNA_P Parameter: Tissue Value: Germinating Seeds
  misc_feature: MA Experiment ID: 108576 Result: Down-regulated in Transcription
  misc_feature: MA Experiment 108576 PARAMETER Experiment Name: At_42deg_Heat_cDNA_P Parameter: Temperature (deg C) Value: 42 vs. 22
  misc_feature: MA Experiment 108576 PARAMETER Experiment Name: At_42deg_Heat_cDNA_P Parameter: Timepoint (hr) Value: 1
  misc_feature: MA Experiment 108576 PARAMETER Experiment Name: At_42deg_Heat_cDNA_P Parameter: Tissue Value: Aerial
  misc_feature: MA Experiment ID: 108577 Result: Down-regulated in Transcription
  misc_feature: MA Experiment 108577 PARAMETER Experiment Name: At_42deg_Heat_cDNA_P Parameter: Temperature (deg C) Value: 42 vs. 22
  misc_feature: MA Experiment 108577 PARAMETER Experiment Name: At_42deg_Heat_cDNA_P Parameter: Timepoint (hr) Value: 6
  misc_feature: MA Experiment 108577 PARAMETER Experiment Name: At_42deg_Heat_cDNA_P Parameter: Tissue Value: Aerial
  misc_feature: MA Experiment ID: 108595 Result: Down-regulated in Transcription
  misc_feature: MA Experiment 108595 PARAMETER Experiment Name: At_Ler-pi_Ovule_cDNA_P Parameter: Plant Line Value: null
  misc_feature: MA Experiment ID: 20000111 Result: Down-regulated in Transcription
  misc_feature: MA Experiment 20000111 PARAMETER Experiment Name: At_42deg_Heat_cDNA_P Parameter: Temperature (deg C) Value: 42 vs. 22
  misc_feature: MA Experiment 20000111 PARAMETER Experiment Name: At_42deg_Heat_cDNA_P Parameter: Timepoint (hr) Value: 6
  misc_feature: MA Experiment 20000111 PARAMETER Experiment Name: At_42deg_Heat_cDNA_P Parameter: Tissue Value: Aerial
  misc_feature: MA Experiment ID: 20000180 Result: Up-regulated in Transcription
  misc_feature: MA Experiment 20000180 PARAMETER Experiment Name: At_Germinating_Seeds_P Parameter: Age (hr) Value: 24 vs. 0
  misc_feature: MA Experiment 20000180 PARAMETER Experiment Name: At_Germinating_Seeds_P Parameter: Tissue Value: Germinating Seeds
  misc_feature: MA Experiment ID: 20000185 Result: Down-regulated in Transcription
  misc_feature: MA Experiment 20000185 PARAMETER Experiment Name: At_Roots__P Parameter: Age (day) Value: 7 vs. 21
  misc_feature: MA Experiment 20000185 PARAMETER Experiment Name: At_Roots__P Parameter: Organism Value: A. thaliana
  misc_feature: MA Experiment 20000185 PARAMETER Experiment Name: At_Roots__P Parameter: Tissue Value: Roots vs. Whole Plant
  misc_feature: MA Experiment ID: 20000438 Result: Up-regulated in Transcription
  misc_feature: MA Experiment 20000438 PARAMETER Experiment Name: At_Shoots__P Parameter: Age (day) Value: 14
  misc_feature: MA Experiment 20000438 PARAMETER Experiment Name: At_Shoots__P Parameter: Tissue Value: Shoots vs. Whole Plant
  misc_feature: MA Experiment ID: 20000439 Result: Down-regulated in Transcription
  misc_feature: MA Experiment 20000439 PARAMETER Experiment Name: At_Roots__P Parameter: Age (day) Value: 14 vs. 21
  misc_feature: MA Experiment 20000439 PARAMETER Experiment Name: At_Roots__P Parameter: Organism Value: A. thaliana
  misc_feature: MA Experiment 20000439 PARAMETER Experiment Name: At_Roots__P Parameter: Tissue Value: Roots vs. Whole Plant
  misc_feature: MA Experiment ID: 20001248 Result: Down-regulated in Transcription
  misc_feature: MA Experiment 20001248 PARAMETER Experiment Name: At_Far-red-induction_P Parameter: Age (day) Value: 7
  misc_feature: MA Experiment 20001248 PARAMETER Experiment Name: At_Far-red-induction_P Parameter: Light Value: Far-red vs. White
  misc_feature: MA Experiment 20001248 PARAMETER Experiment Name: At_Far-red-induction_P Parameter: Organism Value: A. thaliana
  misc_feature: MA Experiment 20001248 PARAMETER Experiment Name: At_Far-red-induction_P Parameter: Plant Line Value: Columbia
  misc_feature: MA Experiment 20001248 PARAMETER Experiment Name: At_Far-red-induction_P Parameter: Timepoint (hr) Value: 4
  misc_feature: MA Experiment 20001248 PARAMETER Experiment Name: At_Far-red-induction_P Parameter: Tissue Value: Whole Plant
  misc_feature: MA Experiment ID: 20001905 Result: Down-regulated in Transcription
  misc_feature: MA Experiment 20001905 PARAMETER Experiment Name: At_Drought_Reproduction_P Parameter: Age (day) Value: 40
  misc_feature: MA Experiment 20001905 PARAMETER Experiment Name: At_Drought_Reproduction_P Parameter: Organism Value: A. thaliana
  misc_feature: MA Experiment 20001905 PARAMETER Experiment Name: At_Drought_Reproduction_P Parameter: Plant Line Value: WS
  misc_feature: MA Experiment 20001905 PARAMETER Experiment Name: At_Drought_Reproduction_P Parameter: Timepoint (day) Value: 10
  misc_feature: MA Experiment 20001905 PARAMETER Experiment Name: At_Drought_Reproduction_P Parameter: Tissue Value: Rosettes
  misc_feature: MA Experiment 20001905 PARAMETER Experiment Name: At_Drought_Reproduction_P Parameter: Treatment Value: Drought vs. No Drought
gggttctgtggttcataatcagaaatggctaagacaggggaaagcttgagagacaaacctagatggagtcttgtaggcatgaccgctcttgtcaccggtggctcaaaaggcatcggagaagctgtggttgaggaactagctacgttaggggcaagaatccacacatgtgccagagacgaaactcagcttcaagaaagcttacgtaagtggcaagcaaaagggtttcaggttaccacttctgtctgcgacgtttcttctcgtgataaacgagagaagctcatggaaaccgtttccactatcttcgaaggaaaactcaacatacttgtcaacaatgtgggaacgtgtatagtcaaaccgaccttacaacatacagccgaagatttctcatttacaatggcaacgaatctcgagtcagcttttcatctctcgcagctcgcgcatcctttgttgaaagcttctggttcagggagcatcgtgctcatctcctccgtatctggagttgtacatgtcaatggtgcatccatatatggagtatctaaaggagctatgaatcagctaggaagaaacttagcgtgcgagtgggcaagtgacaacataaggactaactctgtgtgtccatggttcatagaaactcctttagttaccgaaagtcttagtaatgaggagtttagaaaagaagtggagagtagaccaccaatgggacgtgttggagaagtaaatgaagtatcatcgcttgtggcatttctttgtcttcctgcagcttcttatattacaggtcaaaccatttgtgttgatggaggtttcactgttaatggtttctctttcaagcctctgccttaagacgtcgattgttttcattttacgttatttttttaacatttacaatttgtttagatatgtaaacataaacacaattacacaaacaaacaaaaaaaattggcgtttggaatgtaa

SEQ ID NO: 101659 - protein, 271 aa, Arabidopsis thaliana; identical to SEQ ID NO: 26384
  peptide (1)..(271): Ceres Seq. ID no. 13608400
  misc_feature (1)..(271): Homolog of NCBI NO: 15227076 NR Description: short-chain dehydrogenase/reductase family (tropinone reductase, putative) [Arabidopsis thaliana]
  misc_feature (1)..(271): Homolog of NCBI NO: 21554716 NR Description: putative tropinone reductase [Arabidopsis
  misc_feature (1)..(269): Homolog of NCBI NO: 15227040 NR Description: short-chain dehydrogenase/reductase family (tropinone reductase, putative) [Arabidopsis thaliana]
  misc_feature (1)..(271): Homolog of NCBI NO: 15227075 NR Description: short-chain dehydrogenase/reductase family (tropinone reductase, putative) [Arabidopsis thaliana]
  misc_feature (1)..(270): Homolog of NCBI NO: 15227043 NR Description: short-chain dehydrogenase/reductase family (tropinone reductase, putative) [Arabidopsis thaliana]
  misc_feature (1)..(266): Homolog of NCBI NO: 25283134 NR Description: probable tropinone reductase [imported] - thaliana >gi|3980398|gb|AAC95201.1| putative tropinone reductase
  misc_feature (10)..(269): Homolog of NCBI NO: 15227069 NR Description: short-chain dehydrogenase/reductase family (tropinone reductase, putative) [Arabidopsis thaliana]
  misc_feature (105)..(271): Homolog of NCBI NO: 6457349 NR Description: short chain alcohol dehydrogenase [Arabidopsis
  misc_feature (1)..(101): Homolog of NCBI NO: 6457349 NR Description: short chain alcohol dehydrogenase [Arabidopsis
  misc_feature (10)..(269): Homolog of NCBI NO: 15222400 NR Description: short-chain dehydrogenase/reductase family

SEQ ID NO: 101660 - protein, 253 aa, Arabidopsis thaliana; identical to SEQ ID NO: 26385
  peptide (1)..(253): Ceres Seq. ID no. 13608401
  misc_feature (1)..(253): Homolog of NCBI NO: 15227076 NR Description: short-chain dehydrogenase/reductase family (tropinone reductase, putative) [Arabidopsis thaliana]
  misc_feature (1)..(253): Homolog of NCBI NO: 21554716 NR Description: putative tropinone reductase [Arabidopsis
  misc_feature (1)..(251): Homolog of NCBI NO: 15227040 NR Description: short-chain dehydrogenase/reductase family (tropinone reductase, putative) [Arabidopsis thaliana]
  misc_feature (1)..(253): Homolog of NCBI NO: 15227075 NR Description: short-chain dehydrogenase/reductase family (tropinone reductase, putative) [Arabidopsis thaliana]
  misc_feature (1)..(252): Homolog of NCBI NO: 15227043 NR Description: short-chain dehydrogenase/reductase family (tropinone reductase, putative) [Arabidopsis thaliana]
  misc_feature (1)..(248): Homolog of NCBI NO: 25283134 NR Description: probable tropinone reductase [imported] - thaliana >gi|3980398|gb|AAC95201.1| putative tropinone reductase
  misc_feature (1)..(251): Homolog of NCBI NO: 15227069 NR Description: short-chain dehydrogenase/reductase family (tropinone reductase, putative) [Arabidopsis thaliana]
  misc_feature (87)..(253): Homolog of NCBI NO: 6457349 NR Description: short chain alcohol dehydrogenase [Arabidopsis
  misc_feature (1)..(83): Homolog of NCBI NO: 6457349 NR Description: short chain alcohol dehydrogenase [Arabidopsis
  misc_feature (1)..(251): Homolog of NCBI NO: 15222400 NR Description: short-chain dehydrogenase/reductase family

SEQ ID NO: 101661 - protein, 186 aa, Arabidopsis thaliana; identical to SEQ ID NO: 26386
  peptide (1)..(186): Ceres Seq. ID no. 13608402
  misc_feature (1)..(186): Homolog of NCBI NO: 15227076 NR Description: short-chain dehydrogenase/reductase family (tropinone reductase, putative) [Arabidopsis thaliana]
  misc_feature (1)..(186): Homolog of NCBI NO: 21554716 NR Description: putative tropinone reductase [Arabidopsis
  misc_feature (1)..(184): Homolog of NCBI NO: 15227040 NR Description: short-chain dehydrogenase/reductase family (tropinone reductase, putative) [Arabidopsis thaliana]
  misc_feature (1)..(186): Homolog of NCBI NO: 15227075 NR Description: short-chain dehydrogenase/reductase family (tropinone reductase, putative) [Arabidopsis thaliana]
  misc_feature (1)..(185): Homolog of NCBI NO: 15227043 NR Description: short-chain dehydrogenase/reductase family (tropinone reductase, putative) [Arabidopsis thaliana]
  misc_feature (1)..(181): Homolog of NCBI NO: 25283134 NR Description: probable tropinone reductase [imported] - thaliana >gi|3980398|gb|AAC95201.1| putative tropinone reductase
  misc_feature (1)..(184): Homolog of NCBI NO: 15227069 NR Description: short-chain dehydrogenase/reductase family (tropinone reductase, putative) [Arabidopsis thaliana]
  misc_feature (20)..(186): Homolog of NCBI NO: 6457349 NR Description: short chain alcohol dehydrogenase [Arabidopsis
  misc_feature (1)..(16): Homolog of NCBI NO: 6457349 NR Description: short chain alcohol dehydrogenase [Arabidopsis
  misc_feature (1)..(184): Homolog of NCBI NO: 15222400 NR Description: short-chain dehydrogenase/reductase family

SEQ ID NO: 101662 - DNA, 872 bp, Arabidopsis thaliana
  misc_feature (1)..(872): Ceres Seq. ID no. 13608405
  misc_feature: MA Experiment ID: 108462 Result: Up-regulated in Transcription
  misc_feature: MA Experiment 108462 PARAMETER Experiment Name: At_Germinating_Seeds_cDNA_P Parameter: Age (day) Value: 2 vs. 0
  misc_feature: MA Experiment 108462 PARAMETER Experiment Name: At_Germinating_Seeds_cDNA_P Parameter: Tissue Value: Germinating Seeds
  misc_feature: MA Experiment ID: 108464 Result: Up-regulated in Transcription
  misc_feature: MA Experiment 108464 PARAMETER Experiment Name: At_Germinating_Seeds_cDNA_P Parameter: Age (day) Value: 4 vs. 0
  misc_feature: MA Experiment 108464 PARAMETER Experiment Name: At_Germinating_Seeds_cDNA_P Parameter: Tissue Value: Germinating Seeds
  misc_feature: MA Experiment ID: 20000070 Result: Up-regulated in Transcription
  misc_feature: MA Experiment 20000070 PARAMETER Experiment Name: At_100uM_ABA_Mutants_cDNA_P Parameter: Plant Line Value: CS24
  misc_feature: MA Experiment 20000070 PARAMETER Experiment Name: At_100uM_ABA_Mutants_cDNA_P Parameter: Timepoint (hr) Value: 6
  misc_feature: MA Experiment 20000070 PARAMETER Experiment Name: At_100uM_ABA_Mutants_cDNA_P Parameter: Tissue Value: Aerial
  misc_feature: MA Experiment 20000070 PARAMETER Experiment Name: At_100uM_ABA_Mutants_cDNA_P Parameter: Treatment Value: 100uM ABA vs. No Treatment
  misc_feature: MA Experiment ID: 20000088 Result: Up-regulated in Transcription
  misc_feature: MA Experiment 20000088 PARAMETER Experiment Name: At_100uM_ABA_Mutants_cDNA_P Parameter: Plant Line Value: Landsberg
  misc_feature: MA Experiment 20000088 PARAMETER Experiment Name: At_100uM_ABA_Mutants_cDNA_P Parameter: Timepoint (hr) Value: 6
  misc_feature: MA Experiment 20000088 PARAMETER Experiment Name: At_100uM_ABA_Mutants_cDNA_P Parameter: Tissue Value: Aerial
  misc_feature: MA Experiment 20000088 PARAMETER Experiment Name: At_100uM_ABA_Mutants_cDNA_P Parameter: Treatment Value: 100uM ABA vs. No Treatment
  misc_feature: MA Experiment ID: 20000090 Result: Up-regulated in Transcription
  misc_feature: MA Experiment ID: 20000173 Result: Down-regulated in Transcription
  misc_feature: MA Experiment 20000173 PARAMETER Experiment Name: At_42deg_Heat_P Parameter: Age (day) Value: 14
  misc_feature: MA Experiment 20000173 PARAMETER Experiment Name: At_42deg_Heat_P Parameter: Organism Value: A. thaliana
  misc_feature: MA Experiment 20000173 PARAMETER Experiment Name: At_42deg_Heat_P Parameter: Plant Line Value: WS
  misc_feature: MA Experiment 20000173 PARAMETER Experiment Name: At_42deg_Heat_P Parameter: Temperature (deg C) Value: 42 vs. 22
  misc_feature: MA Experiment 20000173 PARAMETER Experiment Name: At_42deg_Heat_P Parameter: Timepoint (hr) Value: 6
  misc_feature: MA Experiment 20000173 PARAMETER Experiment Name: At_42deg_Heat_P Parameter: Tissue Value: Aerial
  misc_feature: MA Experiment ID: 20000180 Result: Up-regulated in Transcription
  misc_feature: MA Experiment 20000180 PARAMETER Experiment Name: At_Germinating_Seeds_P Parameter: Age (hr) Value: 24 vs. 0
  misc_feature: MA Experiment 20000180 PARAMETER Experiment Name: At_Germinating_Seeds_P Parameter: Tissue Value: Germinating Seeds
  misc_feature: MA Experiment ID: 20000184 Result: Down-regulated in Transcription
  misc_feature: MA Experiment 20000184 PARAMETER Experiment Name: At_Shoots__P Parameter: Age (day) Value: 7
  misc_feature: MA Experiment 20000184 PARAMETER Experiment Name: At_Shoots__P Parameter: Tissue Value: Shoots vs. Whole Plant
  misc_feature: MA Experiment ID: 20000214 Result: Up-regulated in Transcription
  misc_feature: MA Experiment 20000214 PARAMETER Experiment Name: At_4deg_Cold_P Parameter: Timepoint (hr) Value: 6
  misc_feature: MA Experiment ID: 20000234 Result: Down-regulated in Transcription
  misc_feature: MA Experiment 20000234 PARAMETER Experiment Name: At_Siliques_P Parameter: Age (day) Value: 21
  misc_feature: MA Experiment 20000234 PARAMETER Experiment Name: At_Siliques_P Parameter: Organism Value: A. thaliana
  misc_feature: MA Experiment 20000234 PARAMETER Experiment Name: At_Siliques_P Parameter: Plant Line Value: WS
  misc_feature: MA Experiment 20000234 PARAMETER Experiment Name: At_Siliques_P Parameter: Tissue Value: Less Than 5mm Siliques vs. Whole Plant
  misc_feature: MA Experiment ID: 20000264 Result: Down-regulated in Transcription
  misc_feature: MA Experiment 20000264 PARAMETER Experiment Name: At_Open_Flower_P Parameter: Age (day) Value: 21
  misc_feature: MA Experiment 20000264 PARAMETER Experiment Name: At_Open_Flower_P Parameter: Plant Line Value: WS
  misc_feature: MA Experiment 20000264 PARAMETER Experiment Name: At_Open_Flower_P Parameter: Tissue Value: Open Flower vs. Whole Plant
  misc_feature: MA Experiment ID: 20000265 Result: Down-regulated in Transcription
  misc_feature: MA Experiment 20000265 PARAMETER Experiment Name: At_Open_Flower_P Parameter: Age (day) Value: 21
  misc_feature: MA Experiment 20000265 PARAMETER Experiment Name: At_Open_Flower_P Parameter: Plant Line Value: WS
  misc_feature: MA Experiment 20000265 PARAMETER Experiment Name: At_Open_Flower_P Parameter: Tissue Value: Closed Flower vs. Whole Plant
  misc_feature: MA Experiment ID: 20000286 Result: Down-regulated in Transcription
  misc_feature: MA Experiment 20000286 PARAMETER Experiment Name: At_Open_Flower_P Parameter: Age (day) Value: 21
  misc_feature: MA Experiment 20000286 PARAMETER Experiment Name: At_Open_Flower_P Parameter: Plant Line Value: WS
  misc_feature: MA Experiment 20000286 PARAMETER Experiment Name: At_Open_Flower_P Parameter: Tissue Value: Half Open vs. Whole Plant
  misc_feature: MA Experiment ID: 20000438 Result: Down-regulated in Transcription
  misc_feature: MA Experiment 20000438 PARAMETER Experiment Name: At_Shoots__P Parameter: Age (day) Value: 14
  misc_feature: MA Experiment 20000438 PARAMETER Experiment Name: At_Shoots__P Parameter: Tissue Value: Shoots vs. Whole Plant
  misc_feature: MA Experiment ID: 20001450 Result: Down-regulated in Transcription
  misc_feature: MA Experiment 20001450 PARAMETER Experiment Name: At_Far-red-induction_P Parameter: Age (day) Value: 7
  misc_feature: MA Experiment 20001450 PARAMETER Experiment Name: At_Far-red-induction_P Parameter: Light Value: Far-red vs. White
  misc_feature: MA Experiment 20001450 PARAMETER Experiment Name: At_Far-red-induction_P Parameter: Organism Value: A. thaliana
  misc_feature: MA Experiment 20001450 PARAMETER Experiment Name: At_Far-red-induction_P Parameter: Plant Line Value: Columbia
  misc_feature: MA Experiment 20001450 PARAMETER Experiment Name: At_Far-red-induction_P Parameter: Timepoint (hr) Value: 8
  misc_feature: MA Experiment 20001450 PARAMETER Experiment Name: At_Far-red-induction_P Parameter: Tissue Value: Whole Plant
  misc_feature: MA Experiment ID: 20001451 Result: Down-regulated in Transcription
  misc_feature: MA Experiment 20001451 PARAMETER Experiment Name: At_Far-red-induction_P Parameter: Age (day) Value: 7
  misc_feature: MA Experiment 20001451 PARAMETER Experiment Name: At_Far-red-induction_P Parameter: Light Value: Far-red vs. White
  misc_feature: MA Experiment 20001451 PARAMETER Experiment Name: At_Far-red-induction_P Parameter: Organism Value: A. thaliana
  misc_feature: MA Experiment 20001451 PARAMETER Experiment Name: At_Far-red-induction_P Parameter: Plant Line Value: Columbia
  misc_feature: MA Experiment 20001451 PARAMETER Experiment Name: At_Far-red-induction_P Parameter: Timepoint (hr) Value: 24
  misc_feature: MA Experiment 20001451 PARAMETER Experiment Name: At_Far-red-induction_P Parameter: Tissue Value: Whole Plant
agaaagaaactgatagtagaaaaaaaaagagagaagaaaaatggtgttgacaatctatgctcctttattcgcttcttcaaagagagctgttgtgacattggtggagaagggagtatcattcgaaactgtcaatgtcgatctcatgaaaggagaacagagacagcctgagtatctcgcgattcagcctttcggtaaaatcccagtcctcgtcgacggagactacaaaatcttcgagtcgcgtgcgatcatgaggtatatagcagagaagtatagatcacaaggacctgatcttttggggaagactattgaagagagaggacaagtagagcaatggttagacgttgaggctacaagttaccatccaccactattggctttaacgctcaacattgtctttgcaccacttatgggtttccctgctgatgagaaagttattaaggagagtgaagagaagcttgcagaagtgcttgatgtctatgaagctcagctttctaagaacgaatacttggctggtgattttgtgagtctagctgatttggctcaccttcctttcaccgagtatcttgttggtcctattgggaaggctcatttgatcaaagataggaagcatgttagcgcttggtgggataagattagtagccgtgctgcgtggaaggaggtttccgctaagtactcactacctgtttaaacaaggagatgttgacttggggggtttgtgtgagctttgtgttctttgagggagttcgttttcgggtcgattgtcttgttgtttcaataagaaacggaactctgtctcatttgttgtctctggtttcttgtattctgtaacttttcaagcttttcaataagagtttaaaatcagagtgactcaa

SEQ ID NO: 101663 - protein, 215 aa, Arabidopsis thaliana; identical to SEQ ID NO: 22480
  peptide (1)..(215): Ceres Seq. ID no. 13608406
  misc_feature (3)..(75): Pfam Name: Glutathione S-transferase, N-terminal domain Pfam Description: Glutathione S-transferase, N-terminal domain
  misc_feature (1)..(215): Homolog of NCBI NO: 15224582 NR Description: glutathione transferase, putative [Arabidopsis
  misc_feature (1)..(214): Homolog of NCBI NO: 15224581 NR Description: glutathione transferase, putative [Arabidopsis
  misc_feature (1)..(214): Homolog of NCBI NO: 2462929 NR Description: glutathione transferase [Arabidopsis thaliana]

SEQ ID NO: 101664 - protein, 181 aa, Arabidopsis thaliana; identical to SEQ ID NO: 22481
  peptide (1)..(181): Ceres Seq. ID no. 13608407
  misc_feature (1)..(181): Homolog of NCBI NO: 15224582 NR Description: glutathione transferase, putative [Arabidopsis
  misc_feature (1)..(180): Homolog of NCBI NO: 15224581 NR Description: glutathione transferase, putative [Arabidopsis
  misc_feature (1)..(180): Homolog of NCBI NO: 2462929 NR Description: glutathione transferase [Arabidopsis thaliana]

SEQ ID NO: 101665 - protein, 146 aa, Arabidopsis thaliana; identical to SEQ ID NO: 22482
  peptide (1)..(146): Ceres Seq. ID no. 13608408
  misc_feature (1)..(146): Homolog of NCBI NO: 15224582 NR Description: glutathione transferase, putative [Arabidopsis
  misc_feature (1)..(145): Homolog of NCBI NO: 15224581 NR Description: glutathione transferase, putative [Arabidopsis
  misc_feature (1)..(145): Homolog of NCBI NO: 2462929 NR Description: glutathione transferase [Arabidopsis thaliana]

SEQ ID NO: 101666 - DNA, 1624 bp, Arabidopsis thaliana
  misc_feature (1)..(1624): Ceres Seq. ID no. 13608409
  misc_feature: MA Experiment ID: 20000179 Result: Down-regulated in Transcription
  misc_feature: MA Experiment 20000179 PARAMETER Experiment Name: At_Germinating_Seeds_P Parameter: Age (hr) Value: 6 vs. 0
  misc_feature: MA Experiment 20000179 PARAMETER Experiment Name: At_Germinating_Seeds_P Parameter: Tissue Value: Germinating Seeds
  misc_feature: MA Experiment ID: 20000180 Result: Down-regulated in Transcription
  misc_feature: MA Experiment 20000180 PARAMETER Experiment Name: At_Germinating_Seeds_P Parameter: Age (hr) Value: 24 vs. 0
  misc_feature: MA Experiment 20000180 PARAMETER Experiment Name: At_Germinating_Seeds_P Parameter: Tissue Value: Germinating Seeds
  misc_feature: MA Experiment ID: 20000185 Result: Down-regulated in Transcription
  misc_feature: MA Experiment 20000185 PARAMETER Experiment Name: At_Roots__P Parameter: Age (day) Value: 7 vs. 21
  misc_feature: MA Experiment 20000185 PARAMETER Experiment Name: At_Roots__P Parameter: Organism Value: A. thaliana
  misc_feature: MA Experiment 20000185 PARAMETER Experiment Name: At_Roots__P Parameter: Tissue Value: Roots vs. Whole Plant
  misc_feature: MA Experiment ID: 20000227 Result: Down-regulated in Transcription
  misc_feature: MA Experiment 20000227 PARAMETER Experiment Name: At_Root-Tips-vs-Tops_P Parameter: Tissue Value: Root Tips vs. Root Tops
  misc_feature: MA Experiment ID: 20000234 Result: Down-regulated in Transcription
  misc_feature: MA Experiment 20000234 PARAMETER Experiment Name: At_Siliques_P Parameter: Age (day) Value: 21
  misc_feature: MA Experiment 20000234 PARAMETER Experiment Name: At_Siliques_P Parameter: Organism Value: A. thaliana
  misc_feature: MA Experiment 20000234 PARAMETER Experiment Name: At_Siliques_P Parameter: Plant Line Value: WS
  misc_feature: MA Experiment 20000234 PARAMETER Experiment Name: At_Siliques_P Parameter: Tissue Value: Less Than 5mm Siliques vs. Whole Plant
  misc_feature: MA Experiment ID: 20000264 Result: Down-regulated in Transcription
  misc_feature: MA Experiment 20000264 PARAMETER Experiment Name: At_Open_Flower_P Parameter: Age (day) Value: 21
  misc_feature: MA Experiment 20000264 PARAMETER Experiment Name: At_Open_Flower_P Parameter: Plant Line Value: WS
  misc_feature: MA Experiment 20000264 PARAMETER Experiment Name: At_Open_Flower_P Parameter: Tissue Value: Open Flower vs. Whole Plant
  misc_feature: MA Experiment ID: 20000265 Result: Down-regulated in Transcription
  misc_feature: MA Experiment 20000265 PARAMETER Experiment Name: At_Open_Flower_P Parameter: Age (day) Value: 21
  misc_feature: MA Experiment 20000265 PARAMETER Experiment Name: At_Open_Flower_P Parameter: Plant Line Value: WS
  misc_feature: MA Experiment 20000265 PARAMETER Experiment Name: At_Open_Flower_P Parameter: Tissue Value: Closed Flower vs. Whole Plant
  misc_feature: MA Experiment ID: 20000286 Result: Down-regulated in Transcription
  misc_feature: MA Experiment 20000286 PARAMETER Experiment Name: At_Open_Flower_P Parameter: Age (day) Value: 21
  misc_feature: MA Experiment 20000286 PARAMETER Experiment Name: At_Open_Flower_P Parameter: Plant Line Value: WS
  misc_feature: MA Experiment 20000286 PARAMETER Experiment Name: At_Open_Flower_P Parameter: Tissue Value: Half Open vs. Whole Plant
  misc_feature: MA Experiment ID: 20000439 Result: Down-regulated in Transcription
  misc_feature: MA Experiment 20000439 PARAMETER Experiment Name: At_Roots__P Parameter: Age (day) Value: 14 vs. 21
  misc_feature: MA Experiment 20000439 PARAMETER Experiment Name: At_Roots__P Parameter: Organism Value: A. thaliana
  misc_feature: MA Experiment 20000439 PARAMETER Experiment Name: At_Roots__P Parameter: Tissue Value: Roots vs. Whole Plant
  misc_feature: MA Experiment ID: 20000451 Result: Up-regulated in Transcription
  misc_feature: MA Experiment 20000451 PARAMETER Experiment Name: At_CS6879_Shoots-Roots_P Parameter: Age (day) Value: 14
  misc_feature: MA Experiment 20000451 PARAMETER Experiment Name: At_CS6879_Shoots-Roots_P Parameter: Organism Value: A. thaliana
  misc_feature: MA Experiment 20000451 PARAMETER Experiment Name: At_CS6879_Shoots-Roots_P Parameter: Plant Line Value: CS6879 vs. WS
  misc_feature: MA Experiment 20000451 PARAMETER Experiment Name: At_CS6879_Shoots-Roots_P Parameter: Tissue Value: Roots
  misc_feature: MA Experiment ID: 20000527 Result: Down-regulated in Transcription
  misc_feature: MA Experiment 20000527 PARAMETER Experiment Name: At_10percent_PEG_P Parameter: Age (day) Value: 20
  misc_feature: MA Experiment 20000527 PARAMETER Experiment Name: At_10percent_PEG_P Parameter: Organism Value: A. thaliana
  misc_feature: MA Experiment 20000527 PARAMETER Experiment Name: At_10percent_PEG_P Parameter: Plant Line Value: WS
  misc_feature: MA Experiment 20000527 PARAMETER Experiment Name: At_10percent_PEG_P Parameter: Timepoint (day) Value: 20
  misc_feature: MA Experiment 20000527 PARAMETER Experiment Name: At_10percent_PEG_P Parameter: Tissue Value: Whole Plant
  misc_feature: MA Experiment 20000527 PARAMETER Experiment Name: At_10percent_PEG_P Parameter: Treatment Value: 10percent PEG vs. No Treatment
  misc_feature: MA Experiment ID: 20000574 Result: Up-regulated in Transcription
  misc_feature: MA Experiment 20000574 PARAMETER Experiment Name: At_100uM_ABA_Mutants__P Parameter: Organism Value: A. thaliana
  misc_feature: MA Experiment 20000574 PARAMETER Experiment Name: At_100uM_ABA_Mutants__P Parameter: Plant Line Value: CS23 vs. Ler wt
  misc_feature: MA Experiment 20000574 PARAMETER Experiment Name: At_100uM_ABA_Mutants__P Parameter: Timepoint (hr) Value: N/A
  misc_feature: MA Experiment 20000574 PARAMETER Experiment Name: At_100uM_ABA_Mutants__P Parameter: Tissue Value: Whole Plant
  misc_feature: MA Experiment 20000574 PARAMETER Experiment Name: At_100uM_ABA_Mutants__P Parameter: Treatment Value: None
  misc_feature: MA Experiment ID: 20001248 Result: Up-regulated in Transcription
  misc_feature: MA Experiment 20001248 PARAMETER Experiment Name: At_Far-red-induction_P Parameter: Age (day) Value: 7
  misc_feature: MA Experiment 20001248 PARAMETER Experiment Name: At_Far-red-induction_P Parameter: Light Value: Far-red vs. White
  misc_feature: MA Experiment 20001248 PARAMETER Experiment Name: At_Far-red-induction_P Parameter: Organism Value: A. thaliana
  misc_feature: MA Experiment 20001248 PARAMETER Experiment Name: At_Far-red-induction_P Parameter: Plant Line Value: Columbia
  misc_feature: MA Experiment 20001248 PARAMETER Experiment Name: At_Far-red-induction_P Parameter: Timepoint (hr) Value: 4
  misc_feature: MA Experiment 20001248 PARAMETER Experiment Name: At_Far-red-induction_P Parameter: Tissue Value: Whole Plant
  misc_feature: MA Experiment ID: 20001555 Result: Down-regulated in Transcription
  misc_feature: MA Experiment 20001555 PARAMETER Experiment Name: At_Drought_Soil_Dry_P Parameter: Age (day) Value: 24
  misc_feature: MA Experiment 20001555 PARAMETER Experiment Name: At_Drought_Soil_Dry_P Parameter: Organism Value: A. thaliana
  misc_feature: MA Experiment 20001555 PARAMETER Experiment Name: At_Drought_Soil_Dry_P Parameter: Plant Line Value: WS
  misc_feature: MA Experiment 20001555 PARAMETER Experiment Name: At_Drought_Soil_Dry_P Parameter: Post Timepoint (hr) Value: None
  misc_feature: MA Experiment 20001555 PARAMETER Experiment Name: At_Drought_Soil_Dry_P Parameter: Post-Treatment Value: None
  misc_feature: MA Experiment 20001555 PARAMETER Experiment Name: At_Drought_Soil_Dry_P Parameter: Timepoint (day) Value: 10
  misc_feature: MA Experiment 20001555 PARAMETER Experiment Name: At_Drought_Soil_Dry_P Parameter: Treatment Value: Drought vs. No Drought
  misc_feature: MA Experiment ID: 20001557 Result: Up-regulated in Transcription
  misc_feature: MA Experiment 20001557 PARAMETER Experiment Name: At_Drought_Soil_Dry_P Parameter: Age (day) Value: 27
  misc_feature: MA Experiment 20001557 PARAMETER Experiment Name: At_Drought_Soil_Dry_P Parameter: Organism Value: A. thaliana
  misc_feature: MA Experiment 20001557 PARAMETER Experiment Name: At_Drought_Soil_Dry_P Parameter: Plant Line Value: WS
  misc_feature: MA Experiment 20001557 PARAMETER Experiment Name: At_Drought_Soil_Dry_P Parameter: Post Timepoint (hr) Value: 3
  misc_feature: MA Experiment 20001557 PARAMETER Experiment Name: At_Drought_Soil_Dry_P Parameter: Post-Treatment Value: Re-Water vs. No Drought
  misc_feature: MA Experiment 20001557 PARAMETER Experiment Name: At_Drought_Soil_Dry_P Parameter: Timepoint (day) Value: 13
  misc_feature: MA Experiment 20001557 PARAMETER Experiment Name: At_Drought_Soil_Dry_P Parameter: Treatment Value: Drought vs. No Drought
  misc_feature: MA Experiment ID: 20001560 Result: Down-regulated in Transcription
  misc_feature: MA Experiment 20001560 PARAMETER Experiment Name: At_Drought_Soil_Dry_P Parameter: Age (day) Value: 28
  misc_feature: MA Experiment 20001560 PARAMETER Experiment Name: At_Drought_Soil_Dry_P Parameter: Organism Value: A. thaliana
  misc_feature: MA Experiment 20001560 PARAMETER Experiment Name: At_Drought_Soil_Dry_P Parameter: Plant Line Value: WS
  misc_feature: MA Experiment 20001560 PARAMETER Experiment Name: At_Drought_Soil_Dry_P Parameter: Post Timepoint (hr) Value: None
  misc_feature: MA Experiment 20001560 PARAMETER Experiment Name: At_Drought_Soil_Dry_P Parameter: Post-Treatment Value: None
  misc_feature: MA Experiment 20001560 PARAMETER Experiment Name: At_Drought_Soil_Dry_P Parameter: Timepoint (day) Value: 14
  misc_feature: MA Experiment 20001560 PARAMETER Experiment Name: At_Drought_Soil_Dry_P Parameter: Treatment Value: Drought vs. No Drought
  misc_feature: MA Experiment ID: 20001905 Result: Up-regulated in Transcription
  misc_feature: MA Experiment 20001905 PARAMETER Experiment Name: At_Drought_Reproduction_P Parameter: Age (day) Value: 40
  misc_feature: MA Experiment 20001905 PARAMETER Experiment Name: At_Drought_Reproduction_P Parameter: Organism Value: A. thaliana
  misc_feature: MA Experiment 20001905 PARAMETER Experiment Name: At_Drought_Reproduction_P Parameter: Plant Line Value: WS
  misc_feature: MA Experiment 20001905 PARAMETER Experiment Name: At_Drought_Reproduction_P Parameter: Timepoint (day) Value: 10
  misc_feature: MA Experiment 20001905 PARAMETER Experiment Name: At_Drought_Reproduction_P Parameter: Tissue Value: Rosettes
  misc_feature: MA Experiment 20001905 PARAMETER Experiment Name: At_Drought_Reproduction_P Parameter: Treatment Value: Drought vs. No Drought
atcacaaatcaaacactttcatacatgagcaatattcaagaaatggagatgatattgatggtctctttgtgcttaacgaccctcattacccttttcttgcttaaacaattcctcaaacgaaccgccaacaaagtgaacttaccaccatctccatggaggcttccgttgattggtaacctccaccagcttagcctccaccctcaccgttccctccattccctaagccttcggtacggaccactcatgctccttcattttggccgtgtccccatactcgtagtatcctccggggaagcagctcaagaggtattgaaaacacacgatcttaagtttgccaaccgcccgagatcaaaagccgttcatgggcttatgaatggggggcgtgatgtggtgtttggtccctatggagaatattggagacagatgaagagtgtatgcattctcaatctgctcacgaacaaaatggttgcgtcctttgagaagataagagaagaagagctaaatgaaatgatcaagaagctggagaaagcaagttcttcttcttcgtcagaaaatctgagcgaactctttgttactctcccaagcgatgttacgagtagaattgccttgggaagaaaacatagtgaggacgaaaccgcaagggatctcaagaagcgagtgaggcagatcatggagcttttaggcgagttcccaatcggggactatgtcccggctttggcatggatagacaggatcaacggtttcaatgctagaataaaggaagtaagtcaagggtttagcgatcttatggacaaagtggtgcaagaacatttagaggcaggtaatcataaagaggactttgtcgatatactgttatcaatcgaaagcgagaagagtattggattccaagctcaaagagacgacatcaaattcatgatattggatatgtttataggagggacgtcaacaagttcaactctactagaatggataatgacggagctgatcagaaatccaaatgttatgaagaaactccaagacgagattcggtcaaccattaggccacatggttcatacataaaagaaaaagatgttgaaaatatgaaatacttgaaagccgtgattaaagaggtgtttcgggtgcatcctcctcttccactaatacttcccagattattaagtgaagatgtcaaagtaaagggatataacatagccgcaggaaccgaggtgataatcaatgcttgggccatccaaagagaccccgcgatatggggaccggatgcagaagaattcaaaccagaaagacatttagattcaactttggattatcatggaaaagatttaaacttcatcccattcggatcagggagaaggatttgtccagggataaatcttgctttgggtttggtagaggtgacagtggccaaccttgtaggccgatttgactggagggccgaggctggaccaaatggggatcaacctgatctaactgaagcttttggtctcgatgtttgccgaaagttccctctcattgcatttccatcttccgttatttaaaatgtttctctttttatcttttaccttgttatgcacttaattaataagaagcattgtaagatataataaaatccttcattttagaaaa

SEQ ID NO: 101667 - protein, 511 aa, Arabidopsis thaliana
  peptide (1)..(511): Ceres Seq. ID no. 13608410
  misc_feature (48)..(476): Pfam Name: Cytochrome P450 Pfam Description: Cytochrome P450
  misc_feature (9)..(511): Homolog of NCBI NO: 30684709 NR Description: cytochrome p450 71A12 [Arabidopsis thaliana] At2g30750/T11J7.14 [Arabidopsis thaliana]
  misc_feature (15)..(511): Homolog of NCBI NO: 13878362 NR Description: Cytochrome P450 71A12 >gi|25282591|pir||C84712
  misc_feature (15)..(511): Homolog of NCBI NO: 15224570 NR Description: cytochrome P450 71A13 [Arabidopsis thaliana]
  misc_feature (15)..(510): Homolog of NCBI NO: 22329490 NR Description: cytochrome P450, putative [Arabidopsis thaliana]
  misc_feature (70)..(510): Homolog of NCBI NO: 25282567 NR Description: hypothetical protein [imported] - Arabidopsis >gi|4835796|gb|AAD30262.1|AC007296_23 Strong similarity to T11J7.14 putative cytochrome P450 from Arabidopsis thaliana and
  misc_feature (15)..(76): Homolog of NCBI NO: 25282567 NR Description: hypothetical protein [imported] - Arabidopsis >gi|4835796|gb|AAD30262.1|AC007296_23 Strong similarity to T11J7.14 putative cytochrome P450 from Arabidopsis thaliana and
  misc_feature (9)..(427): Homolog of NCBI NO: 26452759 NR Description: putative cytochrome P450 [Arabidopsis thaliana]
  misc_feature (15)..(508): Homolog of NCBI NO: 15238664 NR Description: cytochrome P450 71A14 [Arabidopsis thaliana]
  misc_feature (15)..(509): Homolog of NCBI NO: 15238652 NR Description: cytochrome P450 71A15 [Arabidopsis thaliana]
  misc_feature (18)..(509): Homolog of NCBI NO: 13878406 NR Description: Cytochrome P450 71A20 >gi|7430641|pir||T06288
ITNQTLSYMSNIQEMEMILMVSLCLTTLITLFLLKQFLKRTANKVNLPPSPWRLPLIGNLHQLSLHPHRSLHSLSLRYGPLMLLHFGRVPILVVSSGEAAQEVLKTHDLKFANRPRSKAVHGLMNGGRDVVFGPYGEYWRQMKSVCILNLLTNKMVASFEKIREEELNEMIKKLEKASSSSSSENLSELFVTLPSDVTSRIALGRKHSEDETARDLKKRVRQIMELLGEFPIGDYVPALAWIDRINGFNARIKEVSQGFSDLMDKVVQEHLEAGNHKEDFVDILLSIESEKSIGFQAQRDDIKFMILDMFIGGTSTSSTLLEWIMTELIRNPNVMKKLQDEIRSTIRPHGSYIKEKDVENMKYLKAVIKEVFRVHPPLPLILPRLLSEDVKVKGYNIAAGTEVIINAWAIQRDPAIWGPDAEEFKPERHLDSTLDYHGKDLNFIPFGSGRRICPGINLALGLVEVTVANLVGRFDWRAEAGPNGDQPDLTEAFGLDVCRKFPLIAFPSSVI

SEQ ID NO: 101668 - protein, 503 aa, Arabidopsis thaliana
  peptide (1)..(503): Ceres Seq. ID no. 13608411
  misc_feature (40)..(468): Pfam Name: Cytochrome P450 Pfam Description: Cytochrome P450
  misc_feature (1)..(503): Homolog of NCBI NO: 30684709 NR Description: cytochrome p450 71A12 [Arabidopsis thaliana] At2g30750/T11J7.14 [Arabidopsis thaliana]
  misc_feature (7)..(503): Homolog of NCBI NO: 13878362 NR Description: Cytochrome P450 71A12 >gi|25282591|pir||C84712
  misc_feature (7)..(503): Homolog of NCBI NO: 15224570 NR Description: cytochrome P450 71A13 [Arabidopsis thaliana]
  misc_feature (7)..(502): Homolog of NCBI NO: 22329490 NR Description: cytochrome P450, putative [Arabidopsis thaliana]
  misc_feature (62)..(502): Homolog of NCBI NO: 25282567 NR Description: hypothetical protein [imported] - Arabidopsis >gi|4835796|gb|AAD30262.1|AC007296_23 Strong similarity to T11J7.14 putative cytochrome P450 from Arabidopsis thaliana and
  misc_feature (7)..(68): Homolog of NCBI NO: 25282567 NR Description: hypothetical protein [imported] - Arabidopsis >gi|4835796|gb|AAD30262.1|AC007296_23 Strong similarity to T11J7.14 putative cytochrome P450 from Arabidopsis thaliana and
  misc_feature (1)..(419): Homolog of NCBI NO: 26452759 NR Description: putative cytochrome P450 [Arabidopsis thaliana]
  misc_feature (7)..(500): Homolog of NCBI NO: 15238664 NR Description: cytochrome P450 71A14 [Arabidopsis thaliana]
  misc_feature (7)..(501): Homolog of NCBI NO: 15238652 NR Description: cytochrome P450 71A15 [Arabidopsis thaliana]
  misc_feature (10)..(501): Homolog of NCBI NO: 13878406 NR Description: Cytochrome P450 71A20 >gi|7430641|pir||T06288
MSNIQEMEMILMVSLCLTTLITLFLLKQFLKRTANKVNLPPSPWRLPLIGNLHQLSLHPHRSLHSLSLRYGPLMLLHFGRVPILVVSSGEAAQEVLKTHDLKFANRPRSKAVHGLMNGGRDVVFGPYGEYWRQMKSVCILNLLTNKMVASFEKIREEELNEMIKKLEKASSSSSSENLSELFVTLPSDVTSRIALGRKHSEDETARDLKKRVRQIMELLGEFPIGDYVPALAWIDRINGFNARIKEVSQGFSDLMDKVVQEHLEAGNHKEDFVDILLSIESEKSIGFQAQRDDIKFMILDMFIGGTSTSSTLLEWIMTELIRNPNVMKKLQDEIRSTIRPHGSYIKEKDVENMKYLKAVIKEVFRVHPPLPLILPRLLSEDVKVKGYNIAAGTEVIINAWAIQRDPAIWGPDAEEFKPERHLDSTLDYHGKDLNFIPFGSGRRICPGINLALGLVEVTVANLVGRFDWRAEAGPNGDQPDLTEAFGLDVCRKFPLIAFPSSVI

SEQ ID NO: 101669 - protein, 497 aa, Arabidopsis thaliana; identical to SEQ ID NO: 96730
  peptide (1)..(497): Ceres Seq. ID no. 13608412
  misc_feature (34)..(462): Pfam Name: Cytochrome P450 Pfam Description: Cytochrome P450
  misc_feature (1)..(497): Homolog of NCBI NO: 30684709 NR Description: cytochrome p450 71A12 [Arabidopsis thaliana] At2g30750/T11J7.14 [Arabidopsis thaliana]
  misc_feature (1)..(497): Homolog of NCBI NO: 13878362 NR Description: Cytochrome P450 71A12 >gi|25282591|pir||C84712
  misc_feature (1)..(497): Homolog of NCBI NO: 15224570 NR Description: cytochrome P450 71A13 [Arabidopsis thaliana]
  misc_feature (1)..(496): Homolog of NCBI NO: 22329490 NR Description: cytochrome P450, putative [Arabidopsis thaliana]
  misc_feature (56)..(496): Homolog of NCBI NO: 25282567 NR Description: hypothetical protein [imported] - Arabidopsis >gi|4835796|gb|AAD30262.1|AC007296_23 Strong similarity to T11J7.14 putative cytochrome P450 from Arabidopsis thaliana and
  misc_feature (1)..(62): Homolog of NCBI NO: 25282567 NR Description: hypothetical protein [imported] - Arabidopsis >gi|4835796|gb|AAD30262.1|AC007296_23 Strong similarity to T11J7.14 putative cytochrome P450 from Arabidopsis thaliana and
  misc_feature (1)..(413): Homolog of NCBI NO: 26452759 NR Description: putative cytochrome P450 [Arabidopsis thaliana]
  misc_feature (1)..(494): Homolog of NCBI NO: 15238664 NR Description: cytochrome P450 71A14 [Arabidopsis thaliana]
  misc_feature (1)..(495): Homolog of NCBI NO: 15238652 NR Description: cytochrome P450 71A15 [Arabidopsis thaliana]
  misc_feature (4)..(495): Homolog of NCBI NO: 13878406 NR Description: Cytochrome P450 71A20 >gi|7430641|pir||T06288

SEQ ID NO: 101670 - DNA, 953 bp, Arabidopsis thaliana
  misc_feature (1)..(953): Ceres Seq. ID no. 13608423
  misc_feature: MA Experiment ID: 108595 Result: Up-regulated in Transcription
  misc_feature: MA Experiment 108595 PARAMETER Experiment Name: At_Ler-pi_Ovule_cDNA_P Parameter: Plant Line Value: null
  misc_feature: MA Experiment ID: 20000089 Result: Down-regulated in Transcription
  misc_feature: MA Experiment ID: 20000227 Result: Up-regulated in Transcription
  misc_feature: MA Experiment 20000227 PARAMETER Experiment Name: At_Root-Tips-vs-Tops_P Parameter: Tissue Value: Root Tips vs. Root Tops
  misc_feature: MA Experiment ID: 20000264 Result: Up-regulated in Transcription
  misc_feature: MA Experiment 20000264 PARAMETER Experiment Name: At_Open_Flower_P Parameter: Age (day) Value: 21
  misc_feature: MA Experiment 20000264 PARAMETER Experiment Name: At_Open_Flower_P Parameter: Plant Line Value: WS
  misc_feature: MA Experiment 20000264 PARAMETER Experiment Name: At_Open_Flower_P Parameter: Tissue Value: Open Flower vs. Whole Plant
atgtttgtgatagtaattcgtcatcctgaagtgaagtgggctgagactaccgagaagattttcctcactgtagtattagctgatactaaggataccaaggttaacctagacccagaaggagtctttgatttctctgcgaaagttggtccagaaaaccacgtttatgagctcaaactggaacttgccgataaagtcaatgttgaggaaagcaaaatcaacattggagagagaagcatattctgcataattgagaaagcagagccggaaaggtggaataagctactccgtgtgaagaagcccccacactatgtcaaggttgattgggacaagtgggttgatgaggacgatgaaggcagtgctggtgccgcagatatggatatggcaggaatggaaggaatgggaggaatgggaggcatgggcggcatgggaggaatgggtggaatgggaggaatgggtggaatgggaggaatggaaggaatggatttctcgatatacctagctctgagaaatgacctcatacttgatccttgcttcgtgcagaaattaatgggtggaatgggtggaatgggtggaatgggcggactcgaagggctcggtggaatgggaggcatgggtggaatgggaggcatgggtggtatgggaggcatggaagagtttgaagacagtgatgatgaagaagagacagcaaaatcaggagacaagaaggatgatgccgttaaggaggaaggtcttgcgacagagaaggcaccagcggcagaagaaacaacatctgttaaggaagacaagtgaagactctgttctagagatgatgaaaaaccatatggtattattagcttttcaggtttatgaaaccctctgaattacttcctcttttatatgaatgttgttggtactctgttttctttctatggatttgatcttggtttaagtttcttctaccttttgttttgggt

SEQ ID NO: 101671 - protein, 262 aa, Arabidopsis thaliana
  peptide (1)..(262): Ceres Seq. ID no. 13608424
  misc_feature (123)..(175): Pfam Name: Bindin Pfam Description: Bindin
  misc_feature (1)..(262): Homolog of NCBI NO: 7487014 NR Description: hypothetical protein T14P8.5 - Arabidopsis >gi|3193303|gb|AAC19287.1| similar to several proteins containing
  misc_feature (7)..(254): Homolog of NCBI NO: 30679149 NR Description: glycine-rich protein [Arabidopsis thaliana] AT4g02450/T14P8_5 [Arabidopsis thaliana]
  misc_feature (7)..(254): Homolog of NCBI NO: 11229591 NR Description: p23 co-chaperone [Arabidopsis thaliana]
  misc_feature (111)..(262): Homolog of NCBI NO: 30679149 NR Description: glycine-rich protein [Arabidopsis thaliana] AT4g02450/T14P8_5 [Arabidopsis thaliana]
  misc_feature (111)..(262): Homolog of NCBI NO: 11229591 NR Description: p23 co-chaperone [Arabidopsis thaliana]
  misc_feature (7)..(135): Homolog of NCBI NO: 40882701 NR Description: putative ripening regulated protein [Oryza sativa
  misc_feature (200)..(249): Homolog of NCBI NO: 40882701 NR Description: putative ripening regulated protein [Oryza sativa
  misc_feature (8)..(242): Homolog of NCBI NO: 23509732 NR Description: hypothetical protein [Plasmodium falciparum 3D7]
  misc_feature (7)..(143): Homolog of NCBI NO: 11934654 NR Description: p23 [Brassica napus]
  misc_feature (7)..(131): Homolog of NCBI NO: 12231292 NR Description: ripening regulated protein DDTFR8 [Lycopersicon
MFVIVIRHPEVKWAETTEKIFLTVVLADTKDTKVNLDPEGVFDFSAKVGPENHVYELKLELADKVNVEESKINIGERSIFCIIEKAEPERWNKLLRVKKPPHYVKVDWDKWVDEDDEGSAGAADMDMAGMEGMGGMGGMGGMGGMGGMGGMGGMGGMEGMDFSIYLALRNDLILDPCFVQKLMGGMGGMGGMGGLEGLGGMGGMGGMGGMGGMGGMEEFEDSDDEEETAKSGDKKDDAVKEEGLATEKAPAAEETTSVKEDK

SEQ ID NO: 101672 - protein, 138 aa, Arabidopsis thaliana
  peptide (1)..(138): Ceres Seq. ID no. 13608425
  misc_feature (1)..(51): Pfam Name: Bindin Pfam Description: Bindin
  misc_feature (1)..(138): Homolog of NCBI NO: 7487014 NR Description: hypothetical protein T14P8.5 - Arabidopsis >gi|3193303|gb|AAC19287.1| similar to several proteins containing
  misc_feature (1)..(130): Homolog of NCBI NO: 30679149 NR Description: glycine-rich protein [Arabidopsis thaliana] AT4g02450/T14P8_5 [Arabidopsis thaliana]
  misc_feature (1)..(130): Homolog of NCBI NO: 11229591 NR Description: p23 co-chaperone [Arabidopsis thaliana]
  misc_feature (1)..(138): Homolog of NCBI NO: 30679149 NR Description: glycine-rich protein [Arabidopsis thaliana] AT4g02450/T14P8_5 [Arabidopsis thaliana]
  misc_feature (1)..(138): Homolog of NCBI NO: 11229591 NR Description: p23 co-chaperone [Arabidopsis thaliana]
  misc_feature (1)..(11): Homolog of NCBI NO: 40882701 NR Description: putative ripening regulated protein [Oryza sativa
  misc_feature (76)..(125): Homolog of NCBI NO: 40882701 NR Description: putative ripening regulated protein [Oryza sativa
  misc_feature (1)..(118): Homolog of NCBI NO: 23509732 NR Description: hypothetical protein [Plasmodium falciparum 3D7]
  misc_feature (1)..(19): Homolog of NCBI NO: 11934654 NR Description: p23 [Brassica napus]
  misc_feature (1)..(118): Homolog of NCBI NO: 886764 NR Description: GGM tandem repeat protein [Plasmodium falciparum]
MDMAGMEGMGGMGGMGGMGGMGGMGGMGGMGGMEGMDFSIYLALRNDLILDPCFVQKLMGGMGGMGGMGGLEGLGGMGGMGGMGGMGGMGGMEEFEDSDDEEETAKSGDKKDDAVKEEGLATEKAPAAEETTSVKEDK

SEQ ID NO: 101673 - protein, 136 aa, Arabidopsis thaliana
  peptide (1)..(136): Ceres Seq. ID no. 13608426
  misc_feature (1)..(136): Homolog of NCBI NO: 7487014 NR Description: hypothetical protein T14P8.5 - Arabidopsis >gi|3193303|gb|AAC19287.1| similar to several proteins containing
  misc_feature (1)..(128): Homolog of NCBI NO: 30679149 NR Description: glycine-rich protein [Arabidopsis thaliana] AT4g02450/T14P8_5 [Arabidopsis thaliana]
  misc_feature (1)..(128): Homolog of NCBI NO: 11229591 NR Description: p23 co-chaperone [Arabidopsis thaliana]
  misc_feature (1)..(136): Homolog of NCBI NO: 30679149 NR Description: glycine-rich protein [Arabidopsis thaliana] AT4g02450/T14P8_5 [Arabidopsis thaliana]
  misc_feature (1)..(136): Homolog of NCBI NO: 11229591 NR Description: p23 co-chaperone [Arabidopsis thaliana]
  misc_feature (74)..(123): Homolog of NCBI NO: 40882701 NR Description: putative ripening regulated protein [Oryza sativa
  misc_feature (1)..(116): Homolog of NCBI NO: 23509732 NR Description: hypothetical protein [Plasmodium falciparum 3D7]
  misc_feature (1)..(17): Homolog of NCBI NO: 11934654 NR Description: p23 [Brassica napus]
  misc_feature (1)..(116): Homolog of NCBI NO: 886764 NR Description: GGM tandem repeat protein [Plasmodium falciparum]
  misc_feature (1)..(37): Homolog of NCBI NO: 18376119 NR Description: related to Hsp90 associated co-chaperone
MAGMEGMGGMGGMGGMGGMGGMGGMGGMGGMEGMDFSIYLALRNDLILDPCFVQKLMGGMGGMGGMGGLEGLGGMGGMGGMGGMGGMGGMEEFEDSDDEEETAKSGDKKDDAVKEEGLATEKAPAAEETTSVKEDK

SEQ ID NO: 101674 - DNA, 1234 bp, Arabidopsis thaliana
  misc_feature (1)..(1234): Ceres Seq. ID no. 13608438
  misc_feature: MA Experiment ID: 108501 Result: Down-regulated in Transcription
  misc_feature: MA Experiment 108501 PARAMETER Experiment Name: At_ap2_floral_buds_cDNA_P Parameter: Plant Line Value: ap2 (Ler.)
  misc_feature: MA Experiment 108501 PARAMETER Experiment Name: At_ap2_floral_buds_cDNA_P Parameter: Tissue Value: Closed Flower
  misc_feature: MA Experiment ID: 108579 Result: Down-regulated in Transcription
  misc_feature: MA Experiment 108579 PARAMETER Experiment Name: At_4deg_Cold_cDNA_P Parameter: Temperature (deg C) Value: 4 vs. 22
  misc_feature: MA Experiment 108579 PARAMETER Experiment Name: At_4deg_Cold_cDNA_P Parameter: Timepoint (hr) Value: 6
  misc_feature: MA Experiment 108579 PARAMETER Experiment Name: At_4deg_Cold_cDNA_P Parameter: Tissue Value: Aerial
  misc_feature: MA Experiment ID: 108595 Result: Up-regulated in Transcription
  misc_feature: MA Experiment 108595 PARAMETER Experiment Name: At_Ler-pi_Ovule_cDNA_P Parameter: Plant Line Value: null
  misc_feature: MA Experiment ID: 20000030 Result: Down-regulated in Transcription
  misc_feature: MA Experiment 20000030 PARAMETER Experiment Name: At_CS6630_Roots_cDNA_P Parameter: Plant Line Value: CS6630 vs. WS
  misc_feature: MA Experiment 20000030 PARAMETER Experiment Name: At_CS6630_Roots_cDNA_P Parameter: Tissue Value: Roots
  misc_feature: MA Experiment ID: 20000089 Result: Up-regulated in Transcription
acttccggcggagaacgatgtctccgataccggaaagggcaaagcttcacatagctatggtggtgtttcagacaggctacgctggtaatcacgtgatcatgagatatgctctaaacttaggagtaagcaagctcgtcttcccactttaccgcaccatcgtcgctttctctgttcttgctccctctgcttacttccttgaaaaaaaagaaagaccggcgatgaaaatcagttttctgattcaattcttccttcttggactcgttggaataacgttaaaccaaggattttacatctttggattggacaatacctcaccaacattcgcatcagcaactgaaaatgttgttcctgctgtttcattcctcatggcagcgttgctcggaatagagaaggtggaatggaagaggaaagatggtatagccaaagtggtggggacaattgtatctgtcgcaggctctttggttataacactctataaaggaccaaccatttaccaaccgagtctgaatatagtgaaccaaactattaaacctgaagaagcagaggaagaaaacaagaactggacgttgggatgtctctgtttgatgggtcactgtttatgttggtcaagttggattgtgttacaatcaccattgcttaaaaagtacccagctcgcttctccttcgtctcctattcttgctttttcgcagtgatacagttctttggaatttcggcttatttcgagagagatctagagaggtggaagataatatcaggaggcgaattatacgcgttactctacactggtttagttggttcagcaatggtgtttgcaatacaaatatatgtagtggaaagaggaggacctctgtttgtatcagcgtatttgcctcttcaaactttgattgctgctgttttagctactttagctcttggtgaacacttttaccttggaggattgataggtgcaatactaatcatgagtggactatacttagttgtgatgggaaagagttgggagaatcaagctctttgccaacaacaacaacacatgatttcttcagcagcatcagattttggtgatgaagaagactaccataataataaaccaagatctcctattagtcaaccattaatttcttcctaaattttgttagatcctatttatgtcttaaattcctagttcctactctcttcctcattaaaatcgaaatggacccggttgacgaaatagagataaaaataaatttggtt

SEQ ID NO: 101675 - protein, 374 aa, Arabidopsis thaliana
  peptide (1)..(374): Ceres Seq. ID no. 13608439
  misc_feature (24)..(157): Pfam Name: Integral membrane protein DUF6 Pfam Description: Integral membrane protein DUF6
  misc_feature (6)..(374): Homolog of NCBI NO: 18409794 NR Description: nodulin MtN21 family protein [Arabidopsis
  misc_feature (19)..(374): Homolog of NCBI NO: 21593130 NR Description: nodulin-like protein [Arabidopsis thaliana]
  misc_feature (6)..(195): Homolog of NCBI NO: 11358354 NR Description: hypothetical protein T4D2.140 - Arabidopsis >gi|6630741|emb|CAB64224.1| putative protein [Arabidopsis
  misc_feature (230)..(374): Homolog of NCBI NO: 11358354 NR Description: hypothetical protein T4D2.140 - Arabidopsis >gi|6630741|emb|CAB64224.1| putative protein [Arabidopsis
  misc_feature (3)..(372): Homolog of NCBI NO: 18410867 NR Description: nodulin MtN21 family protein [Arabidopsis >gi|15028079|gb|AAK76570.1| putative nodulin protein [Arabidopsis >gi|20259307|gb|AAM14389.1| putative nodulin protein [Arabidopsis
  misc_feature (11)..(336): Homolog of NCBI NO: 34895316 NR Description: putative nodulin [Oryza sativa (japonica
  misc_feature (9)..(342): Homolog of NCBI NO: 9294076 NR Description: nodulin-like protein [Arabidopsis thaliana]
  misc_feature (9)..(342): Homolog of NCBI NO: 15229596 NR Description: nodulin MtN21 family protein [Arabidopsis
  misc_feature (149)..(372): Homolog of NCBI NO: 25404978 NR Description: protein F10A5.28 [imported] - Arabidopsis >gi|9369372|gb|AAF87121.1|AC006434_17 F10A5.28 [Arabidopsis
  misc_feature (3)..(88): Homolog of NCBI NO: 25404978 NR Description: protein F10A5.28 [imported] - Arabidopsis >gi|9369372|gb|AAF87121.1|AC006434_17 F10A5.28 [Arabidopsis
FRRRTMSPIPERAKLHIAMVVFQTGYAGNHVIMRYALNLGVSKLVFPLYRTIVAFSVLAPSAYFLEKKERPAMKISFLIQFFLLGLVGITLNQGFYIFGLDNTSPTFASATENVVPAVSFLMAALLGIEKVEWKRKDGIAKVVGTIVSVAGSLVITLYKGPTIYQPSLNIVNQTIKPEEAEEENKNWTLGCLCLMGHCLCWSSWIVLQSPLLKKYPARFSFVSYSCFFAVIQFFGISAYFERDLERWKIISGGELYALLYTGLVGSAMVFAIQIYVVERGGPLFVSAYLPLQTLIAAVLATLALGEHFYLGGLIGAILIMSGLYLVVMGKSWENQALCQQQQHMISSAASDFGDEEDYHNNKPRSPISQPLISS

SEQ ID NO: 101676 - protein, 369 aa, Arabidopsis thaliana
  peptide (1)..(369): Ceres Seq. ID no. 13608440
  misc_feature (19)..(152): Pfam Name: Integral membrane protein DUF6 Pfam Description: Integral membrane protein DUF6
  misc_feature (1)..(369): Homolog of NCBI NO: 18409794 NR Description: nodulin MtN21 family protein [Arabidopsis
  misc_feature (14)..(369): Homolog of NCBI NO: 21593130 NR Description: nodulin-like protein [Arabidopsis thaliana]
  misc_feature (1)..(190): Homolog of NCBI NO: 11358354 NR Description: hypothetical protein T4D2.140 - Arabidopsis >gi|6630741|emb|CAB64224.1| putative protein [Arabidopsis
  misc_feature (225)..(369): Homolog of NCBI NO: 11358354 NR Description: hypothetical protein T4D2.140 - Arabidopsis >gi|6630741|emb|CAB64224.1| putative protein [Arabidopsis
  misc_feature (1)..(367): Homolog of NCBI NO: 18410867 NR Description: nodulin MtN21 family protein [Arabidopsis >gi|15028079|gb|AAK76570.1| putative nodulin protein [Arabidopsis >gi|20259307|gb|AAM14389.1| putative nodulin protein [Arabidopsis
  misc_feature (6)..(331): Homolog of NCBI NO: 34895316 NR Description: putative nodulin [Oryza sativa (japonica
  misc_feature (4)..(337): Homolog of NCBI NO: 9294076 NR Description: nodulin-like protein [Arabidopsis thaliana]
  misc_feature (4)..(337): Homolog of NCBI NO: 15229596 NR Description: nodulin MtN21 family protein [Arabidopsis
  misc_feature (144)..(367): Homolog of NCBI NO: 25404978 NR Description: protein F10A5.28 [imported] - Arabidopsis >gi|9369372|gb|AAF87121.1|AC006434_17 F10A5.28 [Arabidopsis
  misc_feature (1)..(83): Homolog of NCBI NO: 25404978 NR Description: protein F10A5.28 [imported] - Arabidopsis >gi|9369372|gb|AAF87121.1|AC006434_17 F10A5.28 [Arabidopsis
MSPIPERAKLHIAMVVFQTGYAGNHVIMRYALNLGVSKLVFPLYRTIVAFSVLAPSAYFLEKKERPAMKISFLIQFFLLGLVGITLNQGFYIFGLDNTSPTFASATENVVPAVSFLMAALLGIEKVEWKRKDGIAKVVGTIVSVAGSLVITLYKGPTIYQPSLNIVNQTIKPEEAEEENKNWTLGCLCLMGHCLCWSSWIVLQSPLLKKYPARFSFVSYSCFFAVIQFFGISAYFERDLERWKIISGGELYALLYTGLVGSAMVFAIQIYVVERGGPLFVSAYLPLQTLIAAVLATLALGEHFYLGGLIGAILIMSGLYLVVMGKSWENQALCQQQQHMISSAASDFGDEEDYHNNKPRSPISQPLISS

SEQ ID NO: 101677 - protein, 356 aa, Arabidopsis thaliana; identical to SEQ ID NO: 23462
  peptide (1)..(356): Ceres Seq. ID no. 13608441
  misc_feature (6)..(139): Pfam Name: Integral membrane protein DUF6 Pfam Description: Integral membrane protein DUF6
  misc_feature (1)..(356): Homolog of NCBI NO: 18409794 NR Description: nodulin MtN21 family protein [Arabidopsis
  misc_feature (1)..(356): Homolog of NCBI NO: 21593130 NR Description: nodulin-like protein [Arabidopsis thaliana]
  misc_feature (1)..(177): Homolog of NCBI NO: 11358354 NR Description: hypothetical protein T4D2.140 - Arabidopsis >gi|6630741|emb|CAB64224.1| putative protein [Arabidopsis
  misc_feature (212)..(356): Homolog of NCBI NO: 11358354 NR Description: hypothetical protein T4D2.140 - Arabidopsis >gi|6630741|emb|CAB64224.1| putative protein [Arabidopsis
  misc_feature (1)..(354): Homolog of NCBI NO: 18410867 NR Description: nodulin MtN21 family protein [Arabidopsis >gi|15028079|gb|AAK76570.1| putative nodulin protein [Arabidopsis >gi|20259307|gb|AAM14389.1| putative nodulin protein [Arabidopsis
  misc_feature (1)..(318): Homolog of NCBI NO: 34895316 NR Description: putative nodulin [Oryza sativa (japonica
  misc_feature (1)..(324): Homolog of NCBI NO: 9294076 NR Description: nodulin-like protein [Arabidopsis thaliana]
  misc_feature (1)..(324): Homolog of NCBI NO: 15229596 NR Description: nodulin MtN21 family protein [Arabidopsis
  misc_feature (131)..(354): Homolog of NCBI NO: 25404978 NR Description: protein F10A5.28 [imported] - Arabidopsis >gi|9369372|gb|AAF87121.1|AC006434_17 F10A5.28 [Arabidopsis
  misc_feature (1)..(70): Homolog of NCBI NO: 25404978 NR Description: protein F10A5.28 [imported] - Arabidopsis >gi|9369372|gb|AAF87121.1|AC006434_17 F10A5.28 [Arabidopsis

SEQ ID NO: 101678 - DNA, 1294 bp, Arabidopsis thaliana
  misc_feature (1)..(1294): Ceres Seq. ID no. 13608446
  misc_feature: MA Experiment ID: 108434 Result: Down-regulated in Transcription
  misc_feature: MA Experiment 108434 PARAMETER Experiment Name: At_Root_Tips_cDNA_P Parameter: Tissue Value: Root Tips
  misc_feature: MA Experiment ID: 108461 Result: Up-regulated in Transcription
  misc_feature: MA Experiment 108461 PARAMETER Experiment Name: At_Germinating_Seeds_cDNA_P Parameter: Age (day) Value: 1 vs. 0
  misc_feature: MA Experiment 108461 PARAMETER Experiment Name: At_Germinating_Seeds_cDNA_P Parameter: Tissue Value: Germinating Seeds
  misc_feature: MA Experiment ID: 108462 Result: Up-regulated in Transcription
  misc_feature: MA Experiment 108462 PARAMETER Experiment Name: At_Germinating_Seeds_cDNA_P Parameter: Age (day) Value: 2 vs. 0
  misc_feature: MA Experiment 108462 PARAMETER Experiment Name: At_Germinating_Seeds_cDNA_P Parameter: Tissue Value: Germinating Seeds
  misc_feature: MA Experiment ID: 108463 Result: Up-regulated in Transcription
  misc_feature: MA Experiment 108463 PARAMETER Experiment Name: At_Germinating_Seeds_cDNA_P Parameter: Age (day) Value: 3 vs. 0
  misc_feature: MA Experiment 108463 PARAMETER Experiment Name: At_Germinating_Seeds_cDNA_P Parameter: Tissue Value: Germinating Seeds
  misc_feature: MA Experiment ID: 108464 Result: Up-regulated in Transcription
  misc_feature: MA Experiment 108464 PARAMETER Experiment Name: At_Germinating_Seeds_cDNA_P Parameter: Age (day) Value: 4 vs. 0
  misc_feature: MA Experiment 108464 PARAMETER Experiment Name: At_Germinating_Seeds_cDNA_P Parameter: Tissue Value: Germinating Seeds
  misc_feature: MA Experiment ID: 108488 Result: Down-regulated in Transcription
  misc_feature: MA Experiment ID: 108489 Result: Up-regulated in Transcription
  misc_feature: MA Experiment ID: 108573 Result: Up-regulated in Transcription
  misc_feature: MA Experiment 108573 PARAMETER Experiment Name: At_Drought_cDNA_P Parameter: Timepoint (hr) Value: 6
  misc_feature: MA Experiment 108573 PARAMETER Experiment Name: At_Drought_cDNA_P Parameter: Tissue Value: Aerial
  misc_feature: MA Experiment 108573 PARAMETER Experiment Name: At_Drought_cDNA_P Parameter: Treatment Value: Drought vs. No Drought
  misc_feature: MA Experiment ID: 108579 Result: Up-regulated in Transcription
  misc_feature: MA Experiment 108579 PARAMETER Experiment Name: At_4deg_Cold_cDNA_P Parameter: Temperature (deg C) Value: 4 vs. 22
  misc_feature: MA Experiment 108579 PARAMETER Experiment Name: At_4deg_Cold_cDNA_P Parameter: Timepoint (hr) Value: 6
  misc_feature: MA Experiment 108579 PARAMETER Experiment Name: At_4deg_Cold_cDNA_P Parameter: Tissue Value: Aerial
  misc_feature: MA Experiment ID: 108585 Result: Up-regulated in Transcription
  misc_feature: MA Experiment 108585 PARAMETER Experiment Name: At_5mM_NaNP_cDNA_P Parameter: Timepoint (hr) Value: 6
  misc_feature: MA Experiment 108585 PARAMETER Experiment Name: At_5mM_NaNP_cDNA_P Parameter: Tissue Value: Aerial
  misc_feature: MA Experiment 108585 PARAMETER Experiment Name: At_5mM_NaNP_cDNA_P Parameter: Treatment Value: null
  misc_feature: MA Experiment ID: 20000179 Result: Up-regulated in Transcription
  misc_feature: MA Experiment 20000179 PARAMETER Experiment Name: At_Germinating_Seeds_P Parameter: Age (hr) Value: 6 vs. 0
  misc_feature: MA Experiment 20000179 PARAMETER Experiment Name: At_Germinating_Seeds_P Parameter: Tissue Value: Germinating Seeds
  misc_feature: MA Experiment ID: 20000180 Result: Up-regulated in Transcription
  misc_feature: MA Experiment 20000180 PARAMETER Experiment Name: At_Germinating_Seeds_P Parameter: Age (hr) Value: 24 vs. 0
  misc_feature: MA Experiment 20000180 PARAMETER Experiment Name: At_Germinating_Seeds_P Parameter: Tissue Value: Germinating Seeds
  misc_feature: MA Experiment ID: 20000213 Result: Up-regulated in Transcription
  misc_feature: MA Experiment 20000213 PARAMETER Experiment Name: At_4deg_Cold_P Parameter: Timepoint (hr) Value: 2
  misc_feature: MA Experiment ID: 20000235 Result: Up-regulated in Transcription
  misc_feature: MA Experiment 20000235 PARAMETER Experiment Name: At_Siliques_P Parameter: Age (day) Value: 21
  misc_feature: MA Experiment 20000235 PARAMETER Experiment Name: At_Siliques_P Parameter: Organism Value: A. thaliana
  misc_feature: MA Experiment 20000235 PARAMETER Experiment Name: At_Siliques_P Parameter: Plant Line Value: WS
  misc_feature: MA Experiment 20000235 PARAMETER Experiment Name: At_Siliques_P Parameter: Tissue Value: 5-10mm Siliques vs. Whole Plant
  misc_feature: MA Experiment ID: 20000438 Result: Down-regulated in Transcription
  misc_feature: MA Experiment 20000438 PARAMETER Experiment Name: At_Shoots__P Parameter: Age (day) Value: 14
  misc_feature: MA Experiment 20000438 PARAMETER Experiment Name: At_Shoots__P Parameter: Tissue Value: Shoots vs. Whole Plant
  misc_feature: MA Experiment ID: 20000451 Result: Down-regulated in Transcription
  misc_feature: MA Experiment 20000451 PARAMETER Experiment Name: At_CS6879_Shoots-Roots_P Parameter: Age (day) Value: 14
  misc_feature: MA Experiment 20000451 PARAMETER Experiment Name: At_CS6879_Shoots-Roots_P Parameter: Organism Value: A. thaliana
  misc_feature: MA Experiment 20000451 PARAMETER Experiment Name: At_CS6879_Shoots-Roots_P Parameter: Plant Line Value: CS6879 vs. WS
  misc_feature: MA Experiment 20000451 PARAMETER Experiment Name: At_CS6879_Shoots-Roots_P Parameter: Tissue Value: Roots
  misc_feature: MA Experiment ID: 20000452 Result: Down-regulated in Transcription
  misc_feature: MA Experiment 20000452 PARAMETER Experiment Name: At_CS6879_Shoots-Roots_P Parameter: Age (day) Value: 14
  misc_feature: MA Experiment 20000452 PARAMETER Experiment Name: At_CS6879_Shoots-Roots_P Parameter: Organism Value: A. thaliana
  misc_feature: MA Experiment 20000452 PARAMETER Experiment Name: At_CS6879_Shoots-Roots_P Parameter: Plant Line Value: CS6879 vs. WS
  misc_feature: MA Experiment 20000452 PARAMETER Experiment Name: At_CS6879_Shoots-Roots_P Parameter: Tissue Value: Shoots
  misc_feature: MA Experiment ID: 20000495 Result: Up-regulated in Transcription
  misc_feature: MA Experiment 20000495 PARAMETER Experiment Name: At_Guard_Cells_P Parameter: Harvest Date Value: 8/2/2002
  misc_feature: MA Experiment 20000495 PARAMETER Experiment Name: At_Guard_Cells_P Parameter: Organism Value: A. thaliana
  misc_feature: MA Experiment 20000495 PARAMETER Experiment Name: At_Guard_Cells_P Parameter: Tissue Value: Guard Cells vs. Leaves
  misc_feature: MA Experiment ID: 20000527 Result: Down-regulated in Transcription
  misc_feature: MA Experiment 20000527 PARAMETER Experiment Name: At_10percent_PEG_P Parameter: Age (day) Value: 20
  misc_feature: MA Experiment 20000527 PARAMETER Experiment Name: At_10percent_PEG_P Parameter: Organism Value: A. thaliana
  misc_feature: MA Experiment 20000527 PARAMETER Experiment Name: At_10percent_PEG_P Parameter: Plant Line Value: WS
  misc_feature: MA Experiment 20000527 PARAMETER Experiment Name: At_10percent_PEG_P Parameter: Timepoint (day) Value: 20
  misc_feature: MA Experiment 20000527 PARAMETER Experiment Name: At_10percent_PEG_P Parameter: Tissue Value: Whole Plant
  misc_feature: MA Experiment 20000527 PARAMETER Experiment Name: At_10percent_PEG_P Parameter: Treatment Value: 10percent PEG vs. No Treatment
  misc_feature: MA Experiment ID: 20001557 Result: Up-regulated in Transcription
  misc_feature: MA Experiment 20001557 PARAMETER Experiment Name: At_Drought_Soil_Dry_P Parameter: Age (day) Value: 27
  misc_feature: MA Experiment 20001557 PARAMETER Experiment Name: At_Drought_Soil_Dry_P Parameter: Organism Value: A. thaliana
  misc_feature: MA Experiment 20001557 PARAMETER Experiment Name: At_Drought_Soil_Dry_P Parameter: Plant Line Value: WS
  misc_feature: MA Experiment 20001557 PARAMETER Experiment Name: At_Drought_Soil_Dry_P Parameter: Post Timepoint (hr) Value: 3
  misc_feature: MA Experiment 20001557 PARAMETER Experiment Name: At_Drought_Soil_Dry_P Parameter: Post-Treatment Value: Re-Water vs. No Drought
  misc_feature: MA Experiment 20001557 PARAMETER Experiment Name: At_Drought_Soil_Dry_P Parameter: Timepoint (day) Value: 13
  misc_feature: MA Experiment 20001557 PARAMETER Experiment Name: At_Drought_Soil_Dry_P Parameter: Treatment Value: Drought vs. No Drought
  misc_feature: MA Experiment ID: 20001904 Result: Up-regulated in Transcription
  misc_feature: MA Experiment 20001904 PARAMETER Experiment Name: At_Drought_Reproduction_P Parameter: Age (day) Value: 37
  misc_feature: MA Experiment 20001904 PARAMETER Experiment Name: At_Drought_Reproduction_P Parameter: Organism Value: A. thaliana
  misc_feature: MA Experiment 20001904 PARAMETER Experiment Name: At_Drought_Reproduction_P Parameter: Plant Line Value: WS
  misc_feature: MA Experiment 20001904 PARAMETER Experiment Name: At_Drought_Reproduction_P Parameter: Timepoint (day) Value: 7
  misc_feature: MA Experiment 20001904 PARAMETER Experiment Name: At_Drought_Reproduction_P Parameter: Tissue Value: Rosettes
  misc_feature: MA Experiment 20001904 PARAMETER Experiment Name: At_Drought_Reproduction_P Parameter: Treatment Value: Drought vs. No Drought
  misc_feature: MA Experiment ID: 20001905 Result: Up-regulated in Transcription
  misc_feature: MA Experiment 20001905 PARAMETER Experiment Name: At_Drought_Reproduction_P Parameter: Age (day) Value: 40
  misc_feature: MA Experiment 20001905 PARAMETER Experiment Name: At_Drought_Reproduction_P Parameter: Organism Value: A. thaliana
  misc_feature: MA Experiment 20001905 PARAMETER Experiment Name: At_Drought_Reproduction_P Parameter: Plant Line Value: WS
  misc_feature: MA Experiment 20001905 PARAMETER Experiment Name: At_Drought_Reproduction_P Parameter: Timepoint (day) Value: 10
  misc_feature: MA Experiment 20001905 PARAMETER Experiment Name: At_Drought_Reproduction_P Parameter: Tissue Value: Rosettes
  misc_feature: MA Experiment 20001905 PARAMETER Experiment Name: At_Drought_Reproduction_P Parameter: Treatment Value: Drought vs. No Drought
  misc_feature: MA Experiment ID: 20001911 Result: Down-regulated in Transcription
  misc_feature: MA Experiment 20001911 PARAMETER Experiment Name: At_Drought_Reproduction_P Parameter: Age (day) Value: 40
  misc_feature: MA Experiment 20001911 PARAMETER Experiment Name: At_Drought_Reproduction_P Parameter: Organism Value: A. thaliana
  misc_feature: MA Experiment 20001911 PARAMETER Experiment Name: At_Drought_Reproduction_P Parameter: Plant Line Value: WS
  misc_feature: MA Experiment 20001911 PARAMETER Experiment Name: At_Drought_Reproduction_P Parameter: Timepoint (day) Value: 10
  misc_feature: MA Experiment 20001911 PARAMETER Experiment Name: At_Drought_Reproduction_P Parameter: Tissue Value: Flowers
  misc_feature: MA Experiment 20001911 PARAMETER Experiment Name: At_Drought_Reproduction_P Parameter: Treatment Value: Drought vs. No Drought
atattccaaaattaaagagaatttaatttattgttttccttccagaaaaatattaatattctttctaaactaaaaaatggagtcttcaaatagcacagaagcagagacatagagcgggaacgcgtttagtcacagctttcttctcctttagcttttctctctacacttgcttctctctctctctcctttgggttatccttcttgagatctgtgcttgcgtttcttcttcattcgacgacactttatctcgggagatttcagatttgtcgatttgttcagcaatggcgccaccgattgaggtttctaccaaaagctacgttgagaaacatgtttcacttcctactcttaatgagaggatactttcgtccatgagtcacagatcagtagctgcacacccatggcatgatctcgagataggacctgaagccccaattatcttcaattgtgtggttgagataggaaaagggagcaaggtgaaatatgaactcgacaaaactacgggtctcattaaggtcgaccgtattctttactcatctgtcgtatacccacacaactatgggttcattccgcgtaccctttgtgaggacagtgaccctattgatgttcttgtcattatgcaggaaccggtgatcccaggatgctttcttcgggccaaagctattggtctgatgccaatgattgatcagggtgagaaagacgacaagatcattgctgtctgcgctgacgatccagagtatcgccattacaacgacatcagtgagcttccgcctcatcgtatggctgagatccgccgtttctttgaagactataagaaaaacgagaacaaggaagtagccgttaacgacttccttccggcaactgcagcctacgacgcagttcagcattccatggatctctatgcagactacgtcgtggagaacctaagacgttgaatcaccacctcaagcaatggaatgaaagctcacaactgcattattcacaaatataaatatacatataaatgtcaggcttctcaaaggatatatttgttgtgtatgtcctctgatgaatccggtagatgatgccgataattcttttttttttttgtcgtatgaaaccgataatcaaagactaaaacagggatttttctcatttgtggtcatcactttttaaattttggtgtcatttctcatcttaatcaatttgtttttgagttttattcttctattagatcttttatacatcaaagaatagatgaagattcctccctaaaaccttatagtatgtcatttattcacaatatgttatacgtgtt

SEQ ID NO: 101679 - protein, 216 aa, Arabidopsis thaliana
  peptide (1)..(216): Ceres Seq. ID no. 13608447
  misc_feature (54)..(208): Pfam Name: Inorganic pyrophosphatase Pfam Description: Inorganic pyrophosphatase
  misc_feature (1)..(216): Homolog of NCBI NO: 15231849 NR Description: inorganic pyrophosphatase -related protein
  misc_feature (1)..(216): Homolog of NCBI NO: 21593570 NR Description: inorganic pyrophosphatase-like protein
  misc_feature (1)..(216): Homolog of NCBI NO: 6752884 NR Description: soluble inorganic pyrophosphatase [Malus x
  misc_feature (1)..(216): Homolog of NCBI NO: 7436031 NR Description: probable inorganic diphosphatase (EC 3.6.1.1), - potato >gi|2706450|emb|CAA12415.1| magnesium dependent soluble
  misc_feature (20)..(216): Homolog of NCBI NO: 15223288 NR Description: soluble inorganic pyrophosphatase -related thaliana] >gi|15450699|gb|AAK96621.1| At1g01050/T25K16_5 thaliana] >gi|16323129|gb|AAL15299.1| At1g01050/T25K16_5
  misc_feature (1)..(216): Homolog of NCBI NO: 40642617 NR Description: soluble pyrophosphatase [Beta vulgaris]
  misc_feature (15)..(216): Homolog of NCBI NO: 5669924 NR Description: soluble inorganic pyrophosphatase [Populus
  misc_feature (19)..(216): Homolog of NCBI NO: 15226453 NR Description: inorganic pyrophosphatase -related [Arabidopsis
  misc_feature (6)..(216): Homolog of NCBI NO: 4033424 NR Description: Soluble inorganic pyrophosphatase (Pyrophosphate hydrolase) (PPase) >gi|7436036|pir||T01370 inorganic
  misc_feature (20)..(216): Homolog of NCBI NO: 2500047 NR Description: Soluble inorganic pyrophosphatase (Pyrophosphate hydrolase) (PPase) >gi|7436030|pir||T07594 probable inorganic
MAPPIEVSTKSYVEKHVSLPTLNERILSSMSHRSVAAHPWHDLEIGPEAPIIFNCVVEIGKGSKVKYELDKTTGLIKVDRILYSSVVYPHNYGFIPRTLCEDSDPIDVLVIMQEPVIPGCFLRAKAIGLMPMIDQGEKDDKIIAVCADDPEYRHYNDISELPPHRMAEIRRFFEDYKKNENKEVAVNDFLPATAAYDAVQHSMDLYADYVVENLRR

SEQ ID NO: 101680 - protein, 187 aa, Arabidopsis thaliana
  peptide (1)..(187): Ceres Seq. ID no. 13608448
  misc_feature (25)..(179): Pfam Name: Inorganic pyrophosphatase Pfam Description: Inorganic pyrophosphatase
  misc_feature (1)..(187): Homolog of NCBI NO: 15231849 NR Description: inorganic pyrophosphatase -related protein
  misc_feature (1)..(187): Homolog of NCBI NO: 21593570 NR Description: inorganic pyrophosphatase-like protein
  misc_feature (1)..(187): Homolog of NCBI NO: 6752884 NR Description: soluble inorganic pyrophosphatase [Malus x
  misc_feature (1)..(187): Homolog of NCBI NO: 7436031 NR Description: probable inorganic diphosphatase (EC 3.6.1.1), - potato >gi|2706450|emb|CAA12415.1| magnesium dependent soluble
  misc_feature (1)..(187): Homolog of NCBI NO: 15223288 NR Description: soluble inorganic pyrophosphatase -related thaliana] >gi|15450699|gb|AAK96621.1| At1g01050/T25K16_5 thaliana] >gi|16323129|gb|AAL15299.1| At1g01050/T25K16_5
  misc_feature (1)..(187): Homolog of NCBI NO: 40642617 NR Description: soluble pyrophosphatase [Beta vulgaris]
  misc_feature (1)..(187): Homolog of NCBI NO: 5669924 NR Description: soluble inorganic pyrophosphatase [Populus
  misc_feature (1)..(187): Homolog of NCBI NO: 15226453 NR Description: inorganic pyrophosphatase -related [Arabidopsis
  misc_feature (1)..(187): Homolog of NCBI NO: 4033424 NR Description: Soluble inorganic pyrophosphatase (Pyrophosphate hydrolase) (PPase) >gi|7436036|pir||T01370 inorganic
  misc_feature (1)..(187): Homolog of NCBI NO: 2500047 NR Description: Soluble inorganic pyrophosphatase (Pyrophosphate hydrolase) (PPase) >gi|7436030|pir||T07594 probable inorganic
MSHRSVAAHPWHDLEIGPEAPIIFNCVVEIGKGSKVKYELDKTTGLIKVDRILYSSVVYPHNYGFIPRTLCEDSDPIDVLVIMQEPVIPGCFLRAKAIGLMPMIDQGEKDDKIIAVCADDPEYRHYNDISELPPHRMAEIRRFFEDYKKNENKEVAVNDFLPATAAYDAVQHSMDLYADYVVENLRR

SEQ ID NO: 101681 - DNA, 2039 bp, Arabidopsis thaliana
  misc_feature (1)..(2039): Ceres Seq. ID no. 13608467
  misc_feature: MA Experiment ID: 108434 Result: Up-regulated in Transcription
  misc_feature: MA Experiment 108434 PARAMETER Experiment Name: At_Root_Tips_cDNA_P Parameter: Tissue Value: Root Tips
  misc_feature: MA Experiment ID: 108579 Result: Down-regulated in Transcription
  misc_feature: MA Experiment 108579 PARAMETER Experiment Name: At_4deg_Cold_cDNA_P Parameter: Temperature (deg C) Value: 4 vs. 22
  misc_feature: MA Experiment 108579 PARAMETER Experiment Name: At_4deg_Cold_cDNA_P Parameter: Timepoint (hr) Value: 6
  misc_feature: MA Experiment 108579 PARAMETER Experiment Name: At_4deg_Cold_cDNA_P Parameter: Tissue Value: Aerial
  misc_feature: MA Experiment ID: 20000117 Result: Down-regulated in Transcription
  misc_feature: MA Experiment 20000117 PARAMETER Experiment Name: At_100uM_ABA_Mutants_cDNA_P Parameter: Plant Line Value: Columbia
  misc_feature: MA Experiment 20000117 PARAMETER Experiment Name: At_100uM_ABA_Mutants_cDNA_P Parameter: Timepoint (hr) Value: 6
  misc_feature: MA Experiment 20000117 PARAMETER Experiment Name: At_100uM_ABA_Mutants_cDNA_P Parameter: Tissue Value: Aerial
  misc_feature: MA Experiment 20000117 PARAMETER Experiment Name: At_100uM_ABA_Mutants_cDNA_P Parameter: Treatment Value: 100uM ABA vs. No Treatment
  misc_feature: MA Experiment ID: 20000180 Result: Up-regulated in Transcription
  misc_feature: MA Experiment 20000180 PARAMETER Experiment Name: At_Germinating_Seeds_P Parameter: Age (hr) Value: 24 vs. 0
  misc_feature: MA Experiment 20000180 PARAMETER Experiment Name: At_Germinating_Seeds_P Parameter: Tissue Value: Germinating Seeds
  misc_feature: MA Experiment ID: 20001248 Result: Up-regulated in Transcription
  misc_feature: MA Experiment 20001248 PARAMETER Experiment Name: At_Far-red-induction_P Parameter: Age (day) Value: 7
  misc_feature: MA Experiment 20001248 PARAMETER Experiment Name: At_Far-red-induction_P Parameter: Light Value: Far-red vs. White
  misc_feature: MA Experiment 20001248 PARAMETER Experiment Name: At_Far-red-induction_P Parameter: Organism Value: A. thaliana
  misc_feature: MA Experiment 20001248 PARAMETER Experiment Name: At_Far-red-induction_P Parameter: Plant Line Value: Columbia
  misc_feature: MA Experiment 20001248 PARAMETER Experiment Name: At_Far-red-induction_P Parameter: Timepoint (hr) Value: 4
  misc_feature: MA Experiment 20001248 PARAMETER Experiment Name: At_Far-red-induction_P Parameter: Tissue Value: Whole Plant
aatctctctctctctccctctcccaaaatctcacgatgcaacctcagccgcatatttctccgaacaccgcaactgccgcgatctcagccgcgcttgaatctcagcgcagtagaaaaaaccgaggaagttacaattgcggtagatgtggtcaacctaagaaaggccatgtctgtcttttaactgctccacctgatattcccactactccgatcgcttctgagccagtgagctgcatctccgccgccgcatcttcttcccgttctactgtcttatctttaacagcggcgccgtcatcgcgacagaccttcactcacttacgccgagctttatcgttcgatgacgtcgatgcgcgtaattcactcgatgaatccgatctggatgctgcatcgatggatctggatctacaattggatacggatattgttcagcctgggaggtttcatgcggtgggtttatgggaggtgcttaagcggctacctccgtctagtttactgatggcggctagggtttgcaaaggatggagagagacatcgaggaagatgtggaaagcggctgaggagcttcggattagggttccggagagagctcagattggatacattggatccttattacaaaaatgtcctcgacttattagactctcacttaaaatcgagagtgattttgacgcgacgactctggcttgcattgcattttcttgtcctaacctggaggttttggagattacaacttcgggtgcagctgtcaataggatttctggggatgagctgagtcggtttgttgctaataaacgaggactaacaagccttaagatggaaggatgttccaatttgggaggattttccctctcttcatcaagcctctccactctttggctctcggatcttcattctctctcaaagatgatcttcaactgtccaaatcttacggaaatatcacttgaattttctcgccaagaagatgattcaactgatcttgtaacaatggttgatggtttgggaaggacttgcactagattgcagaacatccatatagcctctttgaagctttcacatactgttgtactttctcttactgctgtgaatttcaggtatttgagaatgctctcgctagttcttggaataaatatcactgatgcatctgtagctgccatttcctcaggttacaaaaaccttgaactgcttgatctgagtggttccagcattactgatactggcctcgggatgatctgcgatgtcttacctgatacactctcaaaattacttgttgctctttgtcccaacattacatcaagtggcattcaatttgctactgctcaattgccccttcttgagctgatggattgtggcatgactgtctctgatcccaactcagataatccgacctttgtagagaatccaagtccacataaaacaccaggctacaatcaaaagatgtttatcaaacataaacggctgaagaaacttagtttgtggggatgctccagtttggacgctttgttcctaaactgcccagagctcatggacttgaacttgaacttatgcagtaatttgcatccggagagtctggtgctacaatgtccaaagttacaacttgtgtacgcatcaggatgtcaaggcctattgaccggagctatccgaaaacaggtttctgaaaacttctcggctggtgagaaccatatgccacggaaacgcttggctgatgcatctaaaaggattcaagcttaagctttaccttcattataccaagaaacaagggaagatggtatttatgcagggaagagaaggaagttggagaaagaaatgtgtaccattatacattaataatccttttattggactcgtcacaattttcgtctaccatatttatatttactgtactgtgtacatcagattatgttggatcacgttctcttctgttgtttcacttatcaactttacatgtttatcattgttctccaattgcttcgaataaattgtatgataacattctgtatttgtttaaattatatactactagagtactaggggtattttctt

SEQ ID NO: 101682 - protein, 574 aa, Arabidopsis thaliana
  peptide (1)..(574): Ceres Seq. ID no. 13608468
  misc_feature (390)..(421): Pfam Name: Leucine Rich Repeat Pfam Description: Leucine Rich Repeat
  misc_feature (12)..(574): Homolog of NCBI NO: 18087570 NR Description: AT3g54650/T5N23_10 [Arabidopsis thaliana]
  misc_feature (12)..(549): Homolog of NCBI NO: 18410106 NR Description: F-box protein family (FBL17) [Arabidopsis
SLSLSLSQNLTMQPQPHISPNTATAAISAALESQRSRKNRGSYNCGRCGQPKKGHVCLLTAPPDIPTTPIASEPVSCISAAASSSRSTVLSLTAAPSSRQTFTHLRRALSFDDVDARNSLDESDLDAASMDLDLQLDTDIVQPGRFHAVGLWEVLKRLPPSSLLMAARVCKGWRETSRKMWKAAEELRIRVPERAQIGYIGSLLQKCPRLIRLSLKIESDFDATTLACIAFSCPNLEVLEITTSGAAVNRISGDELSRFVANKRGLTSLKMEGCSNLGGFSLSSSSLSTLWLSDLHSLSKMIFNCPNLTEISLEFSRQEDDSTDLVTMVDGLGRTCTRLQNIHIASLKLSHTVVLSLTAVNFRYLRMLSLVLGINITDASVAAISSGYKNLELLDLSGSSITDTGLGMICDVLPDTLSKLLVALCPNITSSGIQFATAQLPLLELMDCGMTVSDPNSDNPTFVENPSPHKTPGYNQKMFIKHKRLKKLSLWGCSSLDALFLNCPELMDLNLNLCSNLHPESLVLQCPKLQLVYASGCQGLLTGAIRKQVSENFSAGENHMPRKRLADASKRIQA

SEQ ID NO: 101683 - protein, 563 aa, Arabidopsis thaliana
  peptide (1)..(563): Ceres Seq. ID no. 13608469
  misc_feature (379)..(410): Pfam Name: Leucine Rich Repeat Pfam Description: Leucine Rich Repeat
  misc_feature (1)..(563): Homolog of NCBI NO: 18087570 NR Description: AT3g54650/T5N23_10 [Arabidopsis thaliana]
  misc_feature (1)..(538): Homolog of NCBI NO: 18410106 NR Description: F-box protein family (FBL17) [Arabidopsis
MQPQPHISPNTATAAISAALESQRSRKNRGSYNCGRCGQPKKGHVCLLTAPPDIPTTPIASEPVSCISAAASSSRSTVLSLTAAPSSRQTFTHLRRALSFDDVDARNSLDESDLDAASMDLDLQLDTDIVQPGRFHAVGLWEVLKRLPPSSLLMAARVCKGWRETSRKMWKAAEELRIRVPERAQIGYIGSLLQKCPRLIRLSLKIESDFDATTLACIAFSCPNLEVLEITTSGAAVNRISGDELSRFVANKRGLTSLKMEGCSNLGGFSLSSSSLSTLWLSDLHSLSKMIFNCPNLTEISLEFSRQEDDSTDLVTMVDGLGRTCTRLQNIHIASLKLSHTVVLSLTAVNFRYLRMLSLVLGINITDASVAAISSGYKNLELLDLSGSSITDTGLGMICDVLPDTLSKLLVALCPNITSSGIQFATAQLPLLELMDCGMTVSDPNSDNPTFVENPSPHKTPGYNQKMFIKHKRLKKLSLWGCSSLDALFLNCPELMDLNLNLCSNLHPESLVLQCPKLQLVYASGCQGLLTGAIRKQVSENFSAGENHMPRKRLADASKRIQA

SEQ ID NO: 101684 - protein, 445 aa, Arabidopsis thaliana
  peptide (1)..(445): Ceres Seq. ID no. 13608470
  misc_feature (261)..(292): Pfam Name: Leucine Rich Repeat Pfam Description: Leucine Rich Repeat
  misc_feature (1)..(445): Homolog of NCBI NO: 18087570 NR Description: AT3g54650/T5N23_10 [Arabidopsis thaliana]
  misc_feature (1)..(420): Homolog of NCBI NO: 18410106 NR Description: F-box protein family (FBL17) [Arabidopsis
MDLDLQLDTDIVQPGRFHAVGLWEVLKRLPPSSLLMAARVCKGWRETSRKMWKAAEELRIRVPERAQIGYIGSLLQKCPRLIRLSLKIESDFDATTLACIAFSCPNLEVLEITTSGAAVNRISGDELSRFVANKRGLTSLKMEGCSNLGGFSLSSSSLSTLWLSDLHSLSKMIFNCPNLTEISLEFSRQEDDSTDLVTMVDGLGRTCTRLQNIHIASLKLSHTVVLSLTAVNFRYLRMLSLVLGINITDASVAAISSGYKNLELLDLSGSSITDTGLGMICDVLPDTLSKLLVALCPNITSSGIQFATAQLPLLELMDCGMTVSDPNSDNPTFVENPSPHKTPGYNQKMFIKHKRLKKLSLWGCSSLDALFLNCPELMDLNLNLCSNLHPESLVLQCPKLQLVYASGCQGLLTGAIRKQVSENFSAGENHMPRKRLADASKRIQA

SEQ ID NO: 101685 - DNA, 2458 bp, Arabidopsis thaliana
  misc_feature (1)..(2458): Ceres Seq. ID no. 13608475
  misc_feature: MA Experiment ID: 108435 Result: Down-regulated in Transcription
  misc_feature: MA Experiment 108435 PARAMETER Experiment Name: At_stm_Mutants_cDNA_P Parameter: Plant Line Value: wt Landsburg vs stm
  misc_feature: MA Experiment 108435 PARAMETER Experiment Name: At_stm_Mutants_cDNA_P Parameter: Tissue Value: Shoot Apical Meristem Region
  misc_feature: MA Experiment ID: 108461 Result: Up-regulated in Transcription
  misc_feature: MA Experiment 108461 PARAMETER Experiment Name: At_Germinating_Seeds_cDNA_P Parameter: Age (day) Value: 1 vs. 0
  misc_feature: MA Experiment 108461 PARAMETER Experiment Name: At_Germinating_Seeds_cDNA_P Parameter: Tissue Value: Germinating Seeds
  misc_feature: MA Experiment ID: 108462 Result: Up-regulated in Transcription
  misc_feature: MA Experiment 108462 PARAMETER Experiment Name: At_Germinating_Seeds_cDNA_P Parameter: Age (day) Value: 2 vs. 0
  misc_feature: MA Experiment 108462 PARAMETER Experiment Name: At_Germinating_Seeds_cDNA_P Parameter: Tissue Value: Germinating Seeds
  misc_feature: MA Experiment ID: 108463 Result: Up-regulated in Transcription
  misc_feature: MA Experiment 108463 PARAMETER Experiment Name: At_Germinating_Seeds_cDNA_P Parameter: Age (day) Value: 3 vs. 0
  misc_feature: MA Experiment 108463 PARAMETER Experiment Name: At_Germinating_Seeds_cDNA_P Parameter: Tissue Value: Germinating Seeds
  misc_feature: MA Experiment ID: 108464 Result: Up-regulated in Transcription
  misc_feature: MA Experiment 108464 PARAMETER Experiment Name: At_Germinating_Seeds_cDNA_P Parameter: Age (day) Value: 4 vs. 0
  misc_feature: MA Experiment 108464 PARAMETER Experiment Name: At_Germinating_Seeds_cDNA_P Parameter: Tissue Value: Germinating Seeds
  misc_feature: MA Experiment ID: 108607 Result: Up-regulated in Transcription
  misc_feature: MA Experiment 108607 PARAMETER Experiment Name: At_100uM_ABA_cDNA_P Parameter: Timepoint (hr) Value: 4
  misc_feature: MA Experiment 108607 PARAMETER Experiment Name: At_100uM_ABA_cDNA_P Parameter: Tissue Value: Aerial
  misc_feature: MA Experiment 108607 PARAMETER Experiment Name: At_100uM_ABA_cDNA_P Parameter: Treatment Value: 100uM ABA vs. No Treatment
  misc_feature: MA Experiment ID: 20000069 Result: Up-regulated in Transcription
  misc_feature: MA Experiment 20000069 PARAMETER Experiment Name: At_100uM_ABA_Mutants_cDNA_P Parameter: Plant Line Value: CS23
  misc_feature: MA Experiment 20000069 PARAMETER Experiment Name: At_100uM_ABA_Mutants_cDNA_P Parameter: Timepoint (hr) Value: 6
  misc_feature: MA Experiment 20000069 PARAMETER Experiment Name: At_100uM_ABA_Mutants_cDNA_P Parameter: Tissue Value: Aerial
  misc_feature: MA Experiment 20000069 PARAMETER Experiment Name: At_100uM_ABA_Mutants_cDNA_P Parameter: Treatment Value: 100uM ABA vs. No Treatment
  misc_feature: MA Experiment ID: 20000070 Result: Up-regulated in Transcription
  misc_feature: MA Experiment 20000070 PARAMETER Experiment Name: At_100uM_ABA_Mutants_cDNA_P Parameter: Plant Line Value: CS24
  misc_feature: MA Experiment 20000070 PARAMETER Experiment Name: At_100uM_ABA_Mutants_cDNA_P Parameter: Timepoint (hr) Value: 6
  misc_feature: MA Experiment 20000070 PARAMETER Experiment Name: At_100uM_ABA_Mutants_cDNA_P Parameter: Tissue Value: Aerial
  misc_feature: MA Experiment 20000070 PARAMETER Experiment Name: At_100uM_ABA_Mutants_cDNA_P Parameter: Treatment Value: 100uM ABA vs. No Treatment
  misc_feature: MA Experiment ID: 20000071 Result: Up-regulated in Transcription
  misc_feature: MA Experiment 20000071 PARAMETER Experiment Name: At_100uM_ABA_Mutants_cDNA_P Parameter: Plant Line Value: CS8104
  misc_feature: MA Experiment 20000071 PARAMETER Experiment Name: At_100uM_ABA_Mutants_cDNA_P Parameter: Timepoint (hr) Value: 6
  misc_feature: MA Experiment 20000071 PARAMETER Experiment Name: At_100uM_ABA_Mutants_cDNA_P Parameter: Tissue Value: Aerial
  misc_feature: MA Experiment 20000071 PARAMETER Experiment Name: At_100uM_ABA_Mutants_cDNA_P Parameter: Treatment Value: 100uM ABA vs. No Treatment
  misc_feature: MA Experiment ID: 20000072 Result: Up-regulated in Transcription
  misc_feature: MA Experiment 20000072 PARAMETER Experiment Name: At_100uM_ABA_Mutants_cDNA_P Parameter: Plant Line Value: CS8105
  misc_feature: MA Experiment 20000072 PARAMETER Experiment Name: At_100uM_ABA_Mutants_cDNA_P Parameter: Timepoint (hr) Value: 6
  misc_feature: MA Experiment 20000072 PARAMETER Experiment Name: At_100uM_ABA_Mutants_cDNA_P Parameter: Tissue Value: Aerial
  misc_feature: MA Experiment 20000072 PARAMETER Experiment Name: At_100uM_ABA_Mutants_cDNA_P Parameter: Treatment Value: 100uM ABA vs. No Treatment
  misc_feature: MA Experiment ID: 20000087 Result: Up-regulated in Transcription
  misc_feature: MA Experiment 20000087 PARAMETER Experiment Name: At_100uM_ABA_Mutants_cDNA_P Parameter: Plant Line Value: WS
  misc_feature: MA Experiment 20000087 PARAMETER Experiment Name: At_100uM_ABA_Mutants_cDNA_P Parameter: Timepoint (hr) Value: 6
  misc_feature: MA Experiment 20000087 PARAMETER Experiment Name: At_100uM_ABA_Mutants_cDNA_P Parameter: Tissue Value: Aerial
  misc_feature: MA Experiment 20000087 PARAMETER Experiment Name: At_100uM_ABA_Mutants_cDNA_P Parameter: Treatment Value: 100uM ABA vs. No Treatment
  misc_feature: MA Experiment ID: 20000117 Result: Up-regulated in Transcription
  misc_feature: MA Experiment 20000117 PARAMETER Experiment Name: At_100uM_ABA_Mutants_cDNA_P Parameter: Plant Line Value: Columbia
  misc_feature: MA Experiment 20000117 PARAMETER Experiment Name: At_100uM_ABA_Mutants_cDNA_P Parameter: Timepoint (hr) Value: 6
  misc_feature: MA Experiment 20000117 PARAMETER Experiment Name: At_100uM_ABA_Mutants_cDNA_P Parameter: Tissue Value: Aerial
  misc_feature: MA Experiment 20000117 PARAMETER Experiment Name: At_100uM_ABA_Mutants_cDNA_P Parameter: Treatment Value: 100uM ABA vs. No Treatment
  misc_feature: MA Experiment ID: 20000173 Result: Down-regulated in Transcription
  misc_feature: MA Experiment 20000173 PARAMETER Experiment Name: At_42deg_Heat_P Parameter: Age (day) Value: 14
  misc_feature: MA Experiment 20000173 PARAMETER Experiment Name: At_42deg_Heat_P Parameter: Organism Value: A. thaliana
  misc_feature: MA Experiment 20000173 PARAMETER Experiment Name: At_42deg_Heat_P Parameter: Plant Line Value: WS
  misc_feature: MA Experiment 20000173 PARAMETER Experiment Name: At_42deg_Heat_P Parameter: Temperature (deg C) Value: 42 vs. 22
  misc_feature: MA Experiment 20000173 PARAMETER Experiment Name: At_42deg_Heat_P Parameter: Timepoint (hr) Value: 6
  misc_feature: MA Experiment 20000173 PARAMETER Experiment Name: At_42deg_Heat_P Parameter: Tissue Value: Aerial
  misc_feature: MA Experiment ID: 20000179 Result: Up-regulated in Transcription
  misc_feature: MA Experiment 20000179 PARAMETER Experiment Name: At_Germinating_Seeds_P Parameter: Age (hr) Value: 6 vs. 0
  misc_feature: MA Experiment 20000179 PARAMETER Experiment Name: At_Germinating_Seeds_P Parameter: Tissue Value: Germinating Seeds
  misc_feature: MA Experiment ID: 20000180 Result: Up-regulated in Transcription
  misc_feature: MA Experiment 20000180 PARAMETER Experiment Name: At_Germinating_Seeds_P Parameter: Age (hr) Value: 24 vs. 0
  misc_feature: MA Experiment 20000180 PARAMETER Experiment Name: At_Germinating_Seeds_P Parameter: Tissue Value: Germinating Seeds
  misc_feature: MA Experiment ID: 20000184 Result: Down-regulated in Transcription
  misc_feature: MA Experiment 20000184 PARAMETER Experiment Name: At_Shoots__P Parameter: Age (day) Value: 7
  misc_feature: MA Experiment 20000184 PARAMETER Experiment Name: At_Shoots__P Parameter: Tissue Value: Shoots vs. Whole Plant
  misc_feature: MA Experiment ID: 20000185 Result: Down-regulated in Transcription
  misc_feature: MA Experiment 20000185 PARAMETER Experiment Name: At_Roots__P Parameter: Age (day) Value: 7 vs. 21
  misc_feature: MA Experiment 20000185 PARAMETER Experiment Name: At_Roots__P Parameter: Organism Value: A. thaliana
  misc_feature: MA Experiment 20000185 PARAMETER Experiment Name: At_Roots__P Parameter: Tissue Value: Roots vs. Whole Plant
  misc_feature: MA Experiment ID: 20000224 Result: Up-regulated in Transcription
  misc_feature: MA Experiment ID: 20000234 Result: Down-regulated in Transcription
  misc_feature: MA Experiment 20000234 PARAMETER Experiment Name: At_Siliques_P Parameter: Age (day) Value: 21
  misc_feature: MA Experiment 20000234 PARAMETER Experiment Name: At_Siliques_P Parameter: Organism Value: A. thaliana
  misc_feature: MA Experiment 20000234 PARAMETER Experiment Name: At_Siliques_P Parameter: Plant Line Value: WS
  misc_feature: MA Experiment 20000234 PARAMETER Experiment Name: At_Siliques_P Parameter: Tissue Value: Less Than 5mm Siliques vs. Whole Plant
  misc_feature: MA Experiment ID: 20000265 Result: Down-regulated in Transcription
  misc_feature: MA Experiment 20000265 PARAMETER Experiment Name: At_Open_Flower_P Parameter: Age (day) Value: 21
  misc_feature: MA Experiment 20000265 PARAMETER Experiment Name: At_Open_Flower_P Parameter: Plant Line Value: WS
  misc_feature: MA Experiment 20000265 PARAMETER Experiment Name: At_Open_Flower_P Parameter: Tissue Value: Closed Flower vs. Whole Plant
  misc_feature: MA Experiment ID: 20000439 Result: Down-regulated in Transcription
  misc_feature: MA Experiment 20000439 PARAMETER Experiment Name: At_Roots__P Parameter: Age (day) Value: 14 vs. 21
  misc_feature: MA Experiment 20000439 PARAMETER Experiment Name: At_Roots__P Parameter: Organism Value: A. thaliana
  misc_feature: MA Experiment 20000439 PARAMETER Experiment Name: At_Roots__P Parameter: Tissue Value: Roots vs. Whole Plant
  misc_feature: MA Experiment ID: 20000495 Result: Down-regulated in Transcription
  misc_feature: MA Experiment 20000495 PARAMETER Experiment Name: At_Guard_Cells_P Parameter: Harvest Date Value: 8/2/2002
  misc_feature: MA Experiment 20000495 PARAMETER Experiment Name: At_Guard_Cells_P Parameter: Organism Value: A. thaliana
  misc_feature: MA Experiment 20000495 PARAMETER Experiment Name: At_Guard_Cells_P Parameter: Tissue Value: Guard Cells vs. Leaves
  misc_feature: MA Experiment ID: 20000794 Result: Up-regulated in Transcription
  misc_feature: MA Experiment 20000794 PARAMETER Experiment Name: At_Petals_P Parameter: Age (day) Value: 23-25 days
  misc_feature: MA Experiment 20000794 PARAMETER Experiment Name: At_Petals_P Parameter: Plant Line Value: WS
  misc_feature: MA Experiment 20000794 PARAMETER Experiment Name: At_Petals_P Parameter: Tissue Value: Petals vs. Whole plant
  misc_feature: MA Experiment ID: 20001248 Result: Down-regulated in Transcription
  misc_feature: MA Experiment 20001248 PARAMETER Experiment Name: At_Far-red-induction_P Parameter: Age (day) Value: 7
  misc_feature: MA Experiment 20001248 PARAMETER Experiment Name: At_Far-red-induction_P Parameter: Light Value: Far-red vs. White
  misc_feature: MA Experiment 20001248 PARAMETER Experiment Name: At_Far-red-induction_P Parameter: Organism Value: A. thaliana
  misc_feature: MA Experiment 20001248 PARAMETER Experiment Name: At_Far-red-induction_P Parameter: Plant Line Value: Columbia
  misc_feature: MA Experiment 20001248 PARAMETER Experiment Name: At_Far-red-induction_P Parameter: Timepoint (hr) Value: 4
  misc_feature: MA Experiment 20001248 PARAMETER Experiment Name: At_Far-red-induction_P Parameter: Tissue Value: Whole Plant
  misc_feature: MA Experiment ID: 20001557 Result: Down-regulated in Transcription
  misc_feature: MA Experiment 20001557 PARAMETER Experiment Name: At_Drought_Soil_Dry_P Parameter: Age (day) Value: 27
  misc_feature: MA Experiment 20001557 PARAMETER Experiment Name: At_Drought_Soil_Dry_P Parameter: Organism Value: A. thaliana
  misc_feature: MA Experiment 20001557 PARAMETER Experiment Name: At_Drought_Soil_Dry_P Parameter: Plant Line Value: WS
  misc_feature: MA Experiment 20001557 PARAMETER Experiment Name: At_Drought_Soil_Dry_P Parameter: Post Timepoint (hr) Value: 3
  misc_feature: MA Experiment 20001557 PARAMETER Experiment Name: At_Drought_Soil_Dry_P Parameter: Post-Treatment Value: Re-Water vs. No Drought
  misc_feature: MA Experiment 20001557 PARAMETER Experiment Name: At_Drought_Soil_Dry_P Parameter: Timepoint (day) Value: 13
  misc_feature: MA Experiment 20001557 PARAMETER Experiment Name: At_Drought_Soil_Dry_P Parameter: Treatment Value: Drought vs. No Drought
  misc_feature: MA Experiment ID: 20001558 Result: Down-regulated in Transcription
  misc_feature: MA Experiment 20001558 PARAMETER Experiment Name: At_Drought_Soil_Dry_P Parameter: Age (day) Value: 27
  misc_feature: MA Experiment 20001558 PARAMETER Experiment Name: At_Drought_Soil_Dry_P Parameter: Organism Value: A. thaliana
  misc_feature: MA Experiment 20001558 PARAMETER Experiment Name: At_Drought_Soil_Dry_P Parameter: Plant Line Value: WS
  misc_feature: MA Experiment 20001558 PARAMETER Experiment Name: At_Drought_Soil_Dry_P Parameter: Post Timepoint (hr) Value: 6
  misc_feature: MA Experiment 20001558 PARAMETER Experiment Name: At_Drought_Soil_Dry_P Parameter: Post-Treatment Value: Re-Water vs. No Drought
  misc_feature: MA Experiment 20001558 PARAMETER Experiment Name: At_Drought_Soil_Dry_P Parameter: Timepoint (day) Value: 13
  misc_feature: MA Experiment 20001558 PARAMETER Experiment Name: At_Drought_Soil_Dry_P Parameter: Treatment Value: Drought vs. No Drought
  misc_feature: MA Experiment ID: 20001560 Result: Down-regulated in Transcription
  misc_feature: MA Experiment 20001560 PARAMETER Experiment Name: At_Drought_Soil_Dry_P Parameter: Age (day) Value: 28
  misc_feature: MA Experiment 20001560 PARAMETER Experiment Name: At_Drought_Soil_Dry_P Parameter: Organism Value: A. thaliana
  misc_feature: MA Experiment 20001560 PARAMETER Experiment Name: At_Drought_Soil_Dry_P Parameter: Plant Line Value: WS
  misc_feature: MA Experiment 20001560 PARAMETER Experiment Name: At_Drought_Soil_Dry_P Parameter: Post Timepoint (hr) Value: None
  misc_feature: MA Experiment 20001560 PARAMETER Experiment Name: At_Drought_Soil_Dry_P Parameter: Post-Treatment Value: None
  misc_feature: MA Experiment 20001560 PARAMETER Experiment Name: At_Drought_Soil_Dry_P Parameter: Timepoint (day) Value: 14
  misc_feature: MA Experiment 20001560 PARAMETER Experiment Name: At_Drought_Soil_Dry_P Parameter: Treatment Value: Drought vs. No Drought
  misc_feature: MA Experiment ID: 20001911 Result: Down-regulated in Transcription
  misc_feature: MA Experiment 20001911 PARAMETER Experiment Name: At_Drought_Reproduction_P Parameter: Age (day) Value: 40
  misc_feature: MA Experiment 20001911 PARAMETER Experiment Name: At_Drought_Reproduction_P Parameter: Organism Value: A. thaliana
  misc_feature: MA Experiment 20001911 PARAMETER Experiment Name: At_Drought_Reproduction_P Parameter: Plant Line Value: WS
  misc_feature: MA Experiment 20001911 PARAMETER Experiment Name: At_Drought_Reproduction_P Parameter: Timepoint (day) Value: 10
  misc_feature: MA Experiment 20001911 PARAMETER Experiment Name: At_Drought_Reproduction_P Parameter: Tissue Value: Flowers
  misc_feature: MA Experiment 20001911 PARAMETER Experiment Name: At_Drought_Reproduction_P Parameter: Treatment Value: Drought vs. No Drought
tctcaaatctcaaatctcaaattttttattaaacgcctacatatattactcacacttgttttcagatcataaagttttttcttggatttatatataatgcactaatacatacacacccacatgcttacacacatgttcgaactgtaatcagtaaaagaaacatcagagaggaagagaaggagaagaaaagatggagatgggtcgtctggtcttcgggttgtgtttgattcttattgtgggtacgtttcttgaattctccggcggtgctacggcggcgaagggagtaacgtacgacggacggtctttgataatcgatggacagaggaagcttctcttctccggttccatccactatcctcgcagcacacccgagatgtggccgtctctgataaaaaagacaaaggaaggaggcatcgatgtgatccaaacgtacgttttctggaacctccatgagcctaagcttggacagtatgattttagtggaagaaacgatttagtgaagtttattaaagaaattagatcacaaggtctctatgtctgtctacgtattggacccttcatcgaagccgagtggaattacgggggattgccattttggttacgggatgtacccggtatggtataccgaaccgacaatgagcccttcaagttccacatgcaaaaattcaccgctaagatcgtagatttgatgaaatctgagggcttatatgcttctcaaggaggtccaattattctttctcagatcgagaacgagtatgcaaacgtggagggggctttccatgagaaaggagcatcgtacatcaagtgggcaggtcaaatggcggtcgggcttaagaccggagtgccatggatcatgtgcaagtcgcccgacgctcctgatcccgtgatcaatacctgcaacgggatgaaatgcggcgagacttttcctggaccaaactcacccaataagccgaaaatgtggactgaggattggacttcattctttcaggtttatggaaaagagccttatattagatctgctgaggatattgctttccatgccgctcttttcgttgcaaaaaatggaagttacatcaactattacatgtaccatggtggaacaaactttggaaggacttcatcttcgtatttcattacaggatactatgatcaagctcctctcgacgaatacggtcttttaagacagcctaagtacggtcatttgaaggagcttcacgctgcgataaaatcctctgcaaatcctctgcttcaaggaaagcaaacgattctctccttgggaccaatgcaacaagcttatgtctttgaagacgcgaacaatggatgcgttgcgtttctggtaaacaatgacgctaaagccagtcaaatacaattcagaaacaatgcgtatagcttgagtcccaagtcaattggtattcttcagaactgcaaaaacctaatttatgaaactgcaaaagtgaatgtgaagatgaatacgagagttacaacgccggttcaagtgttcaacgttcccgataactggaatttgtttagagaaacaatccctgcattcccaggcacatctttgaagacaaatgctttgttggaacacactaatttgacaaaggacaaaactgattatctttggtacacttcaagctttaagctggattcaccctgcacgaacccgtctatctacacagaatcatcaggacatgttgtccacgtgttcgtcaacaatgcactagcaggatctggacatggaagcagagacataagggtagttaaactacaagctccggttagcttaatcaatggacaaaacaatatatcgatcctcagcggcatggttggtctaccggactctggagcttacatggagaggagatcttatggactaaccaaagtacaaattagctgtggcgggacaaaacccatcgatttgagtagatctcaatggggttactcggtgggtttgcttggagagaaagttaggttatatcaatggaagaatttaaatagagtgaagtggagtatgaataaagctggactaattaagaaccgccccctcgcttggtacaagacaacgtttgatgggccgaatggagatgggcccgtgggcctacacatgtcgagtatgggtaaaggagaaatttgggtgaatggtgaaagcattggtcgttattgggtctcgtttctcacccctgctggacaaccttctcaatctatatatcatattcctcgggcgttcttaaaaccatctggaaatttattggtggtatttgaagaggaaggtggtgatcctcttgggatatctttgaatacaatatcggttgttggttcgagtcaagctcaatctcaattctcctgaagattatttttttaaaaatggtttttgggtaattgggggtgttttataaaccaaacaatacattatattgaaatgatacaatacacaaattgaatgaaatatacaggtttc

SEQ ID NO: 101686 - protein, 718 aa, Arabidopsis thaliana; identical to SEQ ID NO: 39984
  peptide (1)..(718): Ceres Seq. ID no. 13608476
  misc_feature (32)..(707): Homolog of NCBI NO: 26451843 NR Description: unknown protein [Arabidopsis thaliana]
  misc_feature (32)..(707): Homolog of NCBI NO: 30699255 NR Description: glycosyl hydrolase family 35 (beta-galactosidase)
  misc_feature (299)..(718): Homolog of NCBI NO: 16649045 NR Description: beta-galactosidase [Arabidopsis thaliana]
  misc_feature (32)..(646): Homolog of NCBI NO: 12323389 NR Description: putative beta-galactosidase, 3' partial; 3669-1
  misc_feature (32)..(664): Homolog of NCBI NO: 25326165 NR Description: probable beta-galactosidase [imported] -
  misc_feature (12)..(706): Homolog of NCBI NO: 10862896 NR Description: putative beta-galactosidase [Nicotiana tabacum]
  misc_feature (12)..(693): Homolog of NCBI NO: 25326168 NR Description: probable beta-galactosidase [imported] -
  misc_feature (30)..(693): Homolog of NCBI NO: 30679742 NR Description: glycosyl hydrolase family 35 (beta-galactosidase)
  misc_feature (30)..(693): Homolog of NCBI NO: 18418558 NR Description: glycosyl hydrolase family 35 (beta-galactosidase)
  misc_feature (5)..(663): Homolog of NCBI NO: 18419821 NR Description: glycosyl hydrolase family 35 (beta-galactosidase)

SEQ ID NO: 101687 - protein, 716 aa, Arabidopsis thaliana; identical to SEQ ID NO: 39985
  peptide (1)..(716): Ceres Seq. ID no. 13608477
  misc_feature (30)..(705): Homolog of NCBI NO: 26451843 NR Description: unknown protein [Arabidopsis thaliana]
  misc_feature (30)..(705): Homolog of NCBI NO: 30699255 NR Description: glycosyl hydrolase family 35 (beta-galactosidase)
  misc_feature (297)..(716): Homolog of NCBI NO: 16649045 NR Description: beta-galactosidase [Arabidopsis thaliana]
  misc_feature (30)..(644): Homolog of NCBI NO: 12323389 NR Description: putative beta-galactosidase, 3' partial; 3669-1
  misc_feature (30)..(662): Homolog of NCBI NO: 25326165 NR Description: probable beta-galactosidase [imported] -
  misc_feature (10)..(704): Homolog of NCBI NO: 10862896 NR Description: putative beta-galactosidase [Nicotiana tabacum]
  misc_feature (10)..(691): Homolog of NCBI NO: 25326168 NR Description: probable beta-galactosidase [imported] -
  misc_feature (28)..(691): Homolog of NCBI NO: 30679742 NR Description: glycosyl hydrolase family 35 (beta-galactosidase)
  misc_feature (28)..(691): Homolog of NCBI NO: 18418558 NR Description: glycosyl hydrolase family 35 (beta-galactosidase)
  misc_feature (3)..(661): Homolog of NCBI NO: 18419821 NR Description: glycosyl hydrolase family 35 (beta-galactosidase)

SEQ ID NO: 101688 - protein, 657 aa, Arabidopsis thaliana; identical to SEQ ID NO: 39986
  peptide (1)..(657): Ceres Seq. ID no. 13608478
  misc_feature (1)..(646): Homolog of NCBI NO: 26451843 NR Description: unknown protein [Arabidopsis thaliana]
  misc_feature (1)..(646): Homolog of NCBI NO: 30699255 NR Description: glycosyl hydrolase family 35 (beta-galactosidase)
  misc_feature (238)..(657): Homolog of NCBI NO: 16649045 NR Description: beta-galactosidase [Arabidopsis thaliana]
  misc_feature (1)..(585): Homolog of NCBI NO: 12323389 NR Description: putative beta-galactosidase, 3' partial; 3669-1
  misc_feature (1)..(603): Homolog of NCBI NO: 25326165 NR Description: probable beta-galactosidase [imported] -
  misc_feature (1)..(645): Homolog of NCBI NO: 10862896 NR Description: putative beta-galactosidase [Nicotiana tabacum]
  misc_feature (1)..(632): Homolog of NCBI NO: 25326168 NR Description: probable beta-galactosidase [imported] -
  misc_feature (1)..(632): Homolog of NCBI NO: 30679742 NR Description: glycosyl hydrolase family 35 (beta-galactosidase)
  misc_feature (1)..(632): Homolog of NCBI NO: 18418558 NR Description: glycosyl hydrolase family 35 (beta-galactosidase)
  misc_feature (1)..(602): Homolog of NCBI NO: 18419821 NR Description: glycosyl hydrolase family 35 (beta-galactosidase)

SEQ ID NO: 101689 - DNA, 1381 bp, Arabidopsis thaliana
  misc_feature (1)..(1381): Ceres Seq. ID no. 13608479
  misc_feature: MA Experiment ID: 20000171 Result: Down-regulated in Transcription
  misc_feature: MA Experiment 20000171 PARAMETER Experiment Name: At_42deg_Heat_P Parameter: Age (day) Value: 14
  misc_feature: MA Experiment 20000171 PARAMETER Experiment Name: At_42deg_Heat_P Parameter: Organism Value: A. thaliana
  misc_feature: MA Experiment 20000171 PARAMETER Experiment Name: At_42deg_Heat_P Parameter: Plant Line Value: WS
  misc_feature: MA Experiment 20000171 PARAMETER Experiment Name: At_42deg_Heat_P Parameter: Temperature (deg C) Value: 42 vs. 22
  misc_feature: MA Experiment 20000171 PARAMETER Experiment Name: At_42deg_Heat_P Parameter: Timepoint (hr) Value: 1
  misc_feature: MA Experiment 20000171 PARAMETER Experiment Name: At_42deg_Heat_P Parameter: Tissue Value: Aerial
  misc_feature: MA Experiment ID: 20000173 Result: Down-regulated in Transcription
  misc_feature: MA Experiment 20000173 PARAMETER Experiment Name: At_42deg_Heat_P Parameter: Age (day) Value: 14
  misc_feature: MA Experiment 20000173 PARAMETER Experiment Name: At_42deg_Heat_P Parameter: Organism Value: A. thaliana
  misc_feature: MA Experiment 20000173 PARAMETER Experiment Name: At_42deg_Heat_P Parameter: Plant Line Value: WS
  misc_feature: MA Experiment 20000173 PARAMETER Experiment Name: At_42deg_Heat_P Parameter: Temperature (deg C) Value: 42 vs. 22
  misc_feature: MA Experiment 20000173 PARAMETER Experiment Name: At_42deg_Heat_P Parameter: Timepoint (hr) Value: 6
  misc_feature: MA Experiment 20000173 PARAMETER Experiment Name: At_42deg_Heat_P Parameter: Tissue Value: Aerial
  misc_feature: MA Experiment ID: 20000224 Result: Down-regulated in Transcription
  misc_feature: MA Experiment ID: 20001248 Result: Down-regulated in Transcription
  misc_feature: MA Experiment 20001248 PARAMETER Experiment Name: At_Far-red-induction_P Parameter: Age (day) Value: 7
  misc_feature: MA Experiment 20001248 PARAMETER Experiment Name: At_Far-red-induction_P Parameter: Light Value: Far-red vs. White
  misc_feature: MA Experiment 20001248 PARAMETER Experiment Name: At_Far-red-induction_P Parameter: Organism Value: A. thaliana
  misc_feature: MA Experiment 20001248 PARAMETER Experiment Name: At_Far-red-induction_P Parameter: Plant Line Value: Columbia
  misc_feature: MA Experiment 20001248 PARAMETER Experiment Name: At_Far-red-induction_P Parameter: Timepoint (hr) Value: 4
  misc_feature: MA Experiment 20001248 PARAMETER Experiment Name: At_Far-red-induction_P Parameter: Tissue Value: Whole Plant
  misc_feature: MA Experiment ID: 20001450 Result: Down-regulated in Transcription
  misc_feature: MA Experiment 20001450 PARAMETER Experiment Name: At_Far-red-induction_P Parameter: Age (day) Value: 7
  misc_feature: MA Experiment 20001450 PARAMETER Experiment Name: At_Far-red-induction_P Parameter: Light Value: Far-red vs. White
  misc_feature: MA Experiment 20001450 PARAMETER Experiment Name: At_Far-red-induction_P Parameter: Organism Value: A. thaliana
  misc_feature: MA Experiment 20001450 PARAMETER Experiment Name: At_Far-red-induction_P Parameter: Plant Line Value: Columbia
  misc_feature: MA Experiment 20001450 PARAMETER Experiment Name: At_Far-red-induction_P Parameter: Timepoint (hr) Value: 8
  misc_feature: MA Experiment 20001450 PARAMETER Experiment Name: At_Far-red-induction_P Parameter: Tissue Value: Whole Plant
  misc_feature: MA Experiment ID: 20001560 Result: Up-regulated in Transcription
  misc_feature: MA Experiment 20001560 PARAMETER Experiment Name: At_Drought_Soil_Dry_P Parameter: Age (day) Value: 28
  misc_feature: MA Experiment 20001560 PARAMETER Experiment Name: At_Drought_Soil_Dry_P Parameter: Organism Value: A. thaliana
  misc_feature: MA Experiment 20001560 PARAMETER Experiment Name: At_Drought_Soil_Dry_P Parameter: Plant Line Value: WS
  misc_feature: MA Experiment 20001560 PARAMETER Experiment Name: At_Drought_Soil_Dry_P Parameter: Post Timepoint (hr) Value: None
  misc_feature: MA Experiment 20001560 PARAMETER Experiment Name: At_Drought_Soil_Dry_P Parameter: Post-Treatment Value: None
  misc_feature: MA Experiment 20001560 PARAMETER Experiment Name: At_Drought_Soil_Dry_P Parameter: Timepoint (day) Value: 14
  misc_feature: MA Experiment 20001560 PARAMETER Experiment Name: At_Drought_Soil_Dry_P Parameter: Treatment Value: Drought vs. No Drought
  misc_feature: MA Experiment ID: 20001905 Result: Down-regulated in Transcription
  misc_feature: MA Experiment 20001905 PARAMETER Experiment Name: At_Drought_Reproduction_P Parameter: Age (day) Value: 40
  misc_feature: MA Experiment 20001905 PARAMETER Experiment Name: At_Drought_Reproduction_P Parameter: Organism Value: A. thaliana
  misc_feature: MA Experiment 20001905 PARAMETER Experiment Name: At_Drought_Reproduction_P Parameter: Plant Line Value: WS
  misc_feature: MA Experiment 20001905 PARAMETER Experiment Name: At_Drought_Reproduction_P Parameter: Timepoint (day) Value: 10
  misc_feature: MA Experiment 20001905 PARAMETER Experiment Name: At_Drought_Reproduction_P Parameter: Tissue Value: Rosettes
  misc_feature: MA Experiment 20001905 PARAMETER Experiment Name: At_Drought_Reproduction_P Parameter: Treatment Value: Drought vs. No Drought
  misc_feature: MA Experiment ID: 20001911 Result: Down-regulated in Transcription
  misc_feature: MA Experiment 20001911 PARAMETER Experiment Name: At_Drought_Reproduction_P Parameter: Age (day) Value: 40
  misc_feature: MA Experiment 20001911 PARAMETER Experiment Name: At_Drought_Reproduction_P Parameter: Organism Value: A. thaliana
  misc_feature: MA Experiment 20001911 PARAMETER Experiment Name: At_Drought_Reproduction_P Parameter: Plant Line Value: WS
  misc_feature: MA Experiment 20001911 PARAMETER Experiment Name: At_Drought_Reproduction_P Parameter: Timepoint (day) Value: 10
  misc_feature: MA Experiment 20001911 PARAMETER Experiment Name: At_Drought_Reproduction_P Parameter: Tissue Value: Flowers
  misc_feature: MA Experiment 20001911 PARAMETER Experiment Name: At_Drought_Reproduction_P Parameter: Treatment Value: Drought vs. No Drought
gacatatatttatcttcttgaaaagcgaatgatgtctataaattgttttcgaacagcgaaggctccgcttcaatcatttgtagcagtaagaacgaattcgagacctagaaattcatcgaaccgtctcgtttctgtattcggacgcaagtcttcttctccttcatttgttactctcagagttgtttcatcgatggcttacgagaaagagcttgatgctgctaagaaagctgcttcactcgctgctcgtctctgtcagaaagttcaaaaggctttgttgcaatcagatgtgcaatcaaaatctgataaaagtccagtgaccgttgctgattatggttcacaagcagttgttagtttagtcttagaaaaagagctcagttctgaacccttttcattggtggctgaagaggactcaggcgatctacgcaaggatggttctcaggatactctggagcgcatcacaaaactcgtgaacgacactttggctaccgaggaatcgtttaatggctctactttgtctactgatgatctacttagagccattgactgtggaacatctgaaggtggtccaaatggtcgacactgggtcttggatccaattgatggcactaaaggatttctgaggggagatcaatacgcagtagcactaggattgctcgaggaagggaaagtagttttaggtgtgcttgcttgtccaaacttgccgttagcatccatagcaggaaacaacaagaacaaatcttcgtcagacgaaattggatgcctcttctttgctacaattggttcagggacatatatgcagctcctagattcaaaatcttctcctgtaaaagtgcaagtctctagtgttgagaatcctgaagaggcatcgttcttcgagtcattcgaaggagctcactctctacatgacttatccagctccattgccaataaactcggtgtcaaagctccaccagtccgtattgatagccaagcaaagtatggagctttatcaagaggagatggagctatatacttacggtttcctcataaaggataccgcgaaaagatttgggaccatgtcgctggtgctatagttgttacagaggcgggtggaatagtgacagatgcagcaggaaagccactggatttctcgaaagggaagtatcttgatttggacacaggcattatcgttgctaacgagaagctaatgcctctgcttttgaaagcagttcgtgactccatagctgagcaagagaaagcttcagctctctgatttgtttttttctctcgtacgttctttgtttctctgtaactgttgtttcattttctttcaccgaatttcaccagtgagaatttcttccattttcgaaaaagaaataaaaatgaaattctgttttgggct

SEQ ID NO: 101690 - protein, 416 aa, Arabidopsis thaliana
  peptide (1)..(416): Ceres Seq. ID no. 13608480
  misc_feature (64)..(416): Homolog of NCBI NO: 15237567 NR Description: 3(2),5-bisphosphate nucleotidase [Arabidopsis
  misc_feature (60)..(416): Homolog of NCBI NO: 14268820 NR Description: diphosphonucleotide phosphatase 1 [Zea mays]
  misc_feature (66)..(415): Homolog of NCBI NO: 3913517 NR Description: 3'(2'),5'-BISPHOSPHATE NUCLEOTIDASE (3'(2'),5-
  misc_feature (64)..(410): Homolog of NCBI NO: 15237589 NR Description: 3(2),5-bisphosphate nucleotidase (emb|CAB05889.1)
  misc_feature (64)..(412): Homolog of NCBI NO: 18424775 NR Description: 3(2),5-bisphosphate nucleotidase [Arabidopsis
  misc_feature (64)..(412): Homolog of NCBI NO: 21618152 NR Description: 3(2),5-bisphosphate nucleotidase [Arabidopsis
  misc_feature (64)..(410): Homolog of NCBI NO: 34395640 NR Description: Probable SAL4 phosphatase (3'(2'),5'-bisphosphate
  misc_feature (64)..(412): Homolog of NCBI NO: 8777312 NR Description: 3'(2'),5'-bisphosphate nucleotidase [Arabidopsis
  misc_feature (64)..(410): Homolog of NCBI NO: 15242383 NR Description: 3'(2'),5'-bisphosphate nucleotidase-related
  misc_feature (196)..(416): Homolog of NCBI NO: 17017951 NR Description: 3'(2'),5'-bisphosphate nucleotidase [Gossypium
TYIYLLEKRMMSINCFRTAKAPLQSFVAVRTNSRPRNSSNRLVSVFGRKSSSPSFVTLRVVSSMAYEKELDAAKKAASLAARLCQKVQKALLQSDVQSKSDKSPVTVADYGSQAVVSLVLEKELSSEPFSLVAEEDSGDLRKDGSQDTLERITKLVNDTLATEESFNGSTLSTDDLLRAIDCGTSEGGPNGRHWVLDPIDGTKGFLRGDQYAVALGLLEEGKVVLGVLACPNLPLASIAGNNKNKSSSDEIGCLFFATIGSGTYMQLLDSKSSPVKVQVSSVENPEEASFFESFEGAHSLHDLSSSIANKLGVKAPPVRIDSQAKYGALSRGDGAIYLRFPHKGYREKIWDHVAGAIVVTEAGGIVTDAAGKPLDFSKGKYLDLDTGIIVANEKLMPLLLKAVRDSIAEQEKASAL

SEQ ID NO: 101691 - protein, 407 aa, Arabidopsis thaliana
  peptide (1)..(407): Ceres Seq. ID no. 13608481
  misc_feature (55)..(407): Homolog of NCBI NO: 15237567 NR Description: 3(2),5-bisphosphate nucleotidase [Arabidopsis
  misc_feature (51)..(407): Homolog of NCBI NO: 14268820 NR Description: diphosphonucleotide phosphatase 1 [Zea mays]
  misc_feature (57)..(406): Homolog of NCBI NO: 3913517 NR Description: 3'(2'),5'-BISPHOSPHATE NUCLEOTIDASE (3'(2'),5-
  misc_feature (55)..(401): Homolog of NCBI NO: 15237589 NR Description: 3(2),5-bisphosphate nucleotidase (emb|CAB05889.1)
  misc_feature (55)..(403): Homolog of NCBI NO: 18424775 NR Description: 3(2),5-bisphosphate nucleotidase [Arabidopsis
  misc_feature (55)..(403): Homolog of NCBI NO: 21618152 NR Description: 3(2),5-bisphosphate nucleotidase [Arabidopsis
  misc_feature (55)..(401): Homolog of NCBI NO: 34395640 NR Description: Probable SAL4 phosphatase (3'(2'),5'-bisphosphate
  misc_feature (55)..(403): Homolog of NCBI NO: 8777312 NR Description: 3'(2'),5'-bisphosphate nucleotidase [Arabidopsis
  misc_feature (55)..(401): Homolog of NCBI NO: 15242383 NR Description: 3'(2'),5'-bisphosphate nucleotidase-related
  misc_feature (187)..(407): Homolog of NCBI NO: 17017951 NR Description: 3'(2'),5'-bisphosphate nucleotidase [Gossypium
MMSINCFRTAKAPLQSFVAVRTNSRPRNSSNRLVSVFGRKSSSPSFVTLRVVSSMAYEKELDAAKKAASLAARLCQKVQKALLQSDVQSKSDKSPVTVADYGSQAVVSLVLEKELSSEPFSLVAEEDSGDLRKDGSQDTLERITKLVNDTLATEESFNGSTLSTDDLLRAIDCGTSEGGPNGRHWVLDPIDGTKGFLRGDQYAVALGLLEEGKVVLGVLACPNLPLASIAGNNKNKSSSDEIGCLFFATIGSGTYMQLLDSKSSPVKVQVSSVENPEEASFFESFEGAHSLHDLSSSIANKLGVKAPPVRIDSQAKYGALSRGDGAIYLRFPHKGYREKIWDHVAGAIVVTEAGGIVTDAAGKPLDFSKGKYLDLDTGIIVANEKLMPLLLKAVRDSIAEQEKASAL

SEQ ID NO: 101692 - protein, 406 aa, Arabidopsis thaliana; identical to SEQ ID NO: 78394
  peptide (1)..(406): Ceres Seq. ID no. 13608482
  misc_feature (54)..(406): Homolog of NCBI NO: 15237567 NR Description: 3(2),5-bisphosphate nucleotidase [Arabidopsis
  misc_feature (50)..(406): Homolog of NCBI NO: 14268820 NR Description: diphosphonucleotide phosphatase 1 [Zea mays]
  misc_feature (56)..(405): Homolog of NCBI NO: 3913517 NR Description: 3'(2'),5'-BISPHOSPHATE NUCLEOTIDASE (3'(2'),5-
  misc_feature (54)..(400): Homolog of NCBI NO: 15237589 NR Description: 3(2),5-bisphosphate nucleotidase (emb|CAB05889.1)
  misc_feature (54)..(402): Homolog of NCBI NO: 18424775 NR Description: 3(2),5-bisphosphate nucleotidase [Arabidopsis
  misc_feature (54)..(402): Homolog of NCBI NO: 21618152 NR Description: 3(2),5-bisphosphate nucleotidase [Arabidopsis
  misc_feature (54)..(400): Homolog of NCBI NO: 34395640 NR Description: Probable SAL4 phosphatase (3'(2'),5'-bisphosphate
  misc_feature (54)..(402): Homolog of NCBI NO: 8777312 NR Description: 3'(2'),5'-bisphosphate nucleotidase [Arabidopsis
  misc_feature (54)..(400): Homolog of NCBI NO: 15242383 NR Description: 3'(2'),5'-bisphosphate nucleotidase-related
  misc_feature (186)..(406): Homolog of NCBI NO: 17017951 NR Description: 3'(2'),5'-bisphosphate nucleotidase [Gossypium

SEQ ID NO: 101693 - DNA, 1387 bp, Arabidopsis thaliana
  misc_feature (1)..(1387): Ceres Seq. ID no. 13608483
  misc_feature: MA Experiment ID: 108434 Result: Up-regulated in Transcription
  misc_feature: MA Experiment 108434 PARAMETER Experiment Name: At_Root_Tips_cDNA_P Parameter: Tissue Value: Root Tips
  misc_feature: MA Experiment ID: 108435 Result: Up-regulated in Transcription
  misc_feature: MA Experiment 108435 PARAMETER Experiment Name: At_stm_Mutants_cDNA_P Parameter: Plant Line Value: wt Landsburg vs stm
  misc_feature: MA Experiment 108435 PARAMETER Experiment Name: At_stm_Mutants_cDNA_P Parameter: Tissue Value: Shoot Apical Meristem Region
  misc_feature: MA Experiment ID: 108461 Result: Down-regulated in Transcription
  misc_feature: MA Experiment 108461 PARAMETER Experiment Name: At_Germinating_Seeds_cDNA_P Parameter: Age (day) Value: 1 vs. 0
  misc_feature: MA Experiment 108461 PARAMETER Experiment Name: At_Germinating_Seeds_cDNA_P Parameter: Tissue Value: Germinating Seeds
  misc_feature: MA Experiment ID: 108462 Result: Down-regulated in Transcription
  misc_feature: MA Experiment 108462 PARAMETER Experiment Name: At_Germinating_Seeds_cDNA_P Parameter: Age (day) Value: 2 vs. 0
  misc_feature: MA Experiment 108462 PARAMETER Experiment Name: At_Germinating_Seeds_cDNA_P Parameter: Tissue Value: Germinating Seeds
  misc_feature: MA Experiment ID: 108463 Result: Down-regulated in Transcription
  misc_feature: MA Experiment 108463 PARAMETER Experiment Name: At_Germinating_Seeds_cDNA_P Parameter: Age (day) Value: 3 vs. 0
  misc_feature: MA Experiment 108463 PARAMETER Experiment Name: At_Germinating_Seeds_cDNA_P Parameter: Tissue Value: Germinating Seeds
  misc_feature: MA Experiment ID: 108464 Result: Down-regulated in Transcription
  misc_feature: MA Experiment 108464 PARAMETER Experiment Name: At_Germinating_Seeds_cDNA_P Parameter: Age (day) Value: 4 vs. 0
  misc_feature: MA Experiment 108464 PARAMETER Experiment Name: At_Germinating_Seeds_cDNA_P Parameter: Tissue Value: Germinating Seeds
  misc_feature: MA Experiment ID: 108573 Result: Up-regulated in Transcription
  misc_feature: MA Experiment 108573 PARAMETER Experiment Name: At_Drought_cDNA_P Parameter: Timepoint (hr) Value: 6
  misc_feature: MA Experiment 108573 PARAMETER Experiment Name: At_Drought_cDNA_P Parameter: Tissue Value: Aerial
  misc_feature: MA Experiment 108573 PARAMETER Experiment Name: At_Drought_cDNA_P Parameter: Treatment Value: Drought vs. No Drought
  misc_feature: MA Experiment ID: 108585 Result: Up-regulated in Transcription
  misc_feature: MA Experiment 108585 PARAMETER Experiment Name: At_5mM_NaNP_cDNA_P Parameter: Timepoint (hr) Value: 6
  misc_feature: MA Experiment 108585 PARAMETER Experiment Name: At_5mM_NaNP_cDNA_P Parameter: Tissue Value: Aerial
  misc_feature: MA Experiment 108585 PARAMETER Experiment Name: At_5mM_NaNP_cDNA_P Parameter: Treatment Value: null
  misc_feature: MA Experiment ID: 20000093 Result: Up-regulated in Transcription
  misc_feature: MA Experiment 20000093 PARAMETER Experiment Name: At_42deg_Heat_cDNA_P Parameter: Temperature (deg C) Value: 42 vs. 22
  misc_feature: MA Experiment 20000093 PARAMETER Experiment Name: At_42deg_Heat_cDNA_P Parameter: Timepoint (hr) Value: 0.5
  misc_feature: MA Experiment 20000093 PARAMETER Experiment Name: At_42deg_Heat_cDNA_P Parameter: Tissue Value: Aerial
  misc_feature: MA Experiment ID: 20000111 Result: Up-regulated in Transcription
  misc_feature: MA Experiment 20000111 PARAMETER Experiment Name: At_42deg_Heat_cDNA_P Parameter: Temperature (deg C) Value: 42 vs. 22
  misc_feature: MA Experiment 20000111 PARAMETER Experiment Name: At_42deg_Heat_cDNA_P Parameter: Timepoint (hr) Value: 6
  misc_feature: MA Experiment 20000111 PARAMETER Experiment Name: At_42deg_Heat_cDNA_P Parameter: Tissue Value: Aerial
  misc_feature: MA Experiment ID: 20000112 Result: Up-regulated in Transcription
  misc_feature: MA Experiment 20000112 PARAMETER Experiment Name: At_42deg_Heat_cDNA_P Parameter: Temperature (deg C) Value: 42 vs. 22
  misc_feature: MA Experiment 20000112 PARAMETER Experiment Name: At_42deg_Heat_cDNA_P Parameter: Timepoint (hr) Value: 2
  misc_feature: MA Experiment 20000112 PARAMETER Experiment Name: At_42deg_Heat_cDNA_P Parameter: Tissue Value: Aerial
  misc_feature: MA Experiment ID: 20000113 Result: Up-regulated in Transcription
  misc_feature: MA Experiment 20000113 PARAMETER Experiment Name: At_42deg_Heat_cDNA_P Parameter: Temperature (deg C) Value: 42 vs. 22
  misc_feature: MA Experiment 20000113 PARAMETER Experiment Name: At_42deg_Heat_cDNA_P Parameter: Timepoint (hr) Value: 8
  misc_feature: MA Experiment 20000113 PARAMETER Experiment Name: At_42deg_Heat_cDNA_P Parameter: Tissue Value: Aerial
  misc_feature: MA Experiment ID: 20000144 Result: Up-regulated in Transcription
  misc_feature: MA Experiment 20000144 PARAMETER Experiment Name: At_42deg_Heat_cDNA_P Parameter: Temperature (deg C) Value: 42 vs. 22
  misc_feature: MA Experiment 20000144 PARAMETER Experiment Name: At_42deg_Heat_cDNA_P Parameter: Timepoint (hr) Value: 1
  misc_feature: MA Experiment 20000144 PARAMETER Experiment Name: At_42deg_Heat_cDNA_P Parameter: Tissue Value: Aerial
  misc_feature: MA Experiment ID: 20000179 Result: Down-regulated in Transcription
  misc_feature: MA Experiment 20000179 PARAMETER Experiment Name: At_Germinating_Seeds_P Parameter: Age (hr) Value: 6 vs. 0
  misc_feature: MA Experiment 20000179 PARAMETER Experiment Name: At_Germinating_Seeds_P Parameter: Tissue Value: Germinating Seeds
  misc_feature: MA Experiment ID: 20000180 Result: Down-regulated in Transcription
  misc_feature: MA Experiment 20000180 PARAMETER Experiment Name: At_Germinating_Seeds_P Parameter: Age (hr) Value: 24 vs. 0
  misc_feature: MA Experiment 20000180 PARAMETER Experiment Name: At_Germinating_Seeds_P Parameter: Tissue Value: Germinating Seeds
attgtttcagaaaagctttaacctaatttcacttcgtctctctctcgcgctcccaatttctccgccggcgggaaaaccatgtcgcacttcggaaggtcaggtccaccggatatcagcgacacctactcacttctcgtccttaacatcaccttccgtacgactgctgatgatctctatcctctattcgcaaagtatggaaaggtcgttgatgtgtttattcccagagatcgaaggactggtgattcgcgtggttttgcgtttgttcggtataagtataaagacgaagctcacaaagcagtggaaaggcttgatggaagagttgttgatggcagagaaataactgttcagtttgcgaaatatgggccaaatgctgaaaaaatttccaaaggaagagttgtggaaccaccgccgaagtcacgaagatctagaagccgtagtcctaggcggagtcgtagtcctaggaggagccgtagcccgcctagacgtcgtagtcccagaagaagccgcagtcctcgtaggaggtcccgagatgactatagggaaaaagactaccggaagcggagcaggagcagaagctatgacaggcgtgaaaggcatgaggagaaggatagagatcatcgtcgtcgcactaggtctcgtagtgccagcccagatgaaaaacgcagagtcagaggccgttatgataatgagagccgcagtcacagtcgttccttgagtgcatctcctgctcgccgcagccctagaagttcctccccacagaaaacctctcctgctagagaagtttctcctgataagcgtagcaatgagaggtctccatctcctcgtcgcagcctcagcccaagaagccctgctttgcaaaaggcctctccttctaaggagatgtctcctgaaaggcgtagcaatgagaggtccccatctcctggtagccctgctcctctgcgcaaagttgatgctgcttctcgaagtcaatctccttatgctgcggaatgactgcagccacttgtgaaagtgatacggtgtatgatgaaaaacacgtttgcttgtactgatgatgtttcatcattaagcactggaacgtctaccctctgtagtattacttgctttccgtaggtgccctcaaactactgagtactgactgtatctttgtttcctgttatcgttctggtttagtgttcatgtgcaagaattattactgtttgaacagcctttttagtctctgttttatttgaatcttctctggtttggaattcatagcattctaactccattcccctggcttgtcttggatttttctagtctggttcgagaaaagaattgactgggaagatggcacaaccatgttgagattgtagctgttgatggctgtttatgaaactgtagatgatcg

SEQ ID NO: 101694 - protein, 303 aa, Arabidopsis thaliana; identical to SEQ ID NO: 35347
  peptide (1)..(303): Ceres Seq. ID no. 13608484
  misc_feature (18)..(89): Pfam Name: RNA recognition motif. (a.k.a. RRM, RBD, or RNP domain) Pfam Description: RNA recognition motif. (a.k.a. RRM, RBD, or RNP
  misc_feature (1)..(303): Homolog of NCBI NO: 15237641 NR Description: arginine/serine-rich splicing factor SC35
  misc_feature (1)..(303): Homolog of NCBI NO: 9843653 NR Description: splicing factor SC35 [Arabidopsis thaliana]
  misc_feature (1)..(280): Homolog of NCBI NO: 33146621 NR Description: putative splicing factor, arginine/serine-rich 2
  misc_feature (1)..(288): Homolog of NCBI NO: 7446336 NR Description: probable arginine/serine-rich splicing factor -
  misc_feature (4)..(216): Homolog of NCBI NO: 28279759 NR Description: Similar to splicing factor, arginine/serine-rich
  misc_feature (4)..(234): Homolog of NCBI NO: 266991 NR Description: Splicing factor, arginine/serine-rich 2 (Splicing
  misc_feature (4)..(234): Homolog of NCBI NO: 6755478 NR Description: splicing factor, arginine/serine-rich 2; DNA Chr 11, Wayne State University 175, expressed; splicing factor [Mus musculus] >gi|27691222|ref|XP_213556.1| similar to
  misc_feature (4)..(234): Homolog of NCBI NO: 4506899 NR Description: splicing factor, arginine/serine-rich 2 [Homo
  misc_feature (5)..(279): Homolog of NCBI NO: 15055543 NR Description: Splicing factor, arginine/serine-rich, 46kD [Homo
  misc_feature (4)..(221): Homolog of NCBI NO: 39794351 NR Description: Unknown (protein for MGC:75633) [Silurana

SEQ ID NO: 101695 - DNA, 2758 bp, Arabidopsis thaliana
  misc_feature (1)..(2758): Ceres Seq. ID no. 13608493
  misc_feature: MA Experiment ID: 20000234 Result: Up-regulated in Transcription
  misc_feature: MA Experiment 20000234 PARAMETER Experiment Name: At_Siliques_P Parameter: Age (day) Value: 21
  misc_feature: MA Experiment 20000234 PARAMETER Experiment Name: At_Siliques_P Parameter: Organism Value: A. thaliana
  misc_feature: MA Experiment 20000234 PARAMETER Experiment Name: At_Siliques_P Parameter: Plant Line Value: WS
  misc_feature: MA Experiment 20000234 PARAMETER Experiment Name: At_Siliques_P Parameter: Tissue Value: Less Than 5mm Siliques vs. Whole Plant
  misc_feature: MA Experiment ID: 20000264 Result: Up-regulated in Transcription
  misc_feature: MA Experiment 20000264 PARAMETER Experiment Name: At_Open_Flower_P Parameter: Age (day) Value: 21
  misc_feature: MA Experiment 20000264 PARAMETER Experiment Name: At_Open_Flower_P Parameter: Plant Line Value: WS
  misc_feature: MA Experiment 20000264 PARAMETER Experiment Name: At_Open_Flower_P Parameter: Tissue Value: Open Flower vs. Whole Plant
  misc_feature: MA Experiment ID: 20000265 Result: Up-regulated in Transcription
  misc_feature: MA Experiment 20000265 PARAMETER Experiment Name: At_Open_Flower_P Parameter: Age (day) Value: 21
  misc_feature: MA Experiment 20000265 PARAMETER Experiment Name: At_Open_Flower_P Parameter: Plant Line Value: WS
  misc_feature: MA Experiment 20000265 PARAMETER Experiment Name: At_Open_Flower_P Parameter: Tissue Value: Closed Flower vs. Whole Plant
  misc_feature: MA Experiment ID: 20000438 Result: Up-regulated in Transcription
  misc_feature: MA Experiment 20000438 PARAMETER Experiment Name: At_Shoots__P Parameter: Age (day) Value: 14
  misc_feature: MA Experiment 20000438 PARAMETER Experiment Name: At_Shoots__P Parameter: Tissue Value: Shoots vs. Whole Plant
  misc_feature: MA Experiment ID: 20001247 Result: Down-regulated in Transcription
  misc_feature: MA Experiment 20001247 PARAMETER Experiment Name: At_Far-red-induction_P Parameter: Age (day) Value: 7
  misc_feature: MA Experiment 20001247 PARAMETER Experiment Name: At_Far-red-induction_P Parameter: Light Value: Far-red vs. White
  misc_feature: MA Experiment 20001247 PARAMETER Experiment Name: At_Far-red-induction_P Parameter: Organism Value: A. thaliana
  misc_feature: MA Experiment 20001247 PARAMETER Experiment Name: At_Far-red-induction_P Parameter: Plant Line Value: Columbia
  misc_feature: MA Experiment 20001247 PARAMETER Experiment Name: At_Far-red-induction_P Parameter: Timepoint (hr) Value: 1
  misc_feature: MA Experiment 20001247 PARAMETER Experiment Name: At_Far-red-induction_P Parameter: Tissue Value: Whole Plant
  misc_feature: MA Experiment ID: 20001248 Result: Down-regulated in Transcription
  misc_feature: MA Experiment 20001248 PARAMETER Experiment Name: At_Far-red-induction_P Parameter: Age (day) Value: 7
  misc_feature: MA Experiment 20001248 PARAMETER Experiment Name: At_Far-red-induction_P Parameter: Light Value: Far-red vs. White
  misc_feature: MA Experiment 20001248 PARAMETER Experiment Name: At_Far-red-induction_P Parameter: Organism Value: A. thaliana
  misc_feature: MA Experiment 20001248 PARAMETER Experiment Name: At_Far-red-induction_P Parameter: Plant Line Value: Columbia
  misc_feature: MA Experiment 20001248 PARAMETER Experiment Name: At_Far-red-induction_P Parameter: Timepoint (hr) Value: 4
  misc_feature: MA Experiment 20001248 PARAMETER Experiment Name: At_Far-red-induction_P Parameter: Tissue Value: Whole Plant
  misc_feature: MA Experiment ID: 20001450 Result: Down-regulated in Transcription
  misc_feature: MA Experiment 20001450 PARAMETER Experiment Name: At_Far-red-induction_P Parameter: Age (day) Value: 7
  misc_feature: MA Experiment 20001450 PARAMETER Experiment Name: At_Far-red-induction_P Parameter: Light Value: Far-red vs. White
  misc_feature: MA Experiment 20001450 PARAMETER Experiment Name: At_Far-red-induction_P Parameter: Organism Value: A. thaliana
  misc_feature: MA Experiment 20001450 PARAMETER Experiment Name: At_Far-red-induction_P Parameter: Plant Line Value: Columbia
  misc_feature: MA Experiment 20001450 PARAMETER Experiment Name: At_Far-red-induction_P Parameter: Timepoint (hr) Value: 8
  misc_feature: MA Experiment 20001450 PARAMETER Experiment Name: At_Far-red-induction_P Parameter: Tissue Value: Whole Plant
  misc_feature: MA Experiment ID: 20001451 Result: Down-regulated in Transcription
  misc_feature: MA Experiment 20001451 PARAMETER Experiment Name: At_Far-red-induction_P Parameter: Age (day) Value: 7
  misc_feature: MA Experiment 20001451 PARAMETER Experiment Name: At_Far-red-induction_P Parameter: Light Value: Far-red vs. White
  misc_feature: MA Experiment 20001451 PARAMETER Experiment Name: At_Far-red-induction_P Parameter: Organism Value: A. thaliana
  misc_feature: MA Experiment 20001451 PARAMETER Experiment Name: At_Far-red-induction_P Parameter: Plant Line Value: Columbia
  misc_feature: MA Experiment 20001451 PARAMETER Experiment Name: At_Far-red-induction_P Parameter: Timepoint (hr) Value: 24
  misc_feature: MA Experiment 20001451 PARAMETER Experiment Name: At_Far-red-induction_P Parameter: Tissue Value: Whole Plant
atgacgttttatatctcgagctcgttaactccaacccatttctcgaaacccttaaacccttctaataccctcttccccagtcaatttcgaggttctctgtctagtttcgtccgtcgaagaaaaccaacggaagctaaattaagctccaaattcaatctttttccttcacgaagaaatggtttgattacttgttgcagtacatcgagctttgagtctactgagtcttcagtttcacaggaagaagatgctgagtccaatcgtctatttgagaagttacgagaaactgaaagagaacgacttagcaacatggaagagctcgagagaaaggctaatgtacaattagaaaggcagcttgttatggcatcagattggagtagaacattgttaaccatgcgtggcaagttaaaaggaacagaatgggatcctgaaacctctcaccgtatcaattttagtgattttatgaagctcttagattccaacagtgttcaatacatggaatattcaaattacggacagacgatatcagtgatattgccttattataaagatggggagcccctaggagaagaagaagattcgaaaaaggagataattttccgtcgtcacattgtggaccgaatgccaattgatggttggaatgatgtatggaagaagttgcatcagcagatagtaaacgtagaggttttcaatgtagatgtggttccagctgaagtctatactacagttgccacttttgtggtttggtctatgagacttgccctctttgtttcgctttatgtttggatcgacagtatcacgaggccaatctatgccaaactaatcccttgtgatctcggaacccctaccaaaaagataaggcagcccctcaagcgccaagcactcggttccctaggcaagagtcgggcaaaatttatatcagcagaggagaaaactggtgttacttttgatgattttgcgggtcaggagtatataaagagggaattacaagaaattgtgcgaattttaaagaatgatgaggaatttcagaataaaggcatttattgtccgaaaggtgttctgcttcatggacctcccggaacggggaaaactttgttagccaaagctattgctggagaagctggtttacctttcttcgcggcaaatggaaccgactttgttgagatgtttgtaggagtggctgcatctcgtgttaaagatctttttgctagctctcggtcatatgcgccatctataatcttcattgatgagattgatgcaattggaagtaagcgaggtggacccgatattggcgggggaggagcagagagagaacaaggtttgcttcaaatattgactgagatggatggatttaaagttactacatcacaagtattagtcataggtgcaacaaatagattagatatccttgatcctgctctattgagaaaaggtcgttttgacaaaatcataagagttggtttaccgtcaaaagatggtagattggcgatattaaaggtacatgctagaaataaattctttcgatctgaggatgagaaggaggagttgctgcaagaagtagctgagaacacggaagattttaccggagcagaactgcaaaacgttctaaatgaagctggaatcttgacagctagaaaagatttggattacattggaagagaagaactccttgaggcgcttaagcggcaaaaagggacatttgagactggacaagaagatagtactgaagttccagaggaactgaagttgagattggcttaccgagaagcagctgttgctgttcttgcttgttatctcccagatcaatatcgtccaatcagcgagactgacataaactcgattagaagccaaccaaatatgcgttactctgaaacttcaggaagagtttttgcgagaaagtcagattatgtgaactcaataatccgtgcatgtgctcctagagtagttgaagaagagatgtttggaatagaaaacctgtgttggatctctgctaagtctactttagaagcttcacagcgagcggaatttctgattcttcagacgggaatgactgcttttggaaaagcttattaccgaaaccaaagagacctcgttcctaatcttgttccgaaacttgaggcattacgcgatgagtacatgaggtttgctgttgagaaatgctcatcaatcttacaagagtatcaatcagcccttgaagaaatcacagatgtgcttcttgagaaaggagaaatcaaagccgatgaaatctggaacatttacaacacagctccaaggattcctcaaaaacccgtgagacctgtcgatgagtatggagctttaatctatgcgggaagatggggaattcacggtgtatcgcttcctggaagagtaacattttcaccaggaaacattggttttgcaacatttggagctcctcgtcccatggagacacaaatcatcagcgatgacacatggaaactagtggatgagatttgggataaaaaggttgaagaaatcaaagcagaagctgttattcaaattgaagaagaaaagaagaaacctcagattttgatggcaacccatttcttttaaaatcatttttcagttttgcggtctcaagaacatcaaatgaacaaagctctccaggtgaaactttagagattattatgtatcatgtaaaacatagagatctgtagaaaagagtgttagtggaatcacactagtttatttgctgagaaaaatgtcaaatgtgatcatttttataaaatattttgttattttt

SEQ ID NO: 101696 - protein, 855 aa, Arabidopsis thaliana
  peptide (1)..(855): Ceres Seq. ID no. 13608494
  misc_feature (351)..(544): Pfam Name: ATPase family associated with various cellular Pfam Description: ATPase family associated with various cellular
  misc_feature (517)..(855): Homolog of NCBI NO: 19347916 NR Description: unknown protein [Arabidopsis thaliana]
  misc_feature (296)..(751): Homolog of NCBI NO: 11465515 NR Description: cell division protein [Cyanidium caldarium]
  misc_feature (292)..(761): Homolog of NCBI NO: 17231134 NR Description: cell division protein [Nostoc sp. PCC 7120]
  misc_feature (292)..(761): Homolog of NCBI NO: 37522147 NR Description: cell division protein [Gloeobacter violaceus]
  misc_feature (292)..(761): Homolog of NCBI NO: 22298276 NR Description: cell division protein [Thermosynechococcus BP-1] >gi|22294455|dbj|BAC08285.1| cell division protein
  misc_feature (292)..(761): Homolog of NCBI NO: 23123765 NR Description: hypothetical protein [Nostoc punctiforme]
  misc_feature (296)..(761): Homolog of NCBI NO: 22299375 NR Description: cell division protein [Thermosynechococcus BP-1] >gi|22295558|dbj|BAC09384.1| cell division protein
  misc_feature (292)..(761): Homolog of NCBI NO: 33240371 NR Description: Cell division protein FtsH [Prochlorococcus subsp. marinus str. CCMP1375] >gi|33237898|gb|AAP99965.1| Cell protein FtsH [Prochlorococcus marinus subsp. marinus str.
  misc_feature (296)..(758): Homolog of NCBI NO: 30468153 NR Description: cell division protein ftsH homolog merolae] >gi|14423723|sp|Q9TJ83|FTSH_CYAME Cell division protein homolog (FtsHCP) >gi|6539506|dbj|BAA88165.1| FtsH (FtsHcp)
  misc_feature (296)..(753): Homolog of NCBI NO: 20808757 NR Description: ATP-dependent Zn proteases [Thermoanaerobacter
MTFYISSSLTPTHFSKPLNPSNTLFPSQFRGSLSSFVRRRKPTEAKLSSKFNLFPSRRNGLITCCSTSSFESTESSVSQEEDAESNRLFEKLRETERERLSNMEELERKANVQLERQLVMASDWSRTLLTMRGKLKGTEWDPETSHRINFSDFMKLLDSNSVQYMEYSNYGQTISVILPYYKDGEPLGEEEDSKKEIIFRRHIVDRMPIDGWNDVWKKLHQQIVNVEVFNVDVVPAEVYTTVATFVVWSMRLALFVSLYVWIDSITRPIYAKLIPCDLGTPTKKIRQPLKRQALGSLGKSRAKFISAEEKTGVTFDDFAGQEYIKRELQEIVRILKNDEEFQNKGIYCPKGVLLHGPPGTGKTLLAKAIAGEAGLPFFAANGTDFVEMFVGVAASRVKDLFASSRSYAPSIIFIDEIDAIGSKRGGPDIGGGGAEREQGLLQILTEMDGFKVTTSQVLVIGATNRLDILDPALLRKGRFDKIIRVGLPSKDGRLAILKVHARNKFFRSEDEKEELLQEVAENTEDFTGAELQNVLNEAGILTARKDLDYIGREELLEALKRQKGTFETGQEDSTEVPEELKLRLAYREAAVAVLACYLPDQYRPISETDINSIRSQPNMRYSETSGRVFARKSDYVNSIIRACAPRVVEEEMFGIENLCWISAKSTLEASQRAEFLILQTGMTAFGKAYYRNQRDLVPNLVPKLEALRDEYMRFAVEKCSSILQEYQSALEEITDVLLEKGEIKADEIWNIYNTAPRIPQKPVRPVDEYGALIYAGRWGIHGVSLPGRVTFSPGNIGFATFGAPRPMETQIISDDTWKLVDEIWDKKVEEIKAEAVIQIEEEKKKPQILMATHFF

SEQ ID NO: 101697 - protein, 753 aa, Arabidopsis thaliana
  peptide (1)..(753): Ceres Seq. ID no. 13608495
  misc_feature (249)..(442): Pfam Name: ATPase family associated with various cellular Pfam Description: ATPase family associated with various cellular
  misc_feature (415)..(753): Homolog of NCBI NO: 19347916 NR Description: unknown protein [Arabidopsis thaliana]
  misc_feature (194)..(649): Homolog of NCBI NO: 11465515 NR Description: cell division protein [Cyanidium caldarium]
  misc_feature (190)..(659): Homolog of NCBI NO: 17231134 NR Description: cell division protein [Nostoc sp. PCC 7120]
  misc_feature (190)..(659): Homolog of NCBI NO: 37522147 NR Description: cell division protein [Gloeobacter violaceus]
  misc_feature (190)..(659): Homolog of NCBI NO: 22298276 NR Description: cell division protein [Thermosynechococcus BP-1] >gi|22294455|dbj|BAC08285.1| cell division protein
  misc_feature (190)..(659): Homolog of NCBI NO: 23123765 NR Description: hypothetical protein [Nostoc punctiforme]
  misc_feature (194)..(659): Homolog of NCBI NO: 22299375 NR Description: cell division protein [Thermosynechococcus BP-1] >gi|22295558|dbj|BAC09384.1| cell division protein
  misc_feature (190)..(659): Homolog of NCBI NO: 33240371 NR Description: Cell division protein FtsH [Prochlorococcus subsp. marinus str. CCMP1375] >gi|33237898|gb|AAP99965.1| Cell protein FtsH [Prochlorococcus marinus subsp. marinus str.
  misc_feature (194)..(656): Homolog of NCBI NO: 30468153 NR Description: cell division protein ftsH homolog merolae] >gi|14423723|sp|Q9TJ83|FTSH_CYAME Cell division protein homolog (FtsHCP) >gi|6539506|dbj|BAA88165.1| FtsH (FtsHcp)
  misc_feature (194)..(651): Homolog of NCBI NO: 20808757 NR Description: ATP-dependent Zn proteases [Thermoanaerobacter
MEELERKANVQLERQLVMASDWSRTLLTMRGKLKGTEWDPETSHRINFSDFMKLLDSNSVQYMEYSNYGQTISVILPYYKDGEPLGEEEDSKKEIIFRRHIVDRMPIDGWNDVWKKLHQQIVNVEVFNVDVVPAEVYTTVATFVVWSMRLALFVSLYVWIDSITRPIYAKLIPCDLGTPTKKIRQPLKRQALGSLGKSRAKFISAEEKTGVTFDDFAGQEYIKRELQEIVRILKNDEEFQNKGIYCPKGVLLHGPPGTGKTLLAKAIAGEAGLPFFAANGTDFVEMFVGVAASRVKDLFASSRSYAPSIIFIDEIDAIGSKRGGPDIGGGGAEREQGLLQILTEMDGFKVTTSQVLVIGATNRLDILDPALLRKGRFDKIIRVGLPSKDGRLAILKVHARNKFFRSEDEKEELLQEVAENTEDFTGAELQNVLNEAGILTARKDLDYIGREELLEALKRQKGTFETGQEDSTEVPEELKLRLAYREAAVAVLACYLPDQYRPISETDINSIRSQPNMRYSETSGRVFARKSDYVNSIIRACAPRVVEEEMFGIENLCWISAKSTLEASQRAEFLILQTGMTAFGKAYYRNQRDLVPNLVPKLEALRDEYMRFAVEKCSSILQEYQSALEEITDVLLEKGEIKADEIWNIYNTAPRIPQKPVRPVDEYGALIYAGRWGIHGVSLPGRVTFSPGNIGFATFGAPRPMETQIISDDTWKLVDEIWDKKVEEIKAEAVIQIEEEKKKPQILMATHFF

SEQ ID NO: 101698 - protein, 736 aa, Arabidopsis thaliana
  peptide (1)..(736): Ceres Seq. ID no. 13608496
  misc_feature (232)..(425): Pfam Name: ATPase family associated with various cellular Pfam Description: ATPase family associated with various cellular
  misc_feature (398)..(736): Homolog of NCBI NO: 19347916 NR Description: unknown protein [Arabidopsis thaliana]
  misc_feature (177)..(632): Homolog of NCBI NO: 11465515 NR Description: cell division protein [Cyanidium caldarium]
  misc_feature (173)..(642): Homolog of NCBI NO: 17231134 NR Description: cell division protein [Nostoc sp. PCC 7120]
  misc_feature (173)..(642): Homolog of NCBI NO: 37522147 NR Description: cell division protein [Gloeobacter violaceus]
  misc_feature (173)..(642): Homolog of NCBI NO: 22298276 NR Description: cell division protein [Thermosynechococcus BP-1] >gi|22294455|dbj|BAC08285.1| cell division protein
  misc_feature (173)..(642): Homolog of NCBI NO: 23123765 NR Description: hypothetical protein [Nostoc punctiforme]
  misc_feature (177)..(642): Homolog of NCBI NO: 22299375 NR Description: cell division protein [Thermosynechococcus BP-1] >gi|22295558|dbj|BAC09384.1| cell division protein
  misc_feature (173)..(642): Homolog of NCBI NO: 33240371 NR Description: Cell division protein FtsH [Prochlorococcus subsp. marinus str. CCMP1375] >gi|33237898|gb|AAP99965.1| Cell protein FtsH [Prochlorococcus marinus subsp. marinus str.
  misc_feature (177)..(639): Homolog of NCBI NO: 30468153 NR Description: cell division protein ftsH homolog merolae] >gi|14423723|sp|Q9TJ83|FTSH_CYAME Cell division protein homolog (FtsHCP) >gi|6539506|dbj|BAA88165.1| FtsH (FtsHcp)
  misc_feature (177)..(634): Homolog of NCBI NO: 20808757 NR Description: ATP-dependent Zn proteases [Thermoanaerobacter
MASDWSRTLLTMRGKLKGTEWDPETSHRINFSDFMKLLDSNSVQYMEYSNYGQTISVILPYYKDGEPLGEEEDSKKEIIFRRHIVDRMPIDGWNDVWKKLHQQIVNVEVFNVDVVPAEVYTTVATFVVWSMRLALFVSLYVWIDSITRPIYAKLIPCDLGTPTKKIRQPLKRQALGSLGKSRAKFISAEEKTGVTFDDFAGQEYIKRELQEIVRILKNDEEFQNKGIYCPKGVLLHGPPGTGKTLLAKAIAGEAGLPFFAANGTDFVEMFVGVAASRVKDLFASSRSYAPSIIFIDEIDAIGSKRGGPDIGGGGAEREQGLLQILTEMDGFKVTTSQVLVIGATNRLDILDPALLRKGRFDKIIRVGLPSKDGRLAILKVHARNKFFRSEDEKEELLQEVAENTEDFTGAELQNVLNEAGILTARKDLDYIGREELLEALKRQKGTFETGQEDSTEVPEELKLRLAYREAAVAVLACYLPDQYRPISETDINSIRSQPNMRYSETSGRVFARKSDYVNSIIRACAPRVVEEEMFGIENLCWISAKSTLEASQRAEFLILQTGMTAFGKAYYRNQRDLVPNLVPKLEALRDEYMRFAVEKCSSILQEYQSALEEITDVLLEKGEIKADEIWNIYNTAPRIPQKPVRPVDEYGALIYAGRWGIHGVSLPGRVTFSPGNIGFATFGAPRPMETQIISDDTWKLVDEIWDKKVEEIKAEAVIQIEEEKKKPQILMATHFF

SEQ ID NO: 101699 - DNA, 1218 bp, Arabidopsis thaliana
  misc_feature (1)..(1218): Ceres Seq. ID no. 13608507
  misc_feature: MA Experiment ID: 108462 Result: Down-regulated in Transcription
  misc_feature: MA Experiment 108462 PARAMETER Experiment Name: At_Germinating_Seeds_cDNA_P Parameter: Age (day) Value: 2 vs. 0
  misc_feature: MA Experiment 108462 PARAMETER Experiment Name: At_Germinating_Seeds_cDNA_P Parameter: Tissue Value: Germinating Seeds
  misc_feature: MA Experiment ID: 108463 Result: Down-regulated in Transcription
  misc_feature: MA Experiment 108463 PARAMETER Experiment Name: At_Germinating_Seeds_cDNA_P Parameter: Age (day) Value: 3 vs. 0
  misc_feature: MA Experiment 108463 PARAMETER Experiment Name: At_Germinating_Seeds_cDNA_P Parameter: Tissue Value: Germinating Seeds
  misc_feature: MA Experiment ID: 108464 Result: Down-regulated in Transcription
  misc_feature: MA Experiment 108464 PARAMETER Experiment Name: At_Germinating_Seeds_cDNA_P Parameter: Age (day) Value: 4 vs. 0
  misc_feature: MA Experiment 108464 PARAMETER Experiment Name: At_Germinating_Seeds_cDNA_P Parameter: Tissue Value: Germinating Seeds
  misc_feature: MA Experiment ID: 20000111 Result: Down-regulated in Transcription
  misc_feature: MA Experiment 20000111 PARAMETER Experiment Name: At_42deg_Heat_cDNA_P Parameter: Temperature (deg C) Value: 42 vs. 22
  misc_feature: MA Experiment 20000111 PARAMETER Experiment Name: At_42deg_Heat_cDNA_P Parameter: Timepoint (hr) Value: 6
  misc_feature: MA Experiment 20000111 PARAMETER Experiment Name: At_42deg_Heat_cDNA_P Parameter: Tissue Value: Aerial
  misc_feature: MA Experiment ID: 20000173 Result: Down-regulated in Transcription
  misc_feature: MA Experiment 20000173 PARAMETER Experiment Name: At_42deg_Heat_P Parameter: Age (day) Value: 14
  misc_feature: MA Experiment 20000173 PARAMETER Experiment Name: At_42deg_Heat_P Parameter: Organism Value: A. thaliana
  misc_feature: MA Experiment 20000173 PARAMETER Experiment Name: At_42deg_Heat_P Parameter: Plant Line Value: WS
  misc_feature: MA Experiment 20000173 PARAMETER Experiment Name: At_42deg_Heat_P Parameter: Temperature (deg C) Value: 42 vs. 22
  misc_feature: MA Experiment 20000173 PARAMETER Experiment Name: At_42deg_Heat_P Parameter: Timepoint (hr) Value: 6
  misc_feature: MA Experiment 20000173 PARAMETER Experiment Name: At_42deg_Heat_P Parameter: Tissue Value: Aerial
  misc_feature: MA Experiment ID: 20000184 Result: Down-regulated in Transcription
  misc_feature: MA Experiment 20000184 PARAMETER Experiment Name: At_Shoots__P Parameter: Age (day) Value: 7
  misc_feature: MA Experiment 20000184 PARAMETER Experiment Name: At_Shoots__P Parameter: Tissue Value: Shoots vs. Whole Plant
gttcttcaaagcacaaaccaattctcgaccaaaagatcagaacaaagcgaaggcggattttctggattctcgacggccggagattcatggcgacggctaacggagcaaagagtccgtcgagtatgggccctaaggttttgttttattccatattgctcacacttcagtacggagcccagcctctgatctccaaacgctgcatcagaaaggatgttattgtaacttcatctgttttgacgtgcgagattgttaaggtcatatgtgctctgattctcatggcaagaaatggtagtttgaagggattagcaaaagagtggacgttgatgggatccttgacagcatcaggacttcctgcagccatatatgcactgcagaacagtttgctgcagatctcatacaggagtcttgattccttgacattttcaattctgaatcagacgaaaatctttttcacagcattctttactttcataatactaaggcagaagcaatcaattctacaaataggagccttgtgtctattgatcatggcagcagtccttctaagtgttggtgaaggctctaacaaagattcaagcggcattaatgcggatcaaaagctgttttatggaattatcccggtcttggcagcctctgtcctgtcgggtttagcctcttctctgtgtcaatgggcttctcaggtcaagaagcattcatcatacttaatgacggttgaaatgtctatcgttggaagcctctgtttattagtaagtactcttaaatctccagatggtgaagcgattaaaaaatatggcttctttcatggttggactgctttaacactggtcccagtaataagcaatgctcttggtgggattcttgttggcctagttacatcacatgccggtggtgtaagaaagggatttgtgattgtgtcggcattacttgtgacggcgctacttcaatttgcgtttgaaggaaaaccgccatcatcgtattgcctagttgctcttcctcttgtgatgagtagtatctcaatgtaccagaaatacccatacattgacaagaagaagaagaaggtgtaagaaaaaggttccattcagagaatagctgctagttacaacaatgagatatcttaatgccattattattaactaagtagatgatagtgtgattcttggagcattcaaaagactttgtagtatatttacattcaaagatggaatgagtccaattgag

SEQ ID NO: 101700 - protein, 353 aa, Arabidopsis thaliana; identical to SEQ ID NO: 42219
  peptide (1)..(353): Ceres Seq. ID no. 13608508
  misc_feature (96)..(309): Pfam Name: Nucleotide-sugar transporter Pfam Description: Nucleotide-sugar transporter
  misc_feature (29)..(353): Homolog of NCBI NO: 18424900 NR Description: expressed protein [Arabidopsis thaliana]
  misc_feature (29)..(353): Homolog of NCBI NO: 18086579 NR Description: AT5g65000/MXK3_23 [Arabidopsis thaliana]
  misc_feature (92)..(353): Homolog of NCBI NO: 8843764 NR Description: gene_id:MXK3.23~ref|NP_036375.1~similar to
  misc_feature (49)..(340): Homolog of NCBI NO: 6912668 NR Description: solute carrier family 35 (UDP-N-acetylglucosamine
  misc_feature (49)..(340): Homolog of NCBI NO: 6136120 NR Description: UDP N-acetylglucosamine transporter (Golgi
  misc_feature (44)..(340): Homolog of NCBI NO: 22204205 NR Description: SI:bZ30I22.3 (novel protein similar to vertebrate
  misc_feature (49)..(340): Homolog of NCBI NO: 37725001 NR Description: solute carrier family 35 member 3 [Bos taurus]
  misc_feature (37)..(351): Homolog of NCBI NO: 38176083 NR Description: Hypothetical protein ZC250.3 [Caenorhabditis
  misc_feature (37)..(351): Homolog of NCBI NO: 39593097 NR Description: Hypothetical protein CBG09317 [Caenorhabditis
  misc_feature (49)..(340): Homolog of NCBI NO: 21450281 NR Description: solute carrier family 35 (UDP-N-acetylglucosamine GlcNAc) transporter), member 3 [Mus musculus] RIKEN cDNA 2310050P13 [Mus musculus] >gi|26325360|dbj|BAC26434.1|

SEQ ID NO: 101701 - protein, 325 aa, Arabidopsis thaliana; identical to SEQ ID NO: 21559
  peptide (1)..(325): Ceres Seq. ID no. 13608509
  misc_feature (68)..(281): Pfam Name: Nucleotide-sugar transporter Pfam Description: Nucleotide-sugar transporter
  misc_feature (1)..(325): Homolog of NCBI NO: 18424900 NR Description: expressed protein [Arabidopsis thaliana]
  misc_feature (1)..(325): Homolog of NCBI NO: 18086579 NR Description: AT5g65000/MXK3_23 [Arabidopsis thaliana]
  misc_feature (64)..(325): Homolog of NCBI NO: 8843764 NR Description: gene_id:MXK3.23~ref|NP_036375.1~similar to
  misc_feature (21)..(312): Homolog of NCBI NO: 6912668 NR Description: solute carrier family 35 (UDP-N-acetylglucosamine
  misc_feature (21)..(312): Homolog of NCBI NO: 6136120 NR Description: UDP N-acetylglucosamine transporter (Golgi
  misc_feature (16)..(312): Homolog of NCBI NO: 22204205 NR Description: SI:bZ30I22.3 (novel protein similar to vertebrate
  misc_feature (21)..(312): Homolog of NCBI NO: 37725001 NR Description: solute carrier family 35 member 3 [Bos taurus]
  misc_feature (9)..(323): Homolog of NCBI NO: 38176083 NR Description: Hypothetical protein ZC250.3 [Caenorhabditis
  misc_feature (9)..(323): Homolog of NCBI NO: 39593097 NR Description: Hypothetical protein CBG09317 [Caenorhabditis
  misc_feature (21)..(312): Homolog of NCBI NO: 21450281 NR Description: solute carrier family 35 (UDP-N-acetylglucosamine GlcNAc) transporter), member 3 [Mus musculus] RIKEN cDNA 2310050P13 [Mus musculus] >gi|26325360|dbj|BAC26434.1|

SEQ ID NO: 101702 - protein, 313 aa, Arabidopsis thaliana; identical to SEQ ID NO: 21560
  peptide (1)..(313): Ceres Seq. ID no. 13608510
  misc_feature (56)..(269): Pfam Name: Nucleotide-sugar transporter Pfam Description: Nucleotide-sugar transporter
  misc_feature (1)..(313): Homolog of NCBI NO: 18424900 NR Description: expressed protein [Arabidopsis thaliana]
  misc_feature (1)..(313): Homolog of NCBI NO: 18086579 NR Description: AT5g65000/MXK3_23 [Arabidopsis thaliana]
  misc_feature (52)..(313): Homolog of NCBI NO: 8843764 NR Description: gene_id:MXK3.23~ref|NP_036375.1~similar to
  misc_feature (9)..(300): Homolog of NCBI NO: 6912668 NR Description: solute carrier family 35 (UDP-N-acetylglucosamine
  misc_feature (9)..(300): Homolog of NCBI NO: 6136120 NR Description: UDP N-acetylglucosamine transporter (Golgi
  misc_feature (4)..(300): Homolog of NCBI NO: 22204205 NR Description: SI:bZ30I22.3 (novel protein similar to vertebrate
  misc_feature (9)..(300): Homolog of NCBI NO: 37725001 NR Description: solute carrier family 35 member 3 [Bos taurus]
  misc_feature (1)..(311): Homolog of NCBI NO: 38176083 NR Description: Hypothetical protein ZC250.3 [Caenorhabditis
  misc_feature (1)..(311): Homolog of NCBI NO: 39593097 NR Description: Hypothetical protein CBG09317 [Caenorhabditis
  misc_feature (9)..(300): Homolog of NCBI NO: 21450281 NR Description: solute carrier family 35 (UDP-N-acetylglucosamine GlcNAc) transporter), member 3 [Mus musculus] RIKEN cDNA 2310050P13 [Mus musculus] >gi|26325360|dbj|BAC26434.1|

SEQ ID NO: 101703 - DNA, 1841 bp, Arabidopsis thaliana
  misc_feature (1)..(1841): Ceres Seq. ID no. 13608521
  misc_feature: MA Experiment ID: 108435 Result: Down-regulated in Transcription
  misc_feature: MA Experiment 108435 PARAMETER Experiment Name: At_stm_Mutants_cDNA_P Parameter: Plant Line Value: wt Landsburg vs stm
  misc_feature: MA Experiment 108435 PARAMETER Experiment Name: At_stm_Mutants_cDNA_P Parameter: Tissue Value: Shoot Apical Meristem Region
  misc_feature: MA Experiment ID: 108462 Result: Down-regulated in Transcription
  misc_feature: MA Experiment 108462 PARAMETER Experiment Name: At_Germinating_Seeds_cDNA_P Parameter: Age (day) Value: 2 vs. 0
  misc_feature: MA Experiment 108462 PARAMETER Experiment Name: At_Germinating_Seeds_cDNA_P Parameter: Tissue Value: Germinating Seeds
  misc_feature: MA Experiment ID: 108463 Result: Down-regulated in Transcription
  misc_feature: MA Experiment 108463 PARAMETER Experiment Name: At_Germinating_Seeds_cDNA_P Parameter: Age (day) Value: 3 vs. 0
  misc_feature: MA Experiment 108463 PARAMETER Experiment Name: At_Germinating_Seeds_cDNA_P Parameter: Tissue Value: Germinating Seeds
  misc_feature: MA Experiment ID: 108464 Result: Down-regulated in Transcription
  misc_feature: MA Experiment 108464 PARAMETER Experiment Name: At_Germinating_Seeds_cDNA_P Parameter: Age (day) Value: 4 vs. 0
  misc_feature: MA Experiment 108464 PARAMETER Experiment Name: At_Germinating_Seeds_cDNA_P Parameter: Tissue Value: Germinating Seeds
  misc_feature: MA Experiment ID: 108573 Result: Up-regulated in Transcription
  misc_feature: MA Experiment 108573 PARAMETER Experiment Name: At_Drought_cDNA_P Parameter: Timepoint (hr) Value: 6
  misc_feature: MA Experiment 108573 PARAMETER Experiment Name: At_Drought_cDNA_P Parameter: Tissue Value: Aerial
  misc_feature: MA Experiment 108573 PARAMETER Experiment Name: At_Drought_cDNA_P Parameter: Treatment Value: Drought vs. No Drought
  misc_feature: MA Experiment ID: 108574 Result: Down-regulated in Transcription
  misc_feature: MA Experiment 108574 PARAMETER Experiment Name: At_Wounding__cDNA_P Parameter: Timepoint (hr) Value: 1
  misc_feature: MA Experiment 108574 PARAMETER Experiment Name: At_Wounding__cDNA_P Parameter: Tissue Value: Aerial
  misc_feature: MA Experiment 108574 PARAMETER Experiment Name: At_Wounding__cDNA_P Parameter: Treatment Value: Wounding vs. No Wounding
  misc_feature: MA Experiment ID: 108579 Result: Down-regulated in Transcription
  misc_feature: MA Experiment 108579 PARAMETER Experiment Name: At_4deg_Cold_cDNA_P Parameter: Temperature (deg C) Value: 4 vs. 22
  misc_feature: MA Experiment 108579 PARAMETER Experiment Name: At_4deg_Cold_cDNA_P Parameter: Timepoint (hr) Value: 6
  misc_feature: MA Experiment 108579 PARAMETER Experiment Name: At_4deg_Cold_cDNA_P Parameter: Tissue Value: Aerial
  misc_feature: MA Experiment ID: 20000069 Result: Up-regulated in Transcription
  misc_feature: MA Experiment 20000069 PARAMETER Experiment Name: At_100uM_ABA_Mutants_cDNA_P Parameter: Plant Line Value: CS23
  misc_feature: MA Experiment 20000069 PARAMETER Experiment Name: At_100uM_ABA_Mutants_cDNA_P Parameter: Timepoint (hr) Value: 6
  misc_feature: MA Experiment 20000069 PARAMETER Experiment Name: At_100uM_ABA_Mutants_cDNA_P Parameter: Tissue Value: Aerial
  misc_feature: MA Experiment 20000069 PARAMETER Experiment Name: At_100uM_ABA_Mutants_cDNA_P Parameter: Treatment Value: 100uM ABA vs. No Treatment
  misc_feature: MA Experiment ID: 20000070 Result: Up-regulated in Transcription
  misc_feature: MA Experiment 20000070 PARAMETER Experiment Name: At_100uM_ABA_Mutants_cDNA_P Parameter: Plant Line Value: CS24
  misc_feature: MA Experiment 20000070 PARAMETER Experiment Name: At_100uM_ABA_Mutants_cDNA_P Parameter: Timepoint (hr) Value: 6
  misc_feature: MA Experiment 20000070 PARAMETER Experiment Name: At_100uM_ABA_Mutants_cDNA_P Parameter: Tissue Value: Aerial
  misc_feature: MA Experiment 20000070 PARAMETER Experiment Name: At_100uM_ABA_Mutants_cDNA_P Parameter: Treatment Value: 100uM ABA vs. No Treatment
  misc_feature: MA Experiment ID: 20000071 Result: Up-regulated in Transcription
  misc_feature: MA Experiment 20000071 PARAMETER Experiment Name: At_100uM_ABA_Mutants_cDNA_P Parameter: Plant Line Value: CS8104
  misc_feature: MA Experiment 20000071 PARAMETER Experiment Name: At_100uM_ABA_Mutants_cDNA_P Parameter: Timepoint (hr) Value: 6
  misc_feature: MA Experiment 20000071 PARAMETER Experiment Name: At_100uM_ABA_Mutants_cDNA_P Parameter: Tissue Value: Aerial
  misc_feature: MA Experiment 20000071 PARAMETER Experiment Name: At_100uM_ABA_Mutants_cDNA_P Parameter: Treatment Value: 100uM ABA vs. No Treatment
  misc_feature: MA Experiment ID: 20000072 Result: Up-regulated in Transcription
  misc_feature: MA Experiment 20000072 PARAMETER Experiment Name: At_100uM_ABA_Mutants_cDNA_P Parameter: Plant Line Value: CS8105
  misc_feature: MA Experiment 20000072 PARAMETER Experiment Name: At_100uM_ABA_Mutants_cDNA_P Parameter: Timepoint (hr) Value: 6
  misc_feature: MA Experiment 20000072 PARAMETER Experiment Name: At_100uM_ABA_Mutants_cDNA_P Parameter: Tissue Value: Aerial
  misc_feature: MA Experiment 20000072 PARAMETER Experiment Name: At_100uM_ABA_Mutants_cDNA_P Parameter: Treatment Value: 100uM ABA vs. No Treatment
  misc_feature: MA Experiment ID: 20000086 Result: Up-regulated in Transcription
  misc_feature: MA Experiment 20000086 PARAMETER Experiment Name: At_100uM_ABA_Mutants_cDNA_P Parameter: Plant Line Value: CS22
  misc_feature: MA Experiment 20000086 PARAMETER Experiment Name: At_100uM_ABA_Mutants_cDNA_P Parameter: Timepoint (hr) Value: 6
  misc_feature: MA Experiment 20000086 PARAMETER Experiment Name: At_100uM_ABA_Mutants_cDNA_P Parameter: Tissue Value: Aerial
  misc_feature: MA Experiment 20000086 PARAMETER Experiment Name: At_100uM_ABA_Mutants_cDNA_P Parameter: Treatment Value: 100uM ABA vs. No Treatment
  misc_feature: MA Experiment ID: 20000088 Result: Up-regulated in Transcription
  misc_feature: MA Experiment 20000088 PARAMETER Experiment Name: At_100uM_ABA_Mutants_cDNA_P Parameter: Plant Line Value: Landsberg
  misc_feature: MA Experiment 20000088 PARAMETER Experiment Name: At_100uM_ABA_Mutants_cDNA_P Parameter: Timepoint (hr) Value: 6
  misc_feature: MA Experiment 20000088 PARAMETER Experiment Name: At_100uM_ABA_Mutants_cDNA_P Parameter: Tissue Value: Aerial
  misc_feature: MA Experiment 20000088 PARAMETER Experiment Name: At_100uM_ABA_Mutants_cDNA_P Parameter: Treatment Value: 100uM ABA vs. No Treatment
  misc_feature: MA Experiment ID: 20000089 Result: Up-regulated in Transcription
  misc_feature: MA Experiment ID: 20000117 Result: Up-regulated in Transcription
  misc_feature: MA Experiment 20000117 PARAMETER Experiment Name: At_100uM_ABA_Mutants_cDNA_P Parameter: Plant Line Value: Columbia
  misc_feature: MA Experiment 20000117 PARAMETER Experiment Name: At_100uM_ABA_Mutants_cDNA_P Parameter: Timepoint (hr) Value: 6
  misc_feature: MA Experiment 20000117 PARAMETER Experiment Name: At_100uM_ABA_Mutants_cDNA_P Parameter: Tissue Value: Aerial
  misc_feature: MA Experiment 20000117 PARAMETER Experiment Name: At_100uM_ABA_Mutants_cDNA_P Parameter: Treatment Value: 100uM ABA vs. No Treatment
  misc_feature: MA Experiment ID: 20000180 Result: Down-regulated in Transcription
  misc_feature: MA Experiment 20000180 PARAMETER Experiment Name: At_Germinating_Seeds_P Parameter: Age (hr) Value: 24 vs. 0
  misc_feature: MA Experiment 20000180 PARAMETER Experiment Name: At_Germinating_Seeds_P Parameter: Tissue Value: Germinating Seeds
  misc_feature: MA Experiment ID: 20000184 Result: Down-regulated in Transcription
  misc_feature: MA Experiment 20000184 PARAMETER Experiment Name: At_Shoots__P Parameter: Age (day) Value: 7
  misc_feature: MA Experiment 20000184 PARAMETER Experiment Name: At_Shoots__P Parameter: Tissue Value: Shoots vs. Whole Plant
  misc_feature: MA Experiment ID: 20000213 Result: Down-regulated in Transcription
  misc_feature: MA Experiment 20000213 PARAMETER Experiment Name: At_4deg_Cold_P Parameter: Timepoint (hr) Value: 2
  misc_feature: MA Experiment ID: 20000234 Result: Down-regulated in Transcription
  misc_feature: MA Experiment 20000234 PARAMETER Experiment Name: At_Siliques_P Parameter: Age (day) Value: 21
  misc_feature: MA Experiment 20000234 PARAMETER Experiment Name: At_Siliques_P Parameter: Organism Value: A. thaliana
  misc_feature: MA Experiment 20000234 PARAMETER Experiment Name: At_Siliques_P Parameter: Plant Line Value: WS
  misc_feature: MA Experiment 20000234 PARAMETER Experiment Name: At_Siliques_P Parameter: Tissue Value: Less Than 5mm Siliques vs. Whole Plant
  misc_feature: MA Experiment ID: 20000264 Result: Down-regulated in Transcription
  misc_feature: MA Experiment 20000264 PARAMETER Experiment Name: At_Open_Flower_P Parameter: Age (day) Value: 21
  misc_feature: MA Experiment 20000264 PARAMETER Experiment Name: At_Open_Flower_P Parameter: Plant Line Value: WS
  misc_feature: MA Experiment 20000264 PARAMETER Experiment Name: At_Open_Flower_P Parameter: Tissue Value: Open Flower vs. Whole Plant
  misc_feature: MA Experiment ID: 20000265 Result: Down-regulated in Transcription
  misc_feature: MA Experiment 20000265 PARAMETER Experiment Name: At_Open_Flower_P Parameter: Age (day) Value: 21
  misc_feature: MA Experiment 20000265 PARAMETER Experiment Name: At_Open_Flower_P Parameter: Plant Line Value: WS
  misc_feature: MA Experiment 20000265 PARAMETER Experiment Name: At_Open_Flower_P Parameter: Tissue Value: Closed Flower vs. Whole Plant
  misc_feature: MA Experiment ID: 20000286 Result: Down-regulated in Transcription
  misc_feature: MA Experiment 20000286 PARAMETER Experiment Name: At_Open_Flower_P Parameter: Age (day) Value: 21
  misc_feature: MA Experiment 20000286 PARAMETER Experiment Name: At_Open_Flower_P Parameter: Plant Line Value: WS
  misc_feature: MA Experiment 20000286 PARAMETER Experiment Name: At_Open_Flower_P Parameter: Tissue Value: Half Open vs. Whole Plant
  misc_feature: MA Experiment ID: 20000438 Result: Down-regulated in Transcription
  misc_feature: MA Experiment 20000438 PARAMETER Experiment Name: At_Shoots__P Parameter: Age (day) Value: 14
  misc_feature: MA Experiment 20000438 PARAMETER Experiment Name: At_Shoots__P Parameter: Tissue Value: Shoots vs. Whole Plant
  misc_feature: MA Experiment ID: 20000439 Result: Down-regulated in Transcription
  misc_feature: MA Experiment 20000439 PARAMETER Experiment Name: At_Roots__P Parameter: Age (day) Value: 14 vs. 21
  misc_feature: MA Experiment 20000439 PARAMETER Experiment Name: At_Roots__P Parameter: Organism Value: A. thaliana
  misc_feature: MA Experiment 20000439 PARAMETER Experiment Name: At_Roots__P Parameter: Tissue Value: Roots vs. Whole Plant
  misc_feature: MA Experiment ID: 20000441 Result: Up-regulated in Transcription
  misc_feature: MA Experiment 20000441 PARAMETER Experiment Name: At_1uM_BR-BRZ__P Parameter: Tissue Value: Shoot Apices
  misc_feature: MA Experiment 20000441 PARAMETER Experiment Name: At_1uM_BR-BRZ__P Parameter: Treatment Value: 1uM BR vs. No Treatment
  misc_feature: MA Experiment ID: 20000573 Result: Up-regulated in Transcription
  misc_feature: MA Experiment 20000573 PARAMETER Experiment Name: At_100uM_ABA_Mutants__P Parameter: Organism Value: A. thaliana
  misc_feature: MA Experiment 20000573 PARAMETER Experiment Name: At_100uM_ABA_Mutants__P Parameter: Plant Line Value: CS22 vs. Ler wt
  misc_feature: MA Experiment 20000573 PARAMETER Experiment Name: At_100uM_ABA_Mutants__P Parameter: Timepoint (hr) Value: N/A
  misc_feature: MA Experiment 20000573 PARAMETER Experiment Name: At_100uM_ABA_Mutants__P Parameter: Tissue Value: Whole Plant
  misc_feature: MA Experiment 20000573 PARAMETER Experiment Name: At_100uM_ABA_Mutants__P Parameter: Treatment Value: None
  misc_feature: MA Experiment ID: 20001450 Result: Up-regulated in Transcription
  misc_feature: MA Experiment 20001450 PARAMETER Experiment Name: At_Far-red-induction_P Parameter: Age (day) Value: 7
  misc_feature: MA Experiment 20001450 PARAMETER Experiment Name: At_Far-red-induction_P Parameter: Light Value: Far-red vs. White
  misc_feature: MA Experiment 20001450 PARAMETER Experiment Name: At_Far-red-induction_P Parameter: Organism Value: A. thaliana
  misc_feature: MA Experiment 20001450 PARAMETER Experiment Name: At_Far-red-induction_P Parameter: Plant Line Value: Columbia
  misc_feature: MA Experiment 20001450 PARAMETER Experiment Name: At_Far-red-induction_P Parameter: Timepoint (hr) Value: 8
  misc_feature: MA Experiment 20001450 PARAMETER Experiment Name: At_Far-red-induction_P Parameter: Tissue Value: Whole Plant
  misc_feature: MA Experiment ID: 20001451 Result: Up-regulated in Transcription
  misc_feature: MA Experiment 20001451 PARAMETER Experiment Name: At_Far-red-induction_P Parameter: Age (day) Value: 7
  misc_feature: MA Experiment 20001451 PARAMETER Experiment Name: At_Far-red-induction_P Parameter: Light Value: Far-red vs. White
  misc_feature: MA Experiment 20001451 PARAMETER Experiment Name: At_Far-red-induction_P Parameter: Organism Value: A. thaliana
  misc_feature: MA Experiment 20001451 PARAMETER Experiment Name: At_Far-red-induction_P Parameter: Plant Line Value: Columbia
  misc_feature: MA Experiment 20001451 PARAMETER Experiment Name: At_Far-red-induction_P Parameter: Timepoint (hr) Value: 24
  misc_feature: MA Experiment 20001451 PARAMETER Experiment Name: At_Far-red-induction_P Parameter: Tissue Value: Whole Plant
  misc_feature: MA Experiment ID: 20001557 Result: Down-regulated in Transcription
  misc_feature: MA Experiment 20001557 PARAMETER Experiment Name: At_Drought_Soil_Dry_P Parameter: Age (day) Value: 27
  misc_feature: MA Experiment 20001557 PARAMETER Experiment Name: At_Drought_Soil_Dry_P Parameter: Organism Value: A. thaliana
  misc_feature: MA Experiment 20001557 PARAMETER Experiment Name: At_Drought_Soil_Dry_P Parameter: Plant Line Value: WS
  misc_feature: MA Experiment 20001557 PARAMETER Experiment Name: At_Drought_Soil_Dry_P Parameter: Post Timepoint (hr) Value: 3
  misc_feature: MA Experiment 20001557 PARAMETER Experiment Name: At_Drought_Soil_Dry_P Parameter: Post-Treatment Value: Re-Water vs. No Drought
  misc_feature: MA Experiment 20001557 PARAMETER Experiment Name: At_Drought_Soil_Dry_P Parameter: Timepoint (day) Value: 13
  misc_feature: MA Experiment 20001557 PARAMETER Experiment Name: At_Drought_Soil_Dry_P Parameter: Treatment Value: Drought vs. No Drought
aatctctgtttgtatatatattatctttgcgatttttatccaaatcttccaaagcttagttttttttttttttcaatttctctcttgcgttttcgattttattacaagaactttgttttgggcttcatccatcgttcaaggttcgttgaaaactatgaagaaagttgagttttttatgctccttctctgcttcatcgcagcgtcatctctagtgtctgctgatccaccaacatgtcctgctgatttgggaggcaagtgtagtgattctgatgactggcaaggtgatttcttccctgaaatccccaagattaagtatgagggaccttcgagtaagaacccacttgcttacaggtggtataacgctgaagaagagattcttgggaagaaaatgaaggattggtttagattcagtgttgcgttttggcatactttccgtgggactggaggtgatccatttggtgctgctactaagtattggccttgggaagatggtactaactctgtgtctatggctaagagaagaatgagagctaactttgagttcttgaagaaacttggagttgattggtggtgttttcatgacagagacatagcacctgatggcactacacttgaggaatctaacaaaaacttggatgaagttatcgaactcgccaaagaactccaaaaggggagcaaaatcaaaccattgtggggaacagctcagcttttcttgcatcctcgttatatgcacggaggagcgaccagctctgaagttggagtgtatgcttacgctgctgctcaggtgaagaaagccatggaggtaacacattacttaggtggtgaaaactacgttttttggggtggtcgtgaaggttatcagacactcttgaacactgatatgggaagagagcttgatcatctagccaggttctttgaagctgctgttgcttacaagaagaagattggattcaaaggtaagtctactgcttctttttcttgtcctgtattcagtcttatgggagttattgcacaataatcttctttttatcaggcacgcttttaatcgagcccaagcctcaagaacccaccaagcaccagtatgactgggatgctgcaacagctgccaatttcttgaggaaatatggtcttattgatgagtttaagctcaacattgagtgtaaccatgccacgctctctggtcacacttgtcatcacgagcttgaaactgcaagaattaatggtttacttggcaacattgatgcaaacactggcgatgctcaaactggatgggatacagatcagtttcttacagatgttggagaagcaaccatggttatgatgagtgtcatcaaaaatggtgggattgctccaggcggcttcaactttgacgctaaactgcgaagagagagtacagacgtggaagacttattcattgctcatattagtggaatggatacaatggctcgtggactgagaaatgcagtcaaaatcttggaggagggaagtctaagtgaattggtacgcaagcgatatgcaacttgggactctgagcttgggaagcaaatagaagaaggaaaagctgattttgagtatcttgagaagaaagctaaagagtttggagaaccaaaggtttcttctgctaaacaggaactcgctgagatgattttccaatctgcaatgtaagaagaagaacaagaaggctttttatgtttattaaaagtatcgtcttttttagtttccctcgcatctttgagaagtttgaaaaccaaaacattggaaaataagatgattagagaggttggtttcattatttcagttgatgtactatggtttcacactctaattactttaaattgaat

SEQ ID NO: 101704 - protein, 338 aa, Arabidopsis thaliana
  peptide (1)..(338): Ceres Seq. ID no. 13608522
  misc_feature (121)..(319): Pfam Name: Xylose isomerase Pfam Description: Xylose isomerase
  misc_feature (52)..(319): Homolog of NCBI NO: 30696904 NR Description: expressed protein [Arabidopsis thaliana] expressed protein; supported by full length cDNA: Ceres: 122798 thaliana] >gi|30387571|gb|AAP31951.1| At5g57655 [Arabidopsis
  misc_feature (52)..(319): Homolog of NCBI NO: 21537178 NR Description: xylose isomerase [Arabidopsis thaliana]
  misc_feature (52)..(319): Homolog of NCBI NO: 17433690 NR Description: Xylose isomerase >gi|9758328|dbj|BAB08802.1|
  misc_feature (60)..(319): Homolog of NCBI NO: 34395196 NR Description: putative xylose isomerase [Oryza sativa (japonica
  misc_feature (60)..(319): Homolog of NCBI NO: 34899308 NR Description: putative xylose isomerase [Oryza sativa (japonica
  misc_feature (52)..(319): Homolog of NCBI NO: 6175480 NR Description: Xylose isomerase >gi|1296809|emb|CAA64545.1|
  misc_feature (52)..(319): Homolog of NCBI NO: 2130051 NR Description: xylose isomerase (EC 5.3.1.5) - barley xylose isomerase [Hordeum vulgare subsp. vulgare]
  misc_feature (52)..(338): Homolog of NCBI NO: 30696901 NR Description: expressed protein [Arabidopsis thaliana]
  misc_feature (95)..(320): Homolog of NCBI NO: 15644415 NR Description: xylose isomerase [Thermotoga maritima]
  misc_feature (95)..(320): Homolog of NCBI NO: 1175034 NR Description: Xylose isomerase >gi|625180|gb|AAB06798.1| xylose
ISVCIYIIFAIFIQIFQSLVFFFFQFLSCVFDFITRTLFWASSIVQGSLKTMKKVEFFMLLLCFIAASSLVSADPPTCPADLGGKCSDSDDWQGDFFPEIPKIKYEGPSSKNPLAYRWYNAEEEILGKKMKDWFRFSVAFWHTFRGTGGDPFGAATKYWPWEDGTNSVSMAKRRMRANFEFLKKLGVDWWCFHDRDIAPDGTTLEESNKNLDEVIELAKELQKGSKIKPLWGTAQLFLHPRYMHGGATSSEVGVYAYAAAQVKKAMEVTHYLGGENYVFWGGREGYQTLLNTDMGRELDHLARFFEAAVAYKKKIGFKGKSTASFSCPVFSLMGVIAQ

SEQ ID NO: 101705 - protein, 287 aa, Arabidopsis thaliana
  peptide (1)..(287): Ceres Seq. ID no. 13608523
  misc_feature (70)..(268): Pfam Name: Xylose isomerase Pfam Description: Xylose isomerase
  misc_feature (1)..(268): Homolog of NCBI NO: 30696904 NR Description: expressed protein [Arabidopsis thaliana] expressed protein; supported by full length cDNA: Ceres: 122798 thaliana] >gi|30387571|gb|AAP31951.1| At5g57655 [Arabidopsis
  misc_feature (1)..(268): Homolog of NCBI NO: 21537178 NR Description: xylose isomerase [Arabidopsis thaliana]
  misc_feature (1)..(268): Homolog of NCBI NO: 17433690 NR Description: Xylose isomerase >gi|9758328|dbj|BAB08802.1|
  misc_feature (9)..(268): Homolog of NCBI NO: 34395196 NR Description: putative xylose isomerase [Oryza sativa (japonica
  misc_feature (9)..(268): Homolog of NCBI NO: 34899308 NR Description: putative xylose isomerase [Oryza sativa (japonica
  misc_feature (1)..(268): Homolog of NCBI NO: 6175480 NR Description: Xylose isomerase >gi|1296809|emb|CAA64545.1|
  misc_feature (1)..(268): Homolog of NCBI NO: 2130051 NR Description: xylose isomerase (EC 5.3.1.5) - barley xylose isomerase [Hordeum vulgare subsp. vulgare]
  misc_feature (1)..(287): Homolog of NCBI NO: 30696901 NR Description: expressed protein [Arabidopsis thaliana]
  misc_feature (44)..(269): Homolog of NCBI NO: 15644415 NR Description: xylose isomerase [Thermotoga maritima]
  misc_feature (44)..(269): Homolog of NCBI NO: 1175034 NR Description: Xylose isomerase >gi|625180|gb|AAB06798.1| xylose
MKKVEFFMLLLCFIAASSLVSADPPTCPADLGGKCSDSDDWQGDFFPEIPKIKYEGPSSKNPLAYRWYNAEEEILGKKMKDWFRFSVAFWHTFRGTGGDPFGAATKYWPWEDGTNSVSMAKRRMRANFEFLKKLGVDWWCFHDRDIAPDGTTLEESNKNLDEVIELAKELQKGSKIKPLWGTAQLFLHPRYMHGGATSSEVGVYAYAAAQVKKAMEVTHYLGGENYVFWGGREGYQTLLNTDMGRELDHLARFFEAAVAYKKKIGFKGKSTASFSCPVFSLMGVIAQ

SEQ ID NO: 101706 - protein, 280 aa, Arabidopsis thaliana
  peptide (1)..(280): Ceres Seq. ID no. 13608524
  misc_feature (63)..(261): Pfam Name: Xylose isomerase Pfam Description: Xylose isomerase
  misc_feature (1)..(261): Homolog of NCBI NO: 30696904 NR Description: expressed protein [Arabidopsis thaliana] expressed protein; supported by full length cDNA: Ceres: 122798 thaliana] >gi|30387571|gb|AAP31951.1| At5g57655 [Arabidopsis
  misc_feature (1)..(261): Homolog of NCBI NO: 21537178 NR Description: xylose isomerase [Arabidopsis thaliana]
  misc_feature (1)..(261): Homolog of NCBI NO: 17433690 NR Description: Xylose isomerase >gi|9758328|dbj|BAB08802.1|
  misc_feature (2)..(261): Homolog of NCBI NO: 34395196 NR Description: putative xylose isomerase [Oryza sativa (japonica
  misc_feature (2)..(261): Homolog of NCBI NO: 34899308 NR Description: putative xylose isomerase [Oryza sativa (japonica
  misc_feature (1)..(261): Homolog of NCBI NO: 6175480 NR Description: Xylose isomerase >gi|1296809|emb|CAA64545.1|
  misc_feature (1)..(261): Homolog of NCBI NO: 2130051 NR Description: xylose isomerase (EC 5.3.1.5) - barley xylose isomerase [Hordeum vulgare subsp. vulgare]
  misc_feature (1)..(280): Homolog of NCBI NO: 30696901 NR Description: expressed protein [Arabidopsis thaliana]
  misc_feature (37)..(262): Homolog of NCBI NO: 15644415 NR Description: xylose isomerase [Thermotoga maritima]
  misc_feature (37)..(262): Homolog of NCBI NO: 1175034 NR Description: Xylose isomerase >gi|625180|gb|AAB06798.1| xylose
MLLLCFIAASSLVSADPPTCPADLGGKCSDSDDWQGDFFPEIPKIKYEGPSSKNPLAYRWYNAEEEILGKKMKDWFRFSVAFWHTFRGTGGDPFGAATKYWPWEDGTNSVSMAKRRMRANFEFLKKLGVDWWCFHDRDIAPDGTTLEESNKNLDEVIELAKELQKGSKIKPLWGTAQLFLHPRYMHGGATSSEVGVYAYAAAQVKKAMEVTHYLGGENYVFWGGREGYQTLLNTDMGRELDHLARFFEAAVAYKKKIGFKGKSTASFSCPVFSLMGVIAQ

SEQ ID NO: 101707 - DNA, 1900 bp, Arabidopsis thaliana
  misc_feature (1)..(1900): Ceres Seq. ID no. 13608525
  misc_feature: MA Experiment ID: 108435 Result: Down-regulated in Transcription
  misc_feature: MA Experiment 108435 PARAMETER Experiment Name: At_stm_Mutants_cDNA_P Parameter: Plant Line Value: wt Landsburg vs stm
  misc_feature: MA Experiment 108435 PARAMETER Experiment Name: At_stm_Mutants_cDNA_P Parameter: Tissue Value: Shoot Apical Meristem Region
  misc_feature: MA Experiment ID: 108462 Result: Down-regulated in Transcription
  misc_feature: MA Experiment 108462 PARAMETER Experiment Name: At_Germinating_Seeds_cDNA_P Parameter: Age (day) Value: 2 vs. 0
  misc_feature: MA Experiment 108462 PARAMETER Experiment Name: At_Germinating_Seeds_cDNA_P Parameter: Tissue Value: Germinating Seeds
  misc_feature: MA Experiment ID: 108463 Result: Down-regulated in Transcription
  misc_feature: MA Experiment 108463 PARAMETER Experiment Name: At_Germinating_Seeds_cDNA_P Parameter: Age (day) Value: 3 vs. 0
  misc_feature: MA Experiment 108463 PARAMETER Experiment Name: At_Germinating_Seeds_cDNA_P Parameter: Tissue Value: Germinating Seeds
  misc_feature: MA Experiment ID: 108464 Result: Down-regulated in Transcription
  misc_feature: MA Experiment 108464 PARAMETER Experiment Name: At_Germinating_Seeds_cDNA_P Parameter: Age (day) Value: 4 vs. 0
  misc_feature: MA Experiment 108464 PARAMETER Experiment Name: At_Germinating_Seeds_cDNA_P Parameter: Tissue Value: Germinating Seeds
  misc_feature: MA Experiment ID: 108561 Result: Up-regulated in Transcription
  misc_feature: MA Experiment 108561 PARAMETER Experiment Name: At_100uM_ABA_cDNA_P Parameter: Timepoint (hr) Value: 6
  misc_feature: MA Experiment 108561 PARAMETER Experiment Name: At_100uM_ABA_cDNA_P Parameter: Tissue Value: Aerial
  misc_feature: MA Experiment 108561 PARAMETER Experiment Name: At_100uM_ABA_cDNA_P Parameter: Treatment Value: 100uM ABA vs. No Treatment
  misc_feature: MA Experiment ID: 108573 Result: Up-regulated in Transcription
  misc_feature: MA Experiment 108573 PARAMETER Experiment Name: At_Drought_cDNA_P Parameter: Timepoint (hr) Value: 6
  misc_feature: MA Experiment 108573 PARAMETER Experiment Name: At_Drought_cDNA_P Parameter: Tissue Value: Aerial
  misc_feature: MA Experiment 108573 PARAMETER Experiment Name: At_Drought_cDNA_P Parameter: Treatment Value: Drought vs. No Drought
  misc_feature: MA Experiment ID: 108574 Result: Down-regulated in Transcription
  misc_feature: MA Experiment 108574 PARAMETER Experiment Name: At_Wounding__cDNA_P Parameter: Timepoint (hr) Value: 1
  misc_feature: MA Experiment 108574 PARAMETER Experiment Name: At_Wounding__cDNA_P Parameter: Tissue Value: Aerial
  misc_feature: MA Experiment 108574 PARAMETER Experiment Name: At_Wounding__cDNA_P Parameter: Treatment Value: Wounding vs. No Wounding
  misc_feature: MA Experiment ID: 108579 Result: Down-regulated in Transcription
  misc_feature: MA Experiment 108579 PARAMETER Experiment Name: At_4deg_Cold_cDNA_P Parameter: Temperature (deg C) Value: 4 vs. 22
  misc_feature: MA Experiment 108579 PARAMETER Experiment Name: At_4deg_Cold_cDNA_P Parameter: Timepoint (hr) Value: 6
  misc_feature: MA Experiment 108579 PARAMETER Experiment Name: At_4deg_Cold_cDNA_P Parameter: Tissue Value: Aerial
  misc_feature: MA Experiment ID: 20000071 Result: Up-regulated in Transcription
  misc_feature: MA Experiment 20000071 PARAMETER Experiment Name: At_100uM_ABA_Mutants_cDNA_P Parameter: Plant Line Value: CS8104
  misc_feature: MA Experiment 20000071 PARAMETER Experiment Name: At_100uM_ABA_Mutants_cDNA_P Parameter: Timepoint (hr) Value: 6
  misc_feature: MA Experiment 20000071 PARAMETER Experiment Name: At_100uM_ABA_Mutants_cDNA_P Parameter: Tissue Value: Aerial
  misc_feature: MA Experiment 20000071 PARAMETER Experiment Name: At_100uM_ABA_Mutants_cDNA_P Parameter: Treatment Value: 100uM ABA vs. No Treatment
  misc_feature: MA Experiment ID: 20000072 Result: Up-regulated in Transcription
  misc_feature: MA Experiment 20000072 PARAMETER Experiment Name: At_100uM_ABA_Mutants_cDNA_P Parameter: Plant Line Value: CS8105
  misc_feature: MA Experiment 20000072 PARAMETER Experiment Name: At_100uM_ABA_Mutants_cDNA_P Parameter: Timepoint (hr) Value: 6
  misc_feature: MA Experiment 20000072 PARAMETER Experiment Name: At_100uM_ABA_Mutants_cDNA_P Parameter: Tissue Value: Aerial
  misc_feature: MA Experiment 20000072 PARAMETER Experiment Name: At_100uM_ABA_Mutants_cDNA_P Parameter: Treatment Value: 100uM ABA vs. No Treatment
  misc_feature: MA Experiment ID: 20000087 Result: Up-regulated in Transcription
  misc_feature: MA Experiment 20000087 PARAMETER Experiment Name: At_100uM_ABA_Mutants_cDNA_P Parameter: Plant Line Value: WS
  misc_feature: MA Experiment 20000087 PARAMETER Experiment Name: At_100uM_ABA_Mutants_cDNA_P Parameter: Timepoint (hr) Value: 6
  misc_feature: MA Experiment 20000087 PARAMETER Experiment Name: At_100uM_ABA_Mutants_cDNA_P Parameter: Tissue Value: Aerial
  misc_feature: MA Experiment 20000087 PARAMETER Experiment Name: At_100uM_ABA_Mutants_cDNA_P Parameter: Treatment Value: 100uM ABA vs. No Treatment
  misc_feature: MA Experiment ID: 20000111 Result: Up-regulated in Transcription
  misc_feature: MA Experiment 20000111 PARAMETER Experiment Name: At_42deg_Heat_cDNA_P Parameter: Temperature (deg C) Value: 42 vs. 22
  misc_feature: MA Experiment 20000111 PARAMETER Experiment Name: At_42deg_Heat_cDNA_P Parameter: Timepoint (hr) Value: 6
  misc_feature: MA Experiment 20000111 PARAMETER Experiment Name: At_42deg_Heat_cDNA_P Parameter: Tissue Value: Aerial
  misc_feature: MA Experiment ID: 20000112 Result: Up-regulated in Transcription
  misc_feature: MA Experiment 20000112 PARAMETER Experiment Name: At_42deg_Heat_cDNA_P Parameter: Temperature (deg C) Value: 42 vs. 22
  misc_feature: MA Experiment 20000112 PARAMETER Experiment Name: At_42deg_Heat_cDNA_P Parameter: Timepoint (hr) Value: 2
  misc_feature: MA Experiment 20000112 PARAMETER Experiment Name: At_42deg_Heat_cDNA_P Parameter: Tissue Value: Aerial
  misc_feature: MA Experiment ID: 20000113 Result: Up-regulated in Transcription
  misc_feature: MA Experiment 20000113 PARAMETER Experiment Name: At_42deg_Heat_cDNA_P Parameter: Temperature (deg C) Value: 42 vs. 22
  misc_feature: MA Experiment 20000113 PARAMETER Experiment Name: At_42deg_Heat_cDNA_P Parameter: Timepoint (hr) Value: 8
  misc_feature: MA Experiment 20000113 PARAMETER Experiment Name: At_42deg_Heat_cDNA_P Parameter: Tissue Value: Aerial
  misc_feature: MA Experiment ID: 20000117 Result: Up-regulated in Transcription
  misc_feature: MA Experiment 20000117 PARAMETER Experiment Name: At_100uM_ABA_Mutants_cDNA_P Parameter: Plant Line Value: Columbia
  misc_feature: MA Experiment 20000117 PARAMETER Experiment Name: At_100uM_ABA_Mutants_cDNA_P Parameter: Timepoint (hr) Value: 6
  misc_feature: MA Experiment 20000117 PARAMETER Experiment Name: At_100uM_ABA_Mutants_cDNA_P Parameter: Tissue Value: Aerial
  misc_feature: MA Experiment 20000117 PARAMETER Experiment Name: At_100uM_ABA_Mutants_cDNA_P Parameter: Treatment Value: 100uM ABA vs. No Treatment
  misc_feature: MA Experiment ID: 20000180 Result: Down-regulated in Transcription
  misc_feature: MA Experiment 20000180 PARAMETER Experiment Name: At_Germinating_Seeds_P Parameter: Age (hr) Value: 24 vs. 0
  misc_feature: MA Experiment 20000180 PARAMETER Experiment Name: At_Germinating_Seeds_P Parameter: Tissue Value: Germinating Seeds
  misc_feature: MA Experiment ID: 20000184 Result: Down-regulated in Transcription
  misc_feature: MA Experiment 20000184 PARAMETER Experiment Name: At_Shoots__P Parameter: Age (day) Value: 7
  misc_feature: MA Experiment 20000184 PARAMETER Experiment Name: At_Shoots__P Parameter: Tissue Value: Shoots vs. Whole Plant
  misc_feature: MA Experiment ID: 20000213 Result: Down-regulated in Transcription
  misc_feature: MA Experiment 20000213 PARAMETER Experiment Name: At_4deg_Cold_P Parameter: Timepoint (hr) Value: 2
  misc_feature: MA Experiment ID: 20000234 Result: Down-regulated in Transcription
  misc_feature: MA Experiment 20000234 PARAMETER Experiment Name: At_Siliques_P Parameter: Age (day) Value: 21
  misc_feature: MA Experiment 20000234 PARAMETER Experiment Name: At_Siliques_P Parameter: Organism Value: A. thaliana
  misc_feature: MA Experiment 20000234 PARAMETER Experiment Name: At_Siliques_P Parameter: Plant Line Value: WS
  misc_feature: MA Experiment 20000234 PARAMETER Experiment Name: At_Siliques_P Parameter: Tissue Value: Less Than 5mm Siliques vs. Whole Plant
  misc_feature: MA Experiment ID: 20000264 Result: Down-regulated in Transcription
  misc_feature: MA Experiment 20000264 PARAMETER Experiment Name: At_Open_Flower_P Parameter: Age (day) Value: 21
  misc_feature: MA Experiment 20000264 PARAMETER Experiment Name: At_Open_Flower_P Parameter: Plant Line Value: WS
  misc_feature: MA Experiment 20000264 PARAMETER Experiment Name: At_Open_Flower_P Parameter: Tissue Value: Open Flower vs. Whole Plant
  misc_feature: MA Experiment ID: 20000265 Result: Down-regulated in Transcription
  misc_feature: MA Experiment 20000265 PARAMETER Experiment Name: At_Open_Flower_P Parameter: Age (day) Value: 21
  misc_feature: MA Experiment 20000265 PARAMETER Experiment Name: At_Open_Flower_P Parameter: Plant Line Value: WS
  misc_feature: MA Experiment 20000265 PARAMETER Experiment Name: At_Open_Flower_P Parameter: Tissue Value: Closed Flower vs. Whole Plant
  misc_feature: MA Experiment ID: 20000286 Result: Down-regulated in Transcription
  misc_feature: MA Experiment 20000286 PARAMETER Experiment Name: At_Open_Flower_P Parameter: Age (day) Value: 21
  misc_feature: MA Experiment 20000286 PARAMETER Experiment Name: At_Open_Flower_P Parameter: Plant Line Value: WS
  misc_feature: MA Experiment 20000286 PARAMETER Experiment Name: At_Open_Flower_P Parameter: Tissue Value: Half Open vs. Whole Plant
  misc_feature: MA Experiment ID: 20000438 Result: Down-regulated in Transcription
  misc_feature: MA Experiment 20000438 PARAMETER Experiment Name: At_Shoots__P Parameter: Age (day) Value: 14
  misc_feature: MA Experiment 20000438 PARAMETER Experiment Name: At_Shoots__P Parameter: Tissue Value: Shoots vs. Whole Plant
  misc_feature: MA Experiment ID: 20000439 Result: Down-regulated in Transcription
  misc_feature: MA Experiment 20000439 PARAMETER Experiment Name: At_Roots__P Parameter: Age (day) Value: 14 vs. 21
  misc_feature: MA Experiment 20000439 PARAMETER Experiment Name: At_Roots__P Parameter: Organism Value: A. thaliana
  misc_feature: MA Experiment 20000439 PARAMETER Experiment Name: At_Roots__P Parameter: Tissue Value: Roots vs. Whole Plant
  misc_feature: MA Experiment ID: 20000441 Result: Up-regulated in Transcription
  misc_feature: MA Experiment 20000441 PARAMETER Experiment Name: At_1uM_BR-BRZ__P Parameter: Tissue Value: Shoot Apices
  misc_feature: MA Experiment 20000441 PARAMETER Experiment Name: At_1uM_BR-BRZ__P Parameter: Treatment Value: 1uM BR vs. No Treatment
  misc_feature: MA Experiment ID: 20000573 Result: Up-regulated in Transcription
  misc_feature: MA Experiment 20000573 PARAMETER Experiment Name: At_100uM_ABA_Mutants__P Parameter: Organism Value: A. thaliana
  misc_feature: MA Experiment 20000573 PARAMETER Experiment Name: At_100uM_ABA_Mutants__P Parameter: Plant Line Value: CS22 vs. Ler wt
  misc_feature: MA Experiment 20000573 PARAMETER Experiment Name: At_100uM_ABA_Mutants__P Parameter: Timepoint (hr) Value: N/A
  misc_feature: MA Experiment 20000573 PARAMETER Experiment Name: At_100uM_ABA_Mutants__P Parameter: Tissue Value: Whole Plant
  misc_feature: MA Experiment 20000573 PARAMETER Experiment Name: At_100uM_ABA_Mutants__P Parameter: Treatment Value: None
  misc_feature: MA Experiment ID: 20001450 Result: Up-regulated in Transcription
  misc_feature: MA Experiment 20001450 PARAMETER Experiment Name: At_Far-red-induction_P Parameter: Age (day) Value: 7
  misc_feature: MA Experiment 20001450 PARAMETER Experiment Name: At_Far-red-induction_P Parameter: Light Value: Far-red vs. White
  misc_feature: MA Experiment 20001450 PARAMETER Experiment Name: At_Far-red-induction_P Parameter: Organism Value: A. thaliana
  misc_feature: MA Experiment 20001450 PARAMETER Experiment Name: At_Far-red-induction_P Parameter: Plant Line Value: Columbia
  misc_feature: MA Experiment 20001450 PARAMETER Experiment Name: At_Far-red-induction_P Parameter: Timepoint (hr) Value: 8
  misc_feature: MA Experiment 20001450 PARAMETER Experiment Name: At_Far-red-induction_P Parameter: Tissue Value: Whole Plant
  misc_feature: MA Experiment ID: 20001451 Result: Up-regulated in Transcription
  misc_feature: MA Experiment 20001451 PARAMETER Experiment Name: At_Far-red-induction_P Parameter: Age (day) Value: 7
  misc_feature: MA Experiment 20001451 PARAMETER Experiment Name: At_Far-red-induction_P Parameter: Light Value: Far-red vs. White
  misc_feature: MA Experiment 20001451 PARAMETER Experiment Name: At_Far-red-induction_P Parameter: Organism Value: A. thaliana
  misc_feature: MA Experiment 20001451 PARAMETER Experiment Name: At_Far-red-induction_P Parameter: Plant Line Value: Columbia
  misc_feature: MA Experiment 20001451 PARAMETER Experiment Name: At_Far-red-induction_P Parameter: Timepoint (hr) Value: 24
  misc_feature: MA Experiment 20001451 PARAMETER Experiment Name: At_Far-red-induction_P Parameter: Tissue Value: Whole Plant
  misc_feature: MA Experiment ID: 20001557 Result: Down-regulated in Transcription
  misc_feature: MA Experiment 20001557 PARAMETER Experiment Name: At_Drought_Soil_Dry_P Parameter: Age (day) Value: 27
  misc_feature: MA Experiment 20001557 PARAMETER Experiment Name: At_Drought_Soil_Dry_P Parameter: Organism Value: A. thaliana
  misc_feature: MA Experiment 20001557 PARAMETER Experiment Name: At_Drought_Soil_Dry_P Parameter: Plant Line Value: WS
  misc_feature: MA Experiment 20001557 PARAMETER Experiment Name: At_Drought_Soil_Dry_P Parameter: Post Timepoint (hr) Value: 3
  misc_feature: MA Experiment 20001557 PARAMETER Experiment Name: At_Drought_Soil_Dry_P Parameter: Post-Treatment Value: Re-Water vs. No Drought
  misc_feature: MA Experiment 20001557 PARAMETER Experiment Name: At_Drought_Soil_Dry_P Parameter: Timepoint (day) Value: 13
  misc_feature: MA Experiment 20001557 PARAMETER Experiment Name: At_Drought_Soil_Dry_P Parameter: Treatment Value: Drought vs. No Drought
aaggggcaaaactgaaaatcacacaaaaacaaacaaaactttgcttacgtcacatcattatctgtgactaattcttaatcatcatcatcatcatcacttacttaaatctaaaaaaatctctgtttgtatatatattatctttgcgatttttatccaaatcttccaaagcttagttttttttttttttcaatttctctcttgcgttttcgattttattacaagaactttgttttgggcttcatccatcgttcaaggttcgttgaaaactatgaagaaagttgagttttttatgctccttctctgcttcatcgcagcgtcatctctagtgtctgctgatccaccaacatgtcctgctgatttgggaggcaagtgtagtgattctgatgactggcaaggtgatttcttccctgaaatccccaagattaagtatgagggaccttcgagtaagaacccacttgcttacaggtggtataacgctgaagaagagattcttgggaagaaaatgaaggattggtttagattcagtgttgcgttttggcatactttccgtgggactggaggtgatccatttggtgctgctactaagtattggccttgggaagatggtactaactctgtgtctatggctaagagaagaatgagagctaactttgagttcttgaagaaacttggagttgattggtggtgttttcatgacagagacatagcacctgatggcactacacttgaggaatctaacaaaaacttggatgaagttatcgaactcgccaaagaactccaaaaggggagcaaaatcaaaccattgtggggaacagctcagcttttcttgcatcctcgttatatgcacggaggagcgaccagctctgaagttggagtgtatgcttacgctgctgctcaggtgaagaaagccatggaggtaacacattacttaggtggtgaaaactacgttttttggggtggtcgtgaaggttatcagacactcttgaacactgatatgggaagagagcttgatcatctagccaggttctttgaagctgctgttgcttacaagaagaagattggattcaaaggcacgcttttaatcgagcccaagcctcaagaacccaccaagcaccagtatgactgggatgctgcaacagctgccaatttcttgaggaaatatggtcttattgatgagtttaagctcaacattgagtgtaaccatgccacgctctctggtcacacttgtcatcacgagcttgaaactgcaagaattaatggtttacttggcaacattgatgcaaacactggcgatgctcaaactggatgggatacagatcagtttcttacagatgttggagaagcaaccatggttatgatgagtgtcatcaaaaatggtgggattgctccaggcggcttcaactttgacgctaaactgcgaagagagagtacagacgtggaagacttattcattgctcatattagtggaatggatacaatggctcgtggactgagaaatgcagtcaaaatcttggaggagggaagtctaagtgaattggtacgcaagcgatatgcaacttgggactctgagcttgggaagcaaatagaagaaggaaaagctgattttgagtatcttgagaagaaagctaaagagtttggagaaccaaaggtttcttctgctaaacaggaactcgctgagatgattttccaatctgcaatgtaagaagaagaacaagaaggctttttatgtttattaaaagtatcgtcttttttagtttccctcgcatctttgagaagtttgaaaaccaaaacattggaaaataagatgattagagaggttggtttcattatttcagttgatgtactatggtttcacactctaattactttaaattgaataacaaaaaactgtttaggcctt

SEQ ID NO: 101708 - protein, 477 aa, Arabidopsis thaliana; identical to SEQ ID NO: 41662
  peptide (1)..(477): Ceres Seq. ID no. 13608526
  misc_feature (70)..(466): Pfam Name: Xylose isomerase Pfam Description: Xylose isomerase
  misc_feature (1)..(477): Homolog of NCBI NO: 30696904 NR Description: expressed protein [Arabidopsis thaliana] expressed protein; supported by full length cDNA: Ceres: 122798 thaliana] >gi|30387571|gb|AAP31951.1| At5g57655 [Arabidopsis
  misc_feature (1)..(477): Homolog of NCBI NO: 21537178 NR Description: xylose isomerase [Arabidopsis thaliana]
  misc_feature (1)..(466): Homolog of NCBI NO: 17433690 NR Description: Xylose isomerase >gi|9758328|dbj|BAB08802.1|
  misc_feature (9)..(477): Homolog of NCBI NO: 34395196 NR Description: putative xylose isomerase [Oryza sativa (japonica
  misc_feature (1)..(477): Homolog of NCBI NO: 6175480 NR Description: Xylose isomerase >gi|1296809|emb|CAA64545.1|
  misc_feature (1)..(477): Homolog of NCBI NO: 2130051 NR Description: xylose isomerase (EC 5.3.1.5) - barley xylose isomerase [Hordeum vulgare subsp. vulgare]
  misc_feature (1)..(268): Homolog of NCBI NO: 30696901 NR Description: expressed protein [Arabidopsis thaliana]
  misc_feature (44)..(475): Homolog of NCBI NO: 15644415 NR Description: xylose isomerase [Thermotoga maritima]
  misc_feature (44)..(475): Homolog of NCBI NO: 1175034 NR Description: Xylose isomerase >gi|625180|gb|AAB06798.1| xylose
  misc_feature (44)..(475): Homolog of NCBI NO: 3319057 NR Description: Chain A, Xylose Isomerase From Thermotoga >gi|3319058|pdb|1A0E|D Chain D, Xylose Isomerase From Thermotoga

SEQ ID NO: 101709 - protein, 470 aa, Arabidopsis thaliana; identical to SEQ ID NO: 41663
  peptide (1)..(470): Ceres Seq. ID no. 13608527
  misc_feature (63)..(459): Pfam Name: Xylose isomerase Pfam Description: Xylose isomerase
  misc_feature (1)..(470): Homolog of NCBI NO: 30696904 NR Description: expressed protein [Arabidopsis thaliana] expressed protein; supported by full length cDNA: Ceres: 122798 thaliana] >gi|30387571|gb|AAP31951.1| At5g57655 [Arabidopsis
  misc_feature (1)..(470): Homolog of NCBI NO: 21537178 NR Description: xylose isomerase [Arabidopsis thaliana]
  misc_feature (1)..(459): Homolog of NCBI NO: 17433690 NR Description: Xylose isomerase >gi|9758328|dbj|BAB08802.1|
  misc_feature (2)..(470): Homolog of NCBI NO: 34395196 NR Description: putative xylose isomerase [Oryza sativa (japonica
  misc_feature (1)..(470): Homolog of NCBI NO: 6175480 NR Description: Xylose isomerase >gi|1296809|emb|CAA64545.1|
  misc_feature (1)..(470): Homolog of NCBI NO: 2130051 NR Description: xylose isomerase (EC 5.3.1.5) - barley xylose isomerase [Hordeum vulgare subsp. vulgare]
  misc_feature (1)..(261): Homolog of NCBI NO: 30696901 NR Description: expressed protein [Arabidopsis thaliana]
  misc_feature (37)..(468): Homolog of NCBI NO: 15644415 NR Description: xylose isomerase [Thermotoga maritima]
  misc_feature (37)..(468): Homolog of NCBI NO: 1175034 NR Description: Xylose isomerase >gi|625180|gb|AAB06798.1| xylose
  misc_feature (37)..(468): Homolog of NCBI NO: 3319057 NR Description: Chain A, Xylose Isomerase From Thermotoga >gi|3319058|pdb|1A0E|D Chain D, Xylose Isomerase From Thermotoga

SEQ ID NO: 101710 - protein, 399 aa, Arabidopsis thaliana; identical to SEQ ID NO: 41664
  peptide (1)..(399): Ceres Seq. ID no. 13608528
  misc_feature (1)..(388): Pfam Name: Xylose isomerase Pfam Description: Xylose isomerase
  misc_feature (1)..(399): Homolog of NCBI NO: 30696904 NR Description: expressed protein [Arabidopsis thaliana] expressed protein; supported by full length cDNA: Ceres: 122798 thaliana] >gi|30387571|gb|AAP31951.1| At5g57655 [Arabidopsis
  misc_feature (1)..(399): Homolog of NCBI NO: 21537178 NR Description: xylose isomerase [Arabidopsis thaliana]
  misc_feature (1)..(388): Homolog of NCBI NO: 17433690 NR Description: Xylose isomerase >gi|9758328|dbj|BAB08802.1|
  misc_feature (1)..(399): Homolog of NCBI NO: 34395196 NR Description: putative xylose isomerase [Oryza sativa (japonica
  misc_feature (1)..(399): Homolog of NCBI NO: 6175480 NR Description: Xylose isomerase >gi|1296809|emb|CAA64545.1|
  misc_feature (1)..(399): Homolog of NCBI NO: 2130051 NR Description: xylose isomerase (EC 5.3.1.5) - barley xylose isomerase [Hordeum vulgare subsp. vulgare]
  misc_feature (1)..(190): Homolog of NCBI NO: 30696901 NR Description: expressed protein [Arabidopsis thaliana]
  misc_feature (1)..(397): Homolog of NCBI NO: 15644415 NR Description: xylose isomerase [Thermotoga maritima]
  misc_feature (1)..(397): Homolog of NCBI NO: 1175034 NR Description: Xylose isomerase >gi|625180|gb|AAB06798.1| xylose
  misc_feature (1)..(397): Homolog of NCBI NO: 3319057 NR Description: Chain A, Xylose Isomerase From Thermotoga >gi|3319058|pdb|1A0E|D Chain D, Xylose Isomerase From Thermotoga

SEQ ID NO: 101711 - DNA, 1369 bp, Arabidopsis thaliana
  misc_feature (1)..(1369): Ceres Seq. ID no. 13608532
  misc_feature: MA Experiment ID: 108461 Result: Up-regulated in Transcription
  misc_feature: MA Experiment 108461 PARAMETER Experiment Name: At_Germinating_Seeds_cDNA_P Parameter: Age (day) Value: 1 vs. 0
  misc_feature: MA Experiment 108461 PARAMETER Experiment Name: At_Germinating_Seeds_cDNA_P Parameter: Tissue Value: Germinating Seeds
  misc_feature: MA Experiment ID: 108462 Result: Up-regulated in Transcription
  misc_feature: MA Experiment 108462 PARAMETER Experiment Name: At_Germinating_Seeds_cDNA_P Parameter: Age (day) Value: 2 vs. 0
  misc_feature: MA Experiment 108462 PARAMETER Experiment Name: At_Germinating_Seeds_cDNA_P Parameter: Tissue Value: Germinating Seeds
  misc_feature: MA Experiment ID: 108463 Result: Up-regulated in Transcription
  misc_feature: MA Experiment 108463 PARAMETER Experiment Name: At_Germinating_Seeds_cDNA_P Parameter: Age (day) Value: 3 vs. 0
  misc_feature: MA Experiment 108463 PARAMETER Experiment Name: At_Germinating_Seeds_cDNA_P Parameter: Tissue Value: Germinating Seeds
  misc_feature: MA Experiment ID: 108561 Result: Down-regulated in Transcription
  misc_feature: MA Experiment 108561 PARAMETER Experiment Name: At_100uM_ABA_cDNA_P Parameter: Timepoint (hr) Value: 6
  misc_feature: MA Experiment 108561 PARAMETER Experiment Name: At_100uM_ABA_cDNA_P Parameter: Tissue Value: Aerial
  misc_feature: MA Experiment 108561 PARAMETER Experiment Name: At_100uM_ABA_cDNA_P Parameter: Treatment Value: 100uM ABA vs. No Treatment
  misc_feature: MA Experiment ID: 108573 Result: Down-regulated in Transcription
  misc_feature: MA Experiment 108573 PARAMETER Experiment Name: At_Drought_cDNA_P Parameter: Timepoint (hr) Value: 6
  misc_feature: MA Experiment 108573 PARAMETER Experiment Name: At_Drought_cDNA_P Parameter: Tissue Value: Aerial
  misc_feature: MA Experiment 108573 PARAMETER Experiment Name: At_Drought_cDNA_P Parameter: Treatment Value: Drought vs. No Drought
  misc_feature: MA Experiment ID: 108577 Result: Down-regulated in Transcription
  misc_feature: MA Experiment 108577 PARAMETER Experiment Name: At_42deg_Heat_cDNA_P Parameter: Temperature (deg C) Value: 42 vs. 22
  misc_feature: MA Experiment 108577 PARAMETER Experiment Name: At_42deg_Heat_cDNA_P Parameter: Timepoint (hr) Value: 6
  misc_feature: MA Experiment 108577 PARAMETER Experiment Name: At_42deg_Heat_cDNA_P Parameter: Tissue Value: Aerial
  misc_feature: MA Experiment ID: 108585 Result: Down-regulated in Transcription
  misc_feature: MA Experiment 108585 PARAMETER Experiment Name: At_5mM_NaNP_cDNA_P Parameter: Timepoint (hr) Value: 6
  misc_feature: MA Experiment 108585 PARAMETER Experiment Name: At_5mM_NaNP_cDNA_P Parameter: Tissue Value: Aerial
  misc_feature: MA Experiment 108585 PARAMETER Experiment Name: At_5mM_NaNP_cDNA_P Parameter: Treatment Value: null
  misc_feature: MA Experiment ID: 108595 Result: Down-regulated in Transcription
  misc_feature: MA Experiment 108595 PARAMETER Experiment Name: At_Ler-pi_Ovule_cDNA_P Parameter: Plant Line Value: null
  misc_feature: MA Experiment ID: 20000113 Result: Down-regulated in Transcription
  misc_feature: MA Experiment 20000113 PARAMETER Experiment Name: At_42deg_Heat_cDNA_P Parameter: Temperature (deg C) Value: 42 vs. 22
  misc_feature: MA Experiment 20000113 PARAMETER Experiment Name: At_42deg_Heat_cDNA_P Parameter: Timepoint (hr) Value: 8
  misc_feature: MA Experiment 20000113 PARAMETER Experiment Name: At_42deg_Heat_cDNA_P Parameter: Tissue Value: Aerial
  misc_feature: MA Experiment ID: 20000173 Result: Down-regulated in Transcription
  misc_feature: MA Experiment 20000173 PARAMETER Experiment Name: At_42deg_Heat_P Parameter: Age (day) Value: 14
  misc_feature: MA Experiment 20000173 PARAMETER Experiment Name: At_42deg_Heat_P Parameter: Organism Value: A. thaliana
  misc_feature: MA Experiment 20000173 PARAMETER Experiment Name: At_42deg_Heat_P Parameter: Plant Line Value: WS
  misc_feature: MA Experiment 20000173 PARAMETER Experiment Name: At_42deg_Heat_P Parameter: Temperature (deg C) Value: 42 vs. 22
  misc_feature: MA Experiment 20000173 PARAMETER Experiment Name: At_42deg_Heat_P Parameter: Timepoint (hr) Value: 6
  misc_feature: MA Experiment 20000173 PARAMETER Experiment Name: At_42deg_Heat_P Parameter: Tissue Value: Aerial
  misc_feature: MA Experiment ID: 20000179 Result: Up-regulated in Transcription
  misc_feature: MA Experiment 20000179 PARAMETER Experiment Name: At_Germinating_Seeds_P Parameter: Age (hr) Value: 6 vs. 0
  misc_feature: MA Experiment 20000179 PARAMETER Experiment Name: At_Germinating_Seeds_P Parameter: Tissue Value: Germinating Seeds
  misc_feature: MA Experiment ID: 20000180 Result: Up-regulated in Transcription
  misc_feature: MA Experiment 20000180 PARAMETER Experiment Name: At_Germinating_Seeds_P Parameter: Age (hr) Value: 24 vs. 0
  misc_feature: MA Experiment 20000180 PARAMETER Experiment Name: At_Germinating_Seeds_P Parameter: Tissue Value: Germinating Seeds
  misc_feature: MA Experiment ID: 20000227 Result: Up-regulated in Transcription
  misc_feature: MA Experiment 20000227 PARAMETER Experiment Name: At_Root-Tips-vs-Tops_P Parameter: Tissue Value: Root Tips vs. Root Tops
  misc_feature: MA Experiment ID: 20000234 Result: Up-regulated in Transcription
  misc_feature: MA Experiment 20000234 PARAMETER Experiment Name: At_Siliques_P Parameter: Age (day) Value: 21
  misc_feature: MA Experiment 20000234 PARAMETER Experiment Name: At_Siliques_P Parameter: Organism Value: A. thaliana
  misc_feature: MA Experiment 20000234 PARAMETER Experiment Name: At_Siliques_P Parameter: Plant Line Value: WS
  misc_feature: MA Experiment 20000234 PARAMETER Experiment Name: At_Siliques_P Parameter: Tissue Value: Less Than 5mm Siliques vs. Whole Plant
  misc_feature: MA Experiment ID: 20000437 Result: Down-regulated in Transcription
  misc_feature: MA Experiment 20000437 PARAMETER Experiment Name: At_Drought_P Parameter: Age (day) Value: 8
  misc_feature: MA Experiment 20000437 PARAMETER Experiment Name: At_Drought_P Parameter: Organism Value: A. thaliana
  misc_feature: MA Experiment 20000437 PARAMETER Experiment Name: At_Drought_P Parameter: Plant Line Value: WS
  misc_feature: MA Experiment 20000437 PARAMETER Experiment Name: At_Drought_P Parameter: Timepoint (hr) Value: 24
  misc_feature: MA Experiment 20000437 PARAMETER Experiment Name: At_Drought_P Parameter: Tissue Value: Whole Plant
  misc_feature: MA Experiment 20000437 PARAMETER Experiment Name: At_Drought_P Parameter: Treatment Value: Drought vs. No Drought
  misc_feature: MA Experiment ID: 20001911 Result: Down-regulated in Transcription
  misc_feature: MA Experiment 20001911 PARAMETER Experiment Name: At_Drought_Reproduction_P Parameter: Age (day) Value: 40
  misc_feature: MA Experiment 20001911 PARAMETER Experiment Name: At_Drought_Reproduction_P Parameter: Organism Value: A. thaliana
  misc_feature: MA Experiment 20001911 PARAMETER Experiment Name: At_Drought_Reproduction_P Parameter: Plant Line Value: WS
  misc_feature: MA Experiment 20001911 PARAMETER Experiment Name: At_Drought_Reproduction_P Parameter: Timepoint (day) Value: 10
  misc_feature: MA Experiment 20001911 PARAMETER Experiment Name: At_Drought_Reproduction_P Parameter: Tissue Value: Flowers
  misc_feature: MA Experiment 20001911 PARAMETER Experiment Name: At_Drought_Reproduction_P Parameter: Treatment Value: Drought vs. No Drought
acaaaggaaaacgttaatggtggatctgagcactgtcaatgtcatcaccaccgaagtagagttgactccactcaacagaaactgaaactggaaagtttgagacttttaagtgatgaaaagttctcagatgtcagaaacagaatttaaagtgttgcttgagacattcacatttcctgctgattctgctcccttcaagagttgtcatgcctctaccatagttgaggttgttaaagatcatttcttggctgcgtatttcggaggcaccagggaaggagcacctgatgtcaaaatctggttgcagcatttcaaggatggtcaatgggattcaccggttattgttgatgaagagccaggagttccaatgtataaccctgtcttgttcaaacttccatctcatgagctcttattgttctacaaaatcggccaggaggttcaaaaatggagtggttgcatgaaacgatcatatgataaaggtataacttggactgaaagagaacagcttcctcctgggattctcggtcctatcaaaaacaagcccattttgcttgaagacggtactctcctttgcggatcatctgttgagagttggaattcttggggagcatggatggaggtcacttcagatgcgggtagaacatggagaaagaaagggccaatatacattcaaggcaagagtcttagcgtgatccaaccagttccataccaaaccgcagctgggaacttacggattttactcagatcctttactggcattgacagaatctgtatctcagagtctttggatggcggtgagaactggagttttgcagtaccaacggttctcccaaacccaaattcaggtattgatggagtcaagcttaaggatggtaggctagtgcttgcttacaacacagactcaagaggtgtgctcaaattaggagtttctttagacgacggtgattcatggaccgatattttaacgttggaggaatctccgggaatggagtattcgtacccggctgttatacaagccggagacggcaatgtccacgtcacctatacatataacaggacacaaattaagcatgtggtgctcaagactgcgacagatatcgattcgaagccataccgacatggtgaagcaggaggaggacacgtgaacttggatttgtacgaaccaaacattaattaattagctatttgtctcttgaaccatcgatgtggagtgtgacttccttcttacggaagaacaaagaatgttctctttcttgtcttgtaagttattgattgatcgattcttgagtttgtaaaagttgccactagttgatgaatattattgagattgtttataatatatttattgtaatcatataagttagagatttacttt

SEQ ID NO: 101712 - protein, 352 aa, Arabidopsis thaliana; identical to SEQ ID NO: 43663
  peptide (1)..(352): Ceres Seq. ID no. 13608533
  misc_feature (1)..(352): Homolog of NCBI NO: 30696915 NR Description: expressed protein [Arabidopsis thaliana]
  misc_feature (142)..(352): Homolog of NCBI NO: 9759267 NR Description: gene_id:MRI1.6~pir||D64592~similar to unknown
  misc_feature (1)..(144): Homolog of NCBI NO: 9759267 NR Description: gene_id:MRI1.6~pir||D64592~similar to unknown
  misc_feature (6)..(352): Homolog of NCBI NO: 30696919 NR Description: expressed protein [Arabidopsis thaliana]
  misc_feature (6)..(352): Homolog of NCBI NO: 21536870 NR Description: unknown [Arabidopsis thaliana]
  misc_feature (6)..(314): Homolog of NCBI NO: 26452755 NR Description: unknown protein [Arabidopsis thaliana]
  misc_feature (1)..(322): Homolog of NCBI NO: 34393670 NR Description: alpha-rhamnosidase-like protein [Oryza sativa
  misc_feature (10)..(321): Homolog of NCBI NO: 23617011 NR Description: hypothetial protein~similar to Arabidopsis
  misc_feature (20)..(321): Homolog of NCBI NO: 21243816 NR Description: conserved hypothetical protein [Xanthomonas pv. citri str. 306] >gi|21109411|gb|AAM37934.1| conserved
  misc_feature (20)..(324): Homolog of NCBI NO: 21232340 NR Description: conserved hypothetical protein [Xanthomonas pv. campestris str. ATCC 33913] >gi|21114112|gb|AAM42181.1| hypothetical protein [Xanthomonas campestris pv. campestris str.

SEQ ID NO: 101713 - protein, 347 aa, Arabidopsis thaliana; identical to SEQ ID NO: 35320
  peptide (1)..(347): Ceres Seq. ID no. 13608534
  misc_feature (1)..(347): Homolog of NCBI NO: 30696915 NR Description: expressed protein [Arabidopsis thaliana]
  misc_feature (137)..(347): Homolog of NCBI NO: 9759267 NR Description: gene_id:MRI1.6~pir||D64592~similar to unknown
  misc_feature (1)..(139): Homolog of NCBI NO: 9759267 NR Description: gene_id:MRI1.6~pir||D64592~similar to unknown
  misc_feature (1)..(347): Homolog of NCBI NO: 30696919 NR Description: expressed protein [Arabidopsis thaliana]
  misc_feature (1)..(347): Homolog of NCBI NO: 21536870 NR Description: unknown [Arabidopsis thaliana]
  misc_feature (1)..(309): Homolog of NCBI NO: 26452755 NR Description: unknown protein [Arabidopsis thaliana]
  misc_feature (1)..(317): Homolog of NCBI NO: 34393670 NR Description: alpha-rhamnosidase-like protein [Oryza sativa
  misc_feature (5)..(316): Homolog of NCBI NO: 23617011 NR Description: hypothetial protein~similar to Arabidopsis
  misc_feature (15)..(316): Homolog of NCBI NO: 21243816 NR Description: conserved hypothetical protein [Xanthomonas pv. citri str. 306] >gi|21109411|gb|AAM37934.1| conserved
  misc_feature (15)..(319): Homolog of NCBI NO: 21232340 NR Description: conserved hypothetical protein [Xanthomonas pv. campestris str. ATCC 33913] >gi|21114112|gb|AAM42181.1| hypothetical protein [Xanthomonas campestris pv. campestris str.

SEQ ID NO: 101714 - protein, 269 aa, Arabidopsis thaliana; identical to SEQ ID NO: 35321
  peptide (1)..(269): Ceres Seq. ID no. 13608535
  misc_feature (1)..(269): Homolog of NCBI NO: 30696915 NR Description: expressed protein [Arabidopsis thaliana]
  misc_feature (59)..(269): Homolog of NCBI NO: 9759267 NR Description: gene_id:MRI1.6~pir||D64592~similar to unknown
  misc_feature (1)..(61): Homolog of NCBI NO: 9759267 NR Description: gene_id:MRI1.6~pir||D64592~similar to unknown
  misc_feature (1)..(269): Homolog of NCBI NO: 30696919 NR Description: expressed protein [Arabidopsis thaliana]
  misc_feature (1)..(269): Homolog of NCBI NO: 21536870 NR Description: unknown [Arabidopsis thaliana]
  misc_feature (1)..(231): Homolog of NCBI NO: 26452755 NR Description: unknown protein [Arabidopsis thaliana]
  misc_feature (1)..(239): Homolog of NCBI NO: 34393670 NR Description: alpha-rhamnosidase-like protein [Oryza sativa
  misc_feature (1)..(238): Homolog of NCBI NO: 23617011 NR Description: hypothetial protein~similar to Arabidopsis
  misc_feature (1)..(238): Homolog of NCBI NO: 21243816 NR Description: conserved hypothetical protein [Xanthomonas pv. citri str. 306] >gi|21109411|gb|AAM37934.1| conserved
  misc_feature (1)..(241): Homolog of NCBI NO: 21232340 NR Description: conserved hypothetical protein [Xanthomonas pv. campestris str. ATCC 33913] >gi|21114112|gb|AAM42181.1| hypothetical protein [Xanthomonas campestris pv. campestris str.

SEQ ID NO: 101715 - DNA, 897 bp, Arabidopsis thaliana
  misc_feature (1)..(897): Ceres Seq. ID no. 13608540
  misc_feature: MA Experiment ID: 108435 Result: Down-regulated in Transcription
  misc_feature: MA Experiment 108435 PARAMETER Experiment Name: At_stm_Mutants_cDNA_P Parameter: Plant Line Value: wt Landsburg vs stm
  misc_feature: MA Experiment 108435 PARAMETER Experiment Name: At_stm_Mutants_cDNA_P Parameter: Tissue Value: Shoot Apical Meristem Region
  misc_feature: MA Experiment ID: 108464 Result: Up-regulated in Transcription
  misc_feature: MA Experiment 108464 PARAMETER Experiment Name: At_Germinating_Seeds_cDNA_P Parameter: Age (day) Value: 4 vs. 0
  misc_feature: MA Experiment 108464 PARAMETER Experiment Name: At_Germinating_Seeds_cDNA_P Parameter: Tissue Value: Germinating Seeds
  misc_feature: MA Experiment ID: 108488 Result: Down-regulated in Transcription
  misc_feature: MA Experiment ID: 108572 Result: Down-regulated in Transcription
  misc_feature: MA Experiment 108572 PARAMETER Experiment Name: At_Drought_cDNA_P Parameter: Timepoint (hr) Value: 1
  misc_feature: MA Experiment 108572 PARAMETER Experiment Name: At_Drought_cDNA_P Parameter: Tissue Value: Aerial
  misc_feature: MA Experiment 108572 PARAMETER Experiment Name: At_Drought_cDNA_P Parameter: Treatment Value: Drought vs. No Drought
  misc_feature: MA Experiment ID: 108573 Result: Down-regulated in Transcription
  misc_feature: MA Experiment 108573 PARAMETER Experiment Name: At_Drought_cDNA_P Parameter: Timepoint (hr) Value: 6
  misc_feature: MA Experiment 108573 PARAMETER Experiment Name: At_Drought_cDNA_P Parameter: Tissue Value: Aerial
  misc_feature: MA Experiment 108573 PARAMETER Experiment Name: At_Drought_cDNA_P Parameter: Treatment Value: Drought vs. No Drought
  misc_feature: MA Experiment ID: 108574 Result: Down-regulated in Transcription
  misc_feature: MA Experiment 108574 PARAMETER Experiment Name: At_Wounding__cDNA_P Parameter: Timepoint (hr) Value: 1
  misc_feature: MA Experiment 108574 PARAMETER Experiment Name: At_Wounding__cDNA_P Parameter: Tissue Value: Aerial
  misc_feature: MA Experiment 108574 PARAMETER Experiment Name: At_Wounding__cDNA_P Parameter: Treatment Value: Wounding vs. No Wounding
  misc_feature: MA Experiment ID: 108576 Result: Down-regulated in Transcription
  misc_feature: MA Experiment 108576 PARAMETER Experiment Name: At_42deg_Heat_cDNA_P Parameter: Temperature (deg C) Value: 42 vs. 22
  misc_feature: MA Experiment 108576 PARAMETER Experiment Name: At_42deg_Heat_cDNA_P Parameter: Timepoint (hr) Value: 1
  misc_feature: MA Experiment 108576 PARAMETER Experiment Name: At_42deg_Heat_cDNA_P Parameter: Tissue Value: Aerial
  misc_feature: MA Experiment ID: 108577 Result: Down-regulated in Transcription
  misc_feature: MA Experiment 108577 PARAMETER Experiment Name: At_42deg_Heat_cDNA_P Parameter: Temperature (deg C) Value: 42 vs. 22
  misc_feature: MA Experiment 108577 PARAMETER Experiment Name: At_42deg_Heat_cDNA_P Parameter: Timepoint (hr) Value: 6
  misc_feature: MA Experiment 108577 PARAMETER Experiment Name: At_42deg_Heat_cDNA_P Parameter: Tissue Value: Aerial
  misc_feature: MA Experiment ID: 108595 Result: Up-regulated in Transcription
  misc_feature: MA Experiment 108595 PARAMETER Experiment Name: At_Ler-pi_Ovule_cDNA_P Parameter: Plant Line Value: null
  misc_feature: MA Experiment ID: 20000069 Result: Up-regulated in Transcription
  misc_feature: MA Experiment 20000069 PARAMETER Experiment Name: At_100uM_ABA_Mutants_cDNA_P Parameter: Plant Line Value: CS23
  misc_feature: MA Experiment 20000069 PARAMETER Experiment Name: At_100uM_ABA_Mutants_cDNA_P Parameter: Timepoint (hr) Value: 6
  misc_feature: MA Experiment 20000069 PARAMETER Experiment Name: At_100uM_ABA_Mutants_cDNA_P Parameter: Tissue Value: Aerial
  misc_feature: MA Experiment 20000069 PARAMETER Experiment Name: At_100uM_ABA_Mutants_cDNA_P Parameter: Treatment Value: 100uM ABA vs. No Treatment
  misc_feature: MA Experiment ID: 20000070 Result: Up-regulated in Transcription
  misc_feature: MA Experiment 20000070 PARAMETER Experiment Name: At_100uM_ABA_Mutants_cDNA_P Parameter: Plant Line Value: CS24
  misc_feature: MA Experiment 20000070 PARAMETER Experiment Name: At_100uM_ABA_Mutants_cDNA_P Parameter: Timepoint (hr) Value: 6
  misc_feature: MA Experiment 20000070 PARAMETER Experiment Name: At_100uM_ABA_Mutants_cDNA_P Parameter: Tissue Value: Aerial
  misc_feature: MA Experiment 20000070 PARAMETER Experiment Name: At_100uM_ABA_Mutants_cDNA_P Parameter: Treatment Value: 100uM ABA vs. No Treatment
  misc_feature: MA Experiment ID: 20000071 Result: Up-regulated in Transcription
  misc_feature: MA Experiment 20000071 PARAMETER Experiment Name: At_100uM_ABA_Mutants_cDNA_P Parameter: Plant Line Value: CS8104
  misc_feature: MA Experiment 20000071 PARAMETER Experiment Name: At_100uM_ABA_Mutants_cDNA_P Parameter: Timepoint (hr) Value: 6
  misc_feature: MA Experiment 20000071 PARAMETER Experiment Name: At_100uM_ABA_Mutants_cDNA_P Parameter: Tissue Value: Aerial
  misc_feature: MA Experiment 20000071 PARAMETER Experiment Name: At_100uM_ABA_Mutants_cDNA_P Parameter: Treatment Value: 100uM ABA vs. No Treatment
  misc_feature: MA Experiment ID: 20000086 Result: Up-regulated in Transcription
  misc_feature: MA Experiment 20000086 PARAMETER Experiment Name: At_100uM_ABA_Mutants_cDNA_P Parameter: Plant Line Value: CS22
  misc_feature: MA Experiment 20000086 PARAMETER Experiment Name: At_100uM_ABA_Mutants_cDNA_P Parameter: Timepoint (hr) Value: 6
  misc_feature: MA Experiment 20000086 PARAMETER Experiment Name: At_100uM_ABA_Mutants_cDNA_P Parameter: Tissue Value: Aerial
  misc_feature: MA Experiment 20000086 PARAMETER Experiment Name: At_100uM_ABA_Mutants_cDNA_P Parameter: Treatment Value: 100uM ABA vs. No Treatment
  misc_feature: MA Experiment ID: 20000087 Result: Up-regulated in Transcription
  misc_feature: MA Experiment 20000087 PARAMETER Experiment Name: At_100uM_ABA_Mutants_cDNA_P Parameter: Plant Line Value: WS
  misc_feature: MA Experiment 20000087 PARAMETER Experiment Name: At_100uM_ABA_Mutants_cDNA_P Parameter: Timepoint (hr) Value: 6
  misc_feature: MA Experiment 20000087 PARAMETER Experiment Name: At_100uM_ABA_Mutants_cDNA_P Parameter: Tissue Value: Aerial
  misc_feature: MA Experiment 20000087 PARAMETER Experiment Name: At_100uM_ABA_Mutants_cDNA_P Parameter: Treatment Value: 100uM ABA vs. No Treatment
  misc_feature: MA Experiment ID: 20000088 Result: Up-regulated in Transcription
  misc_feature: MA Experiment 20000088 PARAMETER Experiment Name: At_100uM_ABA_Mutants_cDNA_P Parameter: Plant Line Value: Landsberg
  misc_feature: MA Experiment 20000088 PARAMETER Experiment Name: At_100uM_ABA_Mutants_cDNA_P Parameter: Timepoint (hr) Value: 6
  misc_feature: MA Experiment 20000088 PARAMETER Experiment Name: At_100uM_ABA_Mutants_cDNA_P Parameter: Tissue Value: Aerial
  misc_feature: MA Experiment 20000088 PARAMETER Experiment Name: At_100uM_ABA_Mutants_cDNA_P Parameter: Treatment Value: 100uM ABA vs. No Treatment
  misc_feature: MA Experiment ID: 20000089 Result: Up-regulated in Transcription
  misc_feature: MA Experiment ID: 20000090 Result: Up-regulated in Transcription
  misc_feature: MA Experiment ID: 20000112 Result: Down-regulated in Transcription
  misc_feature: MA Experiment 20000112 PARAMETER Experiment Name: At_42deg_Heat_cDNA_P Parameter: Temperature (deg C) Value: 42 vs. 22
  misc_feature: MA Experiment 20000112 PARAMETER Experiment Name: At_42deg_Heat_cDNA_P Parameter: Timepoint (hr) Value: 2
  misc_feature: MA Experiment 20000112 PARAMETER Experiment Name: At_42deg_Heat_cDNA_P Parameter: Tissue Value: Aerial
  misc_feature: MA Experiment ID: 20000113 Result: Down-regulated in Transcription
  misc_feature: MA Experiment 20000113 PARAMETER Experiment Name: At_42deg_Heat_cDNA_P Parameter: Temperature (deg C) Value: 42 vs. 22
  misc_feature: MA Experiment 20000113 PARAMETER Experiment Name: At_42deg_Heat_cDNA_P Parameter: Timepoint (hr) Value: 8
  misc_feature: MA Experiment 20000113 PARAMETER Experiment Name: At_42deg_Heat_cDNA_P Parameter: Tissue Value: Aerial
  misc_feature: MA Experiment ID: 20000117 Result: Up-regulated in Transcription
  misc_feature: MA Experiment 20000117 PARAMETER Experiment Name: At_100uM_ABA_Mutants_cDNA_P Parameter: Plant Line Value: Columbia
  misc_feature: MA Experiment 20000117 PARAMETER Experiment Name: At_100uM_ABA_Mutants_cDNA_P Parameter: Timepoint (hr) Value: 6
  misc_feature: MA Experiment 20000117 PARAMETER Experiment Name: At_100uM_ABA_Mutants_cDNA_P Parameter: Tissue Value: Aerial
  misc_feature: MA Experiment 20000117 PARAMETER Experiment Name: At_100uM_ABA_Mutants_cDNA_P Parameter: Treatment Value: 100uM ABA vs. No Treatment
  misc_feature: MA Experiment ID: 20000144 Result: Down-regulated in Transcription
  misc_feature: MA Experiment 20000144 PARAMETER Experiment Name: At_42deg_Heat_cDNA_P Parameter: Temperature (deg C) Value: 42 vs. 22
  misc_feature: MA Experiment 20000144 PARAMETER Experiment Name: At_42deg_Heat_cDNA_P Parameter: Timepoint (hr) Value: 1
  misc_feature: MA Experiment 20000144 PARAMETER Experiment Name: At_42deg_Heat_cDNA_P Parameter: Tissue Value: Aerial
  misc_feature: MA Experiment ID: 20000173 Result: Down-regulated in Transcription
  misc_feature: MA Experiment 20000173 PARAMETER Experiment Name: At_42deg_Heat_P Parameter: Age (day) Value: 14
  misc_feature: MA Experiment 20000173 PARAMETER Experiment Name: At_42deg_Heat_P Parameter: Organism Value: A. thaliana
  misc_feature: MA Experiment 20000173 PARAMETER Experiment Name: At_42deg_Heat_P Parameter: Plant Line Value: WS
  misc_feature: MA Experiment 20000173 PARAMETER Experiment Name: At_42deg_Heat_P Parameter: Temperature (deg C) Value: 42 vs. 22
  misc_feature: MA Experiment 20000173 PARAMETER Experiment Name: At_42deg_Heat_P Parameter: Timepoint (hr) Value: 6
  misc_feature: MA Experiment 20000173 PARAMETER Experiment Name: At_42deg_Heat_P Parameter: Tissue Value: Aerial
  misc_feature: MA Experiment ID: 20000180 Result: Down-regulated in Transcription
  misc_feature: MA Experiment 20000180 PARAMETER Experiment Name: At_Germinating_Seeds_P Parameter: Age (hr) Value: 24 vs. 0
  misc_feature: MA Experiment 20000180 PARAMETER Experiment Name: At_Germinating_Seeds_P Parameter: Tissue Value: Germinating Seeds
  misc_feature: MA Experiment ID: 20000184 Result: Down-regulated in Transcription
  misc_feature: MA Experiment 20000184 PARAMETER Experiment Name: At_Shoots__P Parameter: Age (day) Value: 7
  misc_feature: MA Experiment 20000184 PARAMETER Experiment Name: At_Shoots__P Parameter: Tissue Value: Shoots vs. Whole Plant
  misc_feature: MA Experiment ID: 20000235 Result: Down-regulated in Transcription
  misc_feature: MA Experiment 20000235 PARAMETER Experiment Name: At_Siliques_P Parameter: Age (day) Value: 21
  misc_feature: MA Experiment 20000235 PARAMETER Experiment Name: At_Siliques_P Parameter: Organism Value: A. thaliana
  misc_feature: MA Experiment 20000235 PARAMETER Experiment Name: At_Siliques_P Parameter: Plant Line Value: WS
  misc_feature: MA Experiment 20000235 PARAMETER Experiment Name: At_Siliques_P Parameter: Tissue Value: 5-10mm Siliques vs. Whole Plant
  misc_feature: MA Experiment ID: 20000443 Result: Down-regulated in Transcription
  misc_feature: MA Experiment 20000443 PARAMETER Experiment Name: At_1uM_BR-BRZ__P Parameter: Tissue Value: Shoot Apices
  misc_feature: MA Experiment 20000443 PARAMETER Experiment Name: At_1uM_BR-BRZ__P Parameter: Treatment Value: 1uM BRZ vs. No Treatment
  misc_feature: MA Experiment ID: 20001248 Result: Up-regulated in Transcription
  misc_feature: MA Experiment 20001248 PARAMETER Experiment Name: At_Far-red-induction_P Parameter: Age (day) Value: 7
  misc_feature: MA Experiment 20001248 PARAMETER Experiment Name: At_Far-red-induction_P Parameter: Light Value: Far-red vs. White
  misc_feature: MA Experiment 20001248 PARAMETER Experiment Name: At_Far-red-induction_P Parameter: Organism Value: A. thaliana
  misc_feature: MA Experiment 20001248 PARAMETER Experiment Name: At_Far-red-induction_P Parameter: Plant Line Value: Columbia
  misc_feature: MA Experiment 20001248 PARAMETER Experiment Name: At_Far-red-induction_P Parameter: Timepoint (hr) Value: 4
  misc_feature: MA Experiment 20001248 PARAMETER Experiment Name: At_Far-red-induction_P Parameter: Tissue Value: Whole Plant
  misc_feature: MA Experiment ID: 20001450 Result: Up-regulated in Transcription
  misc_feature: MA Experiment 20001450 PARAMETER Experiment Name: At_Far-red-induction_P Parameter: Age (day) Value: 7
  misc_feature: MA Experiment 20001450 PARAMETER Experiment Name: At_Far-red-induction_P Parameter: Light Value: Far-red vs. White
  misc_feature: MA Experiment 20001450 PARAMETER Experiment Name: At_Far-red-induction_P Parameter: Organism Value: A. thaliana
  misc_feature: MA Experiment 20001450 PARAMETER Experiment Name: At_Far-red-induction_P Parameter: Plant Line Value: Columbia
  misc_feature: MA Experiment 20001450 PARAMETER Experiment Name: At_Far-red-induction_P Parameter: Timepoint (hr) Value: 8
  misc_feature: MA Experiment 20001450 PARAMETER Experiment Name: At_Far-red-induction_P Parameter: Tissue Value: Whole Plant
  misc_feature: MA Experiment ID: 20001451 Result: Up-regulated in Transcription
  misc_feature: MA Experiment 20001451 PARAMETER Experiment Name: At_Far-red-induction_P Parameter: Age (day) Value: 7
  misc_feature: MA Experiment 20001451 PARAMETER Experiment Name: At_Far-red-induction_P Parameter: Light Value: Far-red vs. White
  misc_feature: MA Experiment 20001451 PARAMETER Experiment Name: At_Far-red-induction_P Parameter: Organism Value: A. thaliana
  misc_feature: MA Experiment 20001451 PARAMETER Experiment Name: At_Far-red-induction_P Parameter: Plant Line Value: Columbia
  misc_feature: MA Experiment 20001451 PARAMETER Experiment Name: At_Far-red-induction_P Parameter: Timepoint (hr) Value: 24
  misc_feature: MA Experiment 20001451 PARAMETER Experiment Name: At_Far-red-induction_P Parameter: Tissue Value: Whole Plant
  misc_feature: MA Experiment ID: 20001560 Result: Down-regulated in Transcription
  misc_feature: MA Experiment 20001560 PARAMETER Experiment Name: At_Drought_Soil_Dry_P Parameter: Age (day) Value: 28
  misc_feature: MA Experiment 20001560 PARAMETER Experiment Name: At_Drought_Soil_Dry_P Parameter: Organism Value: A. thaliana
  misc_feature: MA Experiment 20001560 PARAMETER Experiment Name: At_Drought_Soil_Dry_P Parameter: Plant Line Value: WS
  misc_feature: MA Experiment 20001560 PARAMETER Experiment Name: At_Drought_Soil_Dry_P Parameter: Post Timepoint (hr) Value: None
  misc_feature: MA Experiment 20001560 PARAMETER Experiment Name: At_Drought_Soil_Dry_P Parameter: Post-Treatment Value: None
  misc_feature: MA Experiment 20001560 PARAMETER Experiment Name: At_Drought_Soil_Dry_P Parameter: Timepoint (day) Value: 14
  misc_feature: MA Experiment 20001560 PARAMETER Experiment Name: At_Drought_Soil_Dry_P Parameter: Treatment Value: Drought vs. No Drought
  misc_feature: MA Experiment ID: 20001905 Result: Down-regulated in Transcription
  misc_feature: MA Experiment 20001905 PARAMETER Experiment Name: At_Drought_Reproduction_P Parameter: Age (day) Value: 40
  misc_feature: MA Experiment 20001905 PARAMETER Experiment Name: At_Drought_Reproduction_P Parameter: Organism Value: A. thaliana
  misc_feature: MA Experiment 20001905 PARAMETER Experiment Name: At_Drought_Reproduction_P Parameter: Plant Line Value: WS
  misc_feature: MA Experiment 20001905 PARAMETER Experiment Name: At_Drought_Reproduction_P Parameter: Timepoint (day) Value: 10
  misc_feature: MA Experiment 20001905 PARAMETER Experiment Name: At_Drought_Reproduction_P Parameter: Tissue Value: Rosettes
  misc_feature: MA Experiment 20001905 PARAMETER Experiment Name: At_Drought_Reproduction_P Parameter: Treatment Value: Drought vs. No Drought
acatttcgtgcgaaatttcaatttttttgcaatatcctttattgattgaccgaagatattttacaagcctttctccactaagcccttctctcttcttctcttggcctctcacttgaatctcccacaaagcgatcaatcacaaattccttcttctctctctctcttttcgtccctaagaatcaattatgaaaggagctaaatcaaagactgaaaccaggagctccaagctctctgtgaccaagaagccggctaaaggagcagggcgtggcaaagctgctgctaaggaccccaacaaaccaaagaggccagccagtgctttcttcgttttcatggaagatttccgtgagactttcaagaaggaaaaccccaagaacaagtctgtagctactgttggaaaagctgctggagacaagtggaagtccttgtctgattctgagaaagctccttatgttgctaaggctgagaaacgcaaggttgaatatgagaagaacattaaagcttacaacaagaaactggaggaaggtccaaaagaagatgaggaatctgacaagtcagtgtcagaggtcaatgacgaggatgatgctgaggatggtagtgaagaggaggaggacgatgactaagaagctgaatgttggtagcattagtatagatggctgcaaaaatctctctgtttttatctttacttgaaatgttaacggggctgattaaaatgggtctttctttttatctttttatatttccacaatctctcactaaagccctctgaatggagaaagtgaattgtagaatgtttagatggtgaaagagagacttgcagctctgtactctttgctttataaaacgatttagttttcttttctcagtttattatattgttgaattgatgatgatgttagc

SEQ ID NO: 101716 - protein, 144 aa, Arabidopsis thaliana; identical to SEQ ID NO: 28717
  peptide (1)..(144): Ceres Seq. ID no. 13608541
  misc_feature (38)..(107): Pfam Name: HMG (high mobility group) box Pfam Description: HMG (high mobility group) box
  misc_feature (1)..(144): Homolog of NCBI NO: 18394898 NR Description: expressed protein [Arabidopsis thaliana]
  misc_feature (1)..(139): Homolog of NCBI NO: 25402921 NR Description: protein F2D10.18 [imported] - Arabidopsis >gi|8886929|gb|AAF80615.1|AC069251_8 F2D10.18 [Arabidopsis
  misc_feature (1)..(144): Homolog of NCBI NO: 25402921 NR Description: protein F2D10.18 [imported] - Arabidopsis >gi|8886929|gb|AAF80615.1|AC069251_8 F2D10.18 [Arabidopsis
  misc_feature (1)..(144): Homolog of NCBI NO: 18394900 NR Description: expressed protein [Arabidopsis thaliana]

SEQ ID NO: 101717 - protein, 96 aa, Arabidopsis thaliana; identical to SEQ ID NO: 28718
  peptide (1)..(96): Ceres Seq. ID no. 13608542
  misc_feature (1)..(59): Pfam Name: HMG (high mobility group) box Pfam Description: HMG (high mobility group) box
  misc_feature (1)..(96): Homolog of NCBI NO: 18394898 NR Description: expressed protein [Arabidopsis thaliana]
  misc_feature (1)..(91): Homolog of NCBI NO: 25402921 NR Description: protein F2D10.18 [imported] - Arabidopsis >gi|8886929|gb|AAF80615.1|AC069251_8 F2D10.18 [Arabidopsis
  misc_feature (1)..(96): Homolog of NCBI NO: 25402921 NR Description: protein F2D10.18 [imported] - Arabidopsis >gi|8886929|gb|AAF80615.1|AC069251_8 F2D10.18 [Arabidopsis
  misc_feature (1)..(96): Homolog of NCBI NO: 18394900 NR Description: expressed protein [Arabidopsis thaliana]

SEQ ID NO: 101718 - protein, 79 aa, Arabidopsis thaliana; identical to SEQ ID NO: 28719
  peptide (1)..(79): Ceres Seq. ID no. 13608543

SEQ ID NO: 101719 - DNA, 821 bp, Arabidopsis thaliana
  misc_feature (1)..(821): Ceres Seq. ID no. 13608544
  misc_feature: MA Experiment ID: 108464 Result: Up-regulated in Transcription
  misc_feature: MA Experiment 108464 PARAMETER Experiment Name: At_Germinating_Seeds_cDNA_P Parameter: Age (day) Value: 4 vs. 0
  misc_feature: MA Experiment 108464 PARAMETER Experiment Name: At_Germinating_Seeds_cDNA_P Parameter: Tissue Value: Germinating Seeds
  misc_feature: MA Experiment ID: 108488 Result: Down-regulated in Transcription
  misc_feature: MA Experiment ID: 108573 Result: Down-regulated in Transcription
  misc_feature: MA Experiment 108573 PARAMETER Experiment Name: At_Drought_cDNA_P Parameter: Timepoint (hr) Value: 6
  misc_feature: MA Experiment 108573 PARAMETER Experiment Name: At_Drought_cDNA_P Parameter: Tissue Value: Aerial
  misc_feature: MA Experiment 108573 PARAMETER Experiment Name: At_Drought_cDNA_P Parameter: Treatment Value: Drought vs. No Drought
  misc_feature: MA Experiment ID: 108595 Result: Up-regulated in Transcription
  misc_feature: MA Experiment 108595 PARAMETER Experiment Name: At_Ler-pi_Ovule_cDNA_P Parameter: Plant Line Value: null
  misc_feature: MA Experiment ID: 20000069 Result: Up-regulated in Transcription
  misc_feature: MA Experiment 20000069 PARAMETER Experiment Name: At_100uM_ABA_Mutants_cDNA_P Parameter: Plant Line Value: CS23
  misc_feature: MA Experiment 20000069 PARAMETER Experiment Name: At_100uM_ABA_Mutants_cDNA_P Parameter: Timepoint (hr) Value: 6
  misc_feature: MA Experiment 20000069 PARAMETER Experiment Name: At_100uM_ABA_Mutants_cDNA_P Parameter: Tissue Value: Aerial
  misc_feature: MA Experiment 20000069 PARAMETER Experiment Name: At_100uM_ABA_Mutants_cDNA_P Parameter: Treatment Value: 100uM ABA vs. No Treatment
  misc_feature: MA Experiment ID: 20000070 Result: Up-regulated in Transcription
  misc_feature: MA Experiment 20000070 PARAMETER Experiment Name: At_100uM_ABA_Mutants_cDNA_P Parameter: Plant Line Value: CS24
  misc_feature: MA Experiment 20000070 PARAMETER Experiment Name: At_100uM_ABA_Mutants_cDNA_P Parameter: Timepoint (hr) Value: 6
  misc_feature: MA Experiment 20000070 PARAMETER Experiment Name: At_100uM_ABA_Mutants_cDNA_P Parameter: Tissue Value: Aerial
  misc_feature: MA Experiment 20000070 PARAMETER Experiment Name: At_100uM_ABA_Mutants_cDNA_P Parameter: Treatment Value: 100uM ABA vs. No Treatment
  misc_feature: MA Experiment ID: 20000071 Result: Up-regulated in Transcription
  misc_feature: MA Experiment 20000071 PARAMETER Experiment Name: At_100uM_ABA_Mutants_cDNA_P Parameter: Plant Line Value: CS8104
  misc_feature: MA Experiment 20000071 PARAMETER Experiment Name: At_100uM_ABA_Mutants_cDNA_P Parameter: Timepoint (hr) Value: 6
  misc_feature: MA Experiment 20000071 PARAMETER Experiment Name: At_100uM_ABA_Mutants_cDNA_P Parameter: Tissue Value: Aerial
  misc_feature: MA Experiment 20000071 PARAMETER Experiment Name: At_100uM_ABA_Mutants_cDNA_P Parameter: Treatment Value: 100uM ABA vs. No Treatment
  misc_feature: MA Experiment ID: 20000072 Result: Up-regulated in Transcription
  misc_feature: MA Experiment 20000072 PARAMETER Experiment Name: At_100uM_ABA_Mutants_cDNA_P Parameter: Plant Line Value: CS8105
  misc_feature: MA Experiment 20000072 PARAMETER Experiment Name: At_100uM_ABA_Mutants_cDNA_P Parameter: Timepoint (hr) Value: 6
  misc_feature: MA Experiment 20000072 PARAMETER Experiment Name: At_100uM_ABA_Mutants_cDNA_P Parameter: Tissue Value: Aerial
  misc_feature: MA Experiment 20000072 PARAMETER Experiment Name: At_100uM_ABA_Mutants_cDNA_P Parameter: Treatment Value: 100uM ABA vs. No Treatment
  misc_feature: MA Experiment ID: 20000087 Result: Up-regulated in Transcription
  misc_feature: MA Experiment 20000087 PARAMETER Experiment Name: At_100uM_ABA_Mutants_cDNA_P Parameter: Plant Line Value: WS
  misc_feature: MA Experiment 20000087 PARAMETER Experiment Name: At_100uM_ABA_Mutants_cDNA_P Parameter: Timepoint (hr) Value: 6
  misc_feature: MA Experiment 20000087 PARAMETER Experiment Name: At_100uM_ABA_Mutants_cDNA_P Parameter: Tissue Value: Aerial
  misc_feature: MA Experiment 20000087 PARAMETER Experiment Name: At_100uM_ABA_Mutants_cDNA_P Parameter: Treatment Value: 100uM ABA vs. No Treatment
  misc_feature: MA Experiment ID: 20000088 Result: Up-regulated in Transcription
  misc_feature: MA Experiment 20000088 PARAMETER Experiment Name: At_100uM_ABA_Mutants_cDNA_P Parameter: Plant Line Value: Landsberg
  misc_feature: MA Experiment 20000088 PARAMETER Experiment Name: At_100uM_ABA_Mutants_cDNA_P Parameter: Timepoint (hr) Value: 6
  misc_feature: MA Experiment 20000088 PARAMETER Experiment Name: At_100uM_ABA_Mutants_cDNA_P Parameter: Tissue Value: Aerial
  misc_feature: MA Experiment 20000088 PARAMETER Experiment Name: At_100uM_ABA_Mutants_cDNA_P Parameter: Treatment Value: 100uM ABA vs. No Treatment
  misc_feature: MA Experiment ID: 20000089 Result: Up-regulated in Transcription
  misc_feature: MA Experiment ID: 20000090 Result: Up-regulated in Transcription
  misc_feature: MA Experiment ID: 20000111 Result: Down-regulated in Transcription
  misc_feature: MA Experiment 20000111 PARAMETER Experiment Name: At_42deg_Heat_cDNA_P Parameter: Temperature (deg C) Value: 42 vs. 22
  misc_feature: MA Experiment 20000111 PARAMETER Experiment Name: At_42deg_Heat_cDNA_P Parameter: Timepoint (hr) Value: 6
  misc_feature: MA Experiment 20000111 PARAMETER Experiment Name: At_42deg_Heat_cDNA_P Parameter: Tissue Value: Aerial
  misc_feature: MA Experiment ID: 20000113 Result: Down-regulated in Transcription
  misc_feature: MA Experiment 20000113 PARAMETER Experiment Name: At_42deg_Heat_cDNA_P Parameter: Temperature (deg C) Value: 42 vs. 22
  misc_feature: MA Experiment 20000113 PARAMETER Experiment Name: At_42deg_Heat_cDNA_P Parameter: Timepoint (hr) Value: 8
  misc_feature: MA Experiment 20000113 PARAMETER Experiment Name: At_42deg_Heat_cDNA_P Parameter: Tissue Value: Aerial
  misc_feature: MA Experiment ID: 20000117 Result: Up-regulated in Transcription
  misc_feature: MA Experiment 20000117 PARAMETER Experiment Name: At_100uM_ABA_Mutants_cDNA_P Parameter: Plant Line Value: Columbia
  misc_feature: MA Experiment 20000117 PARAMETER Experiment Name: At_100uM_ABA_Mutants_cDNA_P Parameter: Timepoint (hr) Value: 6
  misc_feature: MA Experiment 20000117 PARAMETER Experiment Name: At_100uM_ABA_Mutants_cDNA_P Parameter: Tissue Value: Aerial
  misc_feature: MA Experiment 20000117 PARAMETER Experiment Name: At_100uM_ABA_Mutants_cDNA_P Parameter: Treatment Value: 100uM ABA vs. No Treatment
  misc_feature: MA Experiment ID: 20000173 Result: Down-regulated in Transcription
  misc_feature: MA Experiment 20000173 PARAMETER Experiment Name: At_42deg_Heat_P Parameter: Age (day) Value: 14
  misc_feature: MA Experiment 20000173 PARAMETER Experiment Name: At_42deg_Heat_P Parameter: Organism Value: A. thaliana
  misc_feature: MA Experiment 20000173 PARAMETER Experiment Name: At_42deg_Heat_P Parameter: Plant Line Value: WS
  misc_feature: MA Experiment 20000173 PARAMETER Experiment Name: At_42deg_Heat_P Parameter: Temperature (deg C) Value: 42 vs. 22
  misc_feature: MA Experiment 20000173 PARAMETER Experiment Name: At_42deg_Heat_P Parameter: Timepoint (hr) Value: 6
  misc_feature: MA Experiment 20000173 PARAMETER Experiment Name: At_42deg_Heat_P Parameter: Tissue Value: Aerial
  misc_feature: MA Experiment ID: 20000235 Result: Down-regulated in Transcription
  misc_feature: MA Experiment 20000235 PARAMETER Experiment Name: At_Siliques_P Parameter: Age (day) Value: 21
  misc_feature: MA Experiment 20000235 PARAMETER Experiment Name: At_Siliques_P Parameter: Organism Value: A. thaliana
  misc_feature: MA Experiment 20000235 PARAMETER Experiment Name: At_Siliques_P Parameter: Plant Line Value: WS
  misc_feature: MA Experiment 20000235 PARAMETER Experiment Name: At_Siliques_P Parameter: Tissue Value: 5-10mm Siliques vs. Whole Plant
  misc_feature: MA Experiment ID: 20000437 Result: Up-regulated in Transcription
  misc_feature: MA Experiment 20000437 PARAMETER Experiment Name: At_Drought_P Parameter: Age (day) Value: 8
  misc_feature: MA Experiment 20000437 PARAMETER Experiment Name: At_Drought_P Parameter: Organism Value: A. thaliana
  misc_feature: MA Experiment 20000437 PARAMETER Experiment Name: At_Drought_P Parameter: Plant Line Value: WS
  misc_feature: MA Experiment 20000437 PARAMETER Experiment Name: At_Drought_P Parameter: Timepoint (hr) Value: 24
  misc_feature: MA Experiment 20000437 PARAMETER Experiment Name: At_Drought_P Parameter: Tissue Value: Whole Plant
  misc_feature: MA Experiment 20000437 PARAMETER Experiment Name: At_Drought_P Parameter: Treatment Value: Drought vs. No Drought
  misc_feature: MA Experiment ID: 20001248 Result: Up-regulated in Transcription
  misc_feature: MA Experiment 20001248 PARAMETER Experiment Name: At_Far-red-induction_P Parameter: Age (day) Value: 7
  misc_feature: MA Experiment 20001248 PARAMETER Experiment Name: At_Far-red-induction_P Parameter: Light Value: Far-red vs. White
  misc_feature: MA Experiment 20001248 PARAMETER Experiment Name: At_Far-red-induction_P Parameter: Organism Value: A. thaliana
  misc_feature: MA Experiment 20001248 PARAMETER Experiment Name: At_Far-red-induction_P Parameter: Plant Line Value: Columbia
  misc_feature: MA Experiment 20001248 PARAMETER Experiment Name: At_Far-red-induction_P Parameter: Timepoint (hr) Value: 4
  misc_feature: MA Experiment 20001248 PARAMETER Experiment Name: At_Far-red-induction_P Parameter: Tissue Value: Whole Plant
  misc_feature: MA Experiment ID: 20001451 Result: Up-regulated in Transcription
  misc_feature: MA Experiment 20001451 PARAMETER Experiment Name: At_Far-red-induction_P Parameter: Age (day) Value: 7
  misc_feature: MA Experiment 20001451 PARAMETER Experiment Name: At_Far-red-induction_P Parameter: Light Value: Far-red vs. White
  misc_feature: MA Experiment 20001451 PARAMETER Experiment Name: At_Far-red-induction_P Parameter: Organism Value: A. thaliana
  misc_feature: MA Experiment 20001451 PARAMETER Experiment Name: At_Far-red-induction_P Parameter: Plant Line Value: Columbia
  misc_feature: MA Experiment 20001451 PARAMETER Experiment Name: At_Far-red-induction_P Parameter: Timepoint (hr) Value: 24
  misc_feature: MA Experiment 20001451 PARAMETER Experiment Name: At_Far-red-induction_P Parameter: Tissue Value: Whole Plant
  misc_feature: MA Experiment ID: 20001558 Result: Down-regulated in Transcription
  misc_feature: MA Experiment 20001558 PARAMETER Experiment Name: At_Drought_Soil_Dry_P Parameter: Age (day) Value: 27
  misc_feature: MA Experiment 20001558 PARAMETER Experiment Name: At_Drought_Soil_Dry_P Parameter: Organism Value: A. thaliana
  misc_feature: MA Experiment 20001558 PARAMETER Experiment Name: At_Drought_Soil_Dry_P Parameter: Plant Line Value: WS
  misc_feature: MA Experiment 20001558 PARAMETER Experiment Name: At_Drought_Soil_Dry_P Parameter: Post Timepoint (hr) Value: 6
  misc_feature: MA Experiment 20001558 PARAMETER Experiment Name: At_Drought_Soil_Dry_P Parameter: Post-Treatment Value: Re-Water vs. No Drought
  misc_feature: MA Experiment 20001558 PARAMETER Experiment Name: At_Drought_Soil_Dry_P Parameter: Timepoint (day) Value: 13
  misc_feature: MA Experiment 20001558 PARAMETER Experiment Name: At_Drought_Soil_Dry_P Parameter: Treatment Value: Drought vs. No Drought
atcccccacttaaccctctcatctctcggcctctcactcgaatctccttcacaaagcgtacaaatcacaaacacgtagttattctctctttactctctctatttctctctcttcaaaccctacgaagatcttcttcttcttcttcaagaatcgatcatgaaaggagctaaatctaaggctgaaaccaggagcacaaagctctctgtgactaagaagcctgctaagggagccaaaggtgctgctaaagatccaaacaaacctaagaggccttccagtgccttcttcgttttcatggaagatttccgtgtgacgtacaaggaggagcaccctaagaacaagtctgttgctgctgttggcaaagctggtggtgaaaagtggaaatccttgtctgactctgagaaggctccttatgtggctaaggctgacaagcgcaaggttgagtatgagaagaacatgaaagcctacaacaagaaattggaggaaggccctaaggaagatgaggaatctgacaagtcagtttcagaggttaacgatgaggatgatgctgaggatggcagtgaagaggaggaagacgatgattaagaagttgaagttgtggtagcgtaatatagaaggctgcaaggaatctctcggatgtttttatctcctctcttaaaatgttaattcgggtggttaaagtggttttttttttttttctttttctttttcttactgatgtttcgttttagtaaactattacctatctcccactgattctacgggtaatggaaaaagtgaatgtagaatgtttagatggtgaaatgagagatttgtagctctat

SEQ ID NO: 101720 - protein, 141 aa, Arabidopsis thaliana; identical to SEQ ID NO: 28781
  peptide (1)..(141): Ceres Seq. ID no. 13608545
  misc_feature (35)..(104): Pfam Name: HMG (high mobility group) box Pfam Description: HMG (high mobility group) box
  misc_feature (1)..(141): Homolog of NCBI NO: 25402921 NR Description: protein F2D10.18 [imported] - Arabidopsis >gi|8886929|gb|AAF80615.1|AC069251_8 F2D10.18 [Arabidopsis
  misc_feature (1)..(141): Homolog of NCBI NO: 18394900 NR Description: expressed protein [Arabidopsis thaliana]
  misc_feature (1)..(141): Homolog of NCBI NO: 18394898 NR Description: expressed protein [Arabidopsis thaliana]
  misc_feature (1)..(136): Homolog of NCBI NO: 25402921 NR Description: protein F2D10.18 [imported] - Arabidopsis >gi|8886929|gb|AAF80615.1|AC069251_8 F2D10.18 [Arabidopsis
  misc_feature (1)..(140): Homolog of NCBI NO: 7446212 NR Description: high mobility group protein - potato

SEQ ID NO: 101721 - protein, 96 aa, Arabidopsis thaliana; identical to SEQ ID NO: 28782
  peptide (1)..(96): Ceres Seq. ID no. 13608546
  misc_feature (1)..(59): Pfam Name: HMG (high mobility group) box Pfam Description: HMG (high mobility group) box
  misc_feature (1)..(96): Homolog of NCBI NO: 25402921 NR Description: protein F2D10.18 [imported] - Arabidopsis >gi|8886929|gb|AAF80615.1|AC069251_8 F2D10.18 [Arabidopsis
  misc_feature (1)..(96): Homolog of NCBI NO: 18394900 NR Description: expressed protein [Arabidopsis thaliana]
  misc_feature (1)..(96): Homolog of NCBI NO: 18394898 NR Description: expressed protein [Arabidopsis thaliana]
  misc_feature (1)..(91): Homolog of NCBI NO: 25402921 NR Description: protein F2D10.18 [imported] - Arabidopsis >gi|8886929|gb|AAF80615.1|AC069251_8 F2D10.18 [Arabidopsis
  misc_feature (1)..(95): Homolog of NCBI NO: 7446212 NR Description: high mobility group protein - potato

SEQ ID NO: 101722 - DNA, 1384 bp, Arabidopsis thaliana
  misc_feature (1)..(1384): Ceres Seq. ID no. 13608558
  misc_feature: MA Experiment ID: 108434 Result: Up-regulated in Transcription
  misc_feature: MA Experiment 108434 PARAMETER Experiment Name: At_Root_Tips_cDNA_P Parameter: Tissue Value: Root Tips
  misc_feature: MA Experiment ID: 108488 Result: Down-regulated in Transcription
  misc_feature: MA Experiment ID: 108489 Result: Up-regulated in Transcription
  misc_feature: MA Experiment ID: 20000265 Result: Up-regulated in Transcription
  misc_feature: MA Experiment 20000265 PARAMETER Experiment Name: At_Open_Flower_P Parameter: Age (day) Value: 21
  misc_feature: MA Experiment 20000265 PARAMETER Experiment Name: At_Open_Flower_P Parameter: Plant Line Value: WS
  misc_feature: MA Experiment 20000265 PARAMETER Experiment Name: At_Open_Flower_P Parameter: Tissue Value: Closed Flower vs. Whole Plant
  misc_feature: MA Experiment ID: 20000527 Result: Down-regulated in Transcription
  misc_feature: MA Experiment 20000527 PARAMETER Experiment Name: At_10percent_PEG_P Parameter: Age (day) Value: 20
  misc_feature: MA Experiment 20000527 PARAMETER Experiment Name: At_10percent_PEG_P Parameter: Organism Value: A. thaliana
  misc_feature: MA Experiment 20000527 PARAMETER Experiment Name: At_10percent_PEG_P Parameter: Plant Line Value: WS
  misc_feature: MA Experiment 20000527 PARAMETER Experiment Name: At_10percent_PEG_P Parameter: Timepoint (day) Value: 20
  misc_feature: MA Experiment 20000527 PARAMETER Experiment Name: At_10percent_PEG_P Parameter: Tissue Value: Whole Plant
  misc_feature: MA Experiment 20000527 PARAMETER Experiment Name: At_10percent_PEG_P Parameter: Treatment Value: 10percent PEG vs. No Treatment
  misc_feature: MA Experiment ID: 20001904 Result: Up-regulated in Transcription
  misc_feature: MA Experiment 20001904 PARAMETER Experiment Name: At_Drought_Reproduction_P Parameter: Age (day) Value: 37
  misc_feature: MA Experiment 20001904 PARAMETER Experiment Name: At_Drought_Reproduction_P Parameter: Organism Value: A. thaliana
  misc_feature: MA Experiment 20001904 PARAMETER Experiment Name: At_Drought_Reproduction_P Parameter: Plant Line Value: WS
  misc_feature: MA Experiment 20001904 PARAMETER Experiment Name: At_Drought_Reproduction_P Parameter: Timepoint (day) Value: 7
  misc_feature: MA Experiment 20001904 PARAMETER Experiment Name: At_Drought_Reproduction_P Parameter: Tissue Value: Rosettes
  misc_feature: MA Experiment 20001904 PARAMETER Experiment Name: At_Drought_Reproduction_P Parameter: Treatment Value: Drought vs. No Drought
  misc_feature: MA Experiment ID: 20001905 Result: Up-regulated in Transcription
  misc_feature: MA Experiment 20001905 PARAMETER Experiment Name: At_Drought_Reproduction_P Parameter: Age (day) Value: 40
  misc_feature: MA Experiment 20001905 PARAMETER Experiment Name: At_Drought_Reproduction_P Parameter: Organism Value: A. thaliana
  misc_feature: MA Experiment 20001905 PARAMETER Experiment Name: At_Drought_Reproduction_P Parameter: Plant Line Value: WS
  misc_feature: MA Experiment 20001905 PARAMETER Experiment Name: At_Drought_Reproduction_P Parameter: Timepoint (day) Value: 10
  misc_feature: MA Experiment 20001905 PARAMETER Experiment Name: At_Drought_Reproduction_P Parameter: Tissue Value: Rosettes
  misc_feature: MA Experiment 20001905 PARAMETER Experiment Name: At_Drought_Reproduction_P Parameter: Treatment Value: Drought vs. No Drought
  misc_feature: MA Experiment ID: 20001911 Result: Down-regulated in Transcription
  misc_feature: MA Experiment 20001911 PARAMETER Experiment Name: At_Drought_Reproduction_P Parameter: Age (day) Value: 40
  misc_feature: MA Experiment 20001911 PARAMETER Experiment Name: At_Drought_Reproduction_P Parameter: Organism Value: A. thaliana
  misc_feature: MA Experiment 20001911 PARAMETER Experiment Name: At_Drought_Reproduction_P Parameter: Plant Line Value: WS
  misc_feature: MA Experiment 20001911 PARAMETER Experiment Name: At_Drought_Reproduction_P Parameter: Timepoint (day) Value: 10
  misc_feature: MA Experiment 20001911 PARAMETER Experiment Name: At_Drought_Reproduction_P Parameter: Tissue Value: Flowers
  misc_feature: MA Experiment 20001911 PARAMETER Experiment Name: At_Drought_Reproduction_P Parameter: Treatment Value: Drought vs. No Drought
attgacaagttcatctgtctctcttgtcgtagtgaaagagaaaaagaaacaagtttttttctgttgggtaattttctactcgtcattggtttcatcgacattgaactagaaccagaatggctactgctacgtctcaccaatcagtcgtttcatttgcttctctccggtcttctccttcttctacaatctctcaatgtggattcaagatcgattcttcactgagctttacatcgaaaaagacaaacttttgcaagattaaagcaatggcatcatcagtttcttatgacaacactctcttgtctccttccaagacaatccctgacaattctcaaaagaaatcaaatgaagcagctttgatattgattaggcatggagaatctttatggaacgagaagaatctttttactggttgtgttgatgtgccattgactgagaaaggtgttgaagaagctattgaagcagggaagaggattagtaacattcctgttgatgttatctttacatcttctttgattcgtgctcagatgactgcaatgcttgctatgattcaacaccgtcgtaagaaggtaccgatcatcttgcacgatgaaagcgaacaggcgaaaacttggagtcaagtttttagtgatgagactaaaaaccaatccattcctgtcatacctgcttggcagctcaatgaaagaatgtatggagaattacaaggtcttaacaagcaagaaacagccgagagatatgggaaagagcaagttcacgaatggcgtaggagttatgatattcctcctcccaaaggagagagtttggagatgtgtgctgagagagcagtagcttattttcaggacaatatcgaaccgaagcttgcagctggaaagaacgtaatgatagctgctcacgggaactcgctgcggtctatcattatgtatcttgacaaattgacttgccaggaggtgataagtctagagctatcgacaggtatacctcttctctacatattcaaagaaggcaaattcatgaagcggggaagcccggttggtccaacagaagctggtgtttatgcttataccaagagattggctcaatacagacagaagctagaggacgatagtgaagtactctgtgcctgaagtaaactagaaaatttggttcttcatctactcaactctcttcccacaagcttaggaccttagaggcgtttacaaagaatacataacttctgattttgttctttttttctggttcttcttcattcatatgtgtcataaccaccactgttacctgaaggataatgttcaaaatgtgaccgtttccgtctttctagccaaacacttgttgatgttgtgtttgttgttgttaccaaactctttaagcaaacaagtattattctgtg

SEQ ID NO: 101723 - protein, 334 aa, Arabidopsis thaliana
  peptide (1)..(334): Ceres Seq. ID no. 13608559
  misc_feature (78)..(300): Pfam Name: Phosphoglycerate mutase family Pfam Description: Phosphoglycerate mutase family
  misc_feature (1)..(334): Homolog of NCBI NO: 18395083 NR Description: expressed protein [Arabidopsis thaliana]
  misc_feature (1)..(334): Homolog of NCBI NO: 21539557 NR Description: unknown protein [Arabidopsis thaliana]
  misc_feature (1)..(334): Homolog of NCBI NO: 21618275 NR Description: unknown [Arabidopsis thaliana]
  misc_feature (1)..(326): Homolog of NCBI NO: 25405021 NR Description: protein F28K19.26 [imported] - Arabidopsis >gi|6573769|gb|AAF17689.1|AC009243_16 F28K19.26 [Arabidopsis
  misc_feature (137)..(326): Homolog of NCBI NO: 15218201 NR Description: phosphoglycerate mutase -related [Arabidopsis >gi|26451923|dbj|BAC43054.1| unknown protein [Arabidopsis
  misc_feature (78)..(305): Homolog of NCBI NO: 29840659 NR Description: phosphoglycerate mutase [Chlamydophila caviae >gi|29835009|gb|AAP05643.1| phosphoglycerate mutase
  misc_feature (78)..(299): Homolog of NCBI NO: 15618772 NR Description: Phosphoglycerate Mutase [Chlamydophila pneumoniae >gi|16752176|ref|NP_445543.1| phosphoglycerate mutase
  misc_feature (78)..(299): Homolog of NCBI NO: 15836396 NR Description: phosphoglycerate mutase [Chlamydophila pneumoniae
  misc_feature (80)..(305): Homolog of NCBI NO: 15834720 NR Description: phosphoglycerate mutase [Chlamydia muridarum]
  misc_feature (80)..(305): Homolog of NCBI NO: 15605455 NR Description: Phosphoglycerate Mutase [Chlamydia trachomatis]
MATATSHQSVVSFASLRSSPSSTISQCGFKIDSSLSFTSKKTNFCKIKAMASSVSYDNTLLSPSKTIPDNSQKKSNEAALILIRHGESLWNEKNLFTGCVDVPLTEKGVEEAIEAGKRISNIPVDVIFTSSLIRAQMTAMLAMIQHRRKKVPIILHDESEQAKTWSQVFSDETKNQSIPVIPAWQLNERMYGELQGLNKQETAERYGKEQVHEWRRSYDIPPPKGESLEMCAERAVAYFQDNIEPKLAAGKNVMIAAHGNSLRSIIMYLDKLTCQEVISLELSTGIPLLYIFKEGKFMKRGSPVGPTEAGVYAYTKRLAQYRQKLEDDSEVLCA

SEQ ID NO: 101724 - protein, 285 aa, Arabidopsis thaliana
  peptide (1)..(285): Ceres Seq. ID no. 13608560
  misc_feature (29)..(251): Pfam Name: Phosphoglycerate mutase family Pfam Description: Phosphoglycerate mutase family
  misc_feature (1)..(285): Homolog of NCBI NO: 18395083 NR Description: expressed protein [Arabidopsis thaliana]
  misc_feature (1)..(285): Homolog of NCBI NO: 21539557 NR Description: unknown protein [Arabidopsis thaliana]
  misc_feature (1)..(285): Homolog of NCBI NO: 21618275 NR Description: unknown [Arabidopsis thaliana]
  misc_feature (1)..(277): Homolog of NCBI NO: 25405021 NR Description: protein F28K19.26 [imported] - Arabidopsis >gi|6573769|gb|AAF17689.1|AC009243_16 F28K19.26 [Arabidopsis
  misc_feature (88)..(277): Homolog of NCBI NO: 15218201 NR Description: phosphoglycerate mutase -related [Arabidopsis >gi|26451923|dbj|BAC43054.1| unknown protein [Arabidopsis
  misc_feature (29)..(256): Homolog of NCBI NO: 29840659 NR Description: phosphoglycerate mutase [Chlamydophila caviae >gi|29835009|gb|AAP05643.1| phosphoglycerate mutase
  misc_feature (29)..(250): Homolog of NCBI NO: 15618772 NR Description: Phosphoglycerate Mutase [Chlamydophila pneumoniae >gi|16752176|ref|NP_445543.1| phosphoglycerate mutase
  misc_feature (29)..(250): Homolog of NCBI NO: 15836396 NR Description: phosphoglycerate mutase [Chlamydophila pneumoniae
  misc_feature (31)..(256): Homolog of NCBI NO: 15834720 NR Description: phosphoglycerate mutase [Chlamydia muridarum]
  misc_feature (31)..(256): Homolog of NCBI NO: 15605455 NR Description: Phosphoglycerate Mutase [Chlamydia trachomatis]
MASSVSYDNTLLSPSKTIPDNSQKKSNEAALILIRHGESLWNEKNLFTGCVDVPLTEKGVEEAIEAGKRISNIPVDVIFTSSLIRAQMTAMLAMIQHRRKKVPIILHDESEQAKTWSQVFSDETKNQSIPVIPAWQLNERMYGELQGLNKQETAERYGKEQVHEWRRSYDIPPPKGESLEMCAERAVAYFQDNIEPKLAAGKNVMIAAHGNSLRSIIMYLDKLTCQEVISLELSTGIPLLYIFKEGKFMKRGSPVGPTEAGVYAYTKRLAQYRQKLEDDSEVLCA

SEQ ID NO: 101725 - protein, 198 aa, Arabidopsis thaliana; identical to SEQ ID NO: 22421
  peptide (1)..(198): Ceres Seq. ID no. 13608561
  misc_feature (1)..(164): Pfam Name: Phosphoglycerate mutase family Pfam Description: Phosphoglycerate mutase family
  misc_feature (1)..(198): Homolog of NCBI NO: 18395083 NR Description: expressed protein [Arabidopsis thaliana]
  misc_feature (1)..(198): Homolog of NCBI NO: 21539557 NR Description: unknown protein [Arabidopsis thaliana]
  misc_feature (1)..(198): Homolog of NCBI NO: 21618275 NR Description: unknown [Arabidopsis thaliana]
  misc_feature (1)..(190): Homolog of NCBI NO: 25405021 NR Description: protein F28K19.26 [imported] - Arabidopsis >gi|6573769|gb|AAF17689.1|AC009243_16 F28K19.26 [Arabidopsis
  misc_feature (1)..(190): Homolog of NCBI NO: 15218201 NR Description: phosphoglycerate mutase -related [Arabidopsis >gi|26451923|dbj|BAC43054.1| unknown protein [Arabidopsis
  misc_feature (1)..(169): Homolog of NCBI NO: 29840659 NR Description: phosphoglycerate mutase [Chlamydophila caviae >gi|29835009|gb|AAP05643.1| phosphoglycerate mutase
  misc_feature (1)..(163): Homolog of NCBI NO: 15618772 NR Description: Phosphoglycerate Mutase [Chlamydophila pneumoniae >gi|16752176|ref|NP_445543.1| phosphoglycerate mutase
  misc_feature (1)..(163): Homolog of NCBI NO: 15836396 NR Description: phosphoglycerate mutase [Chlamydophila pneumoniae
  misc_feature (1)..(169): Homolog of NCBI NO: 15834720 NR Description: phosphoglycerate mutase [Chlamydia muridarum]
  misc_feature (1)..(169): Homolog of NCBI NO: 15605455 NR Description: Phosphoglycerate Mutase [Chlamydia trachomatis]

SEQ ID NO: 101726 - DNA, 537 bp, Arabidopsis thaliana
  misc_feature (1)..(537): Ceres Seq. ID no. 13608566
  misc_feature: MA Experiment ID: 108434 Result: Up-regulated in Transcription
  misc_feature: MA Experiment 108434 PARAMETER Experiment Name: At_Root_Tips_cDNA_P Parameter: Tissue Value: Root Tips
  misc_feature: MA Experiment ID: 108462 Result: Down-regulated in Transcription
  misc_feature: MA Experiment 108462 PARAMETER Experiment Name: At_Germinating_Seeds_cDNA_P Parameter: Age (day) Value: 2 vs. 0
  misc_feature: MA Experiment 108462 PARAMETER Experiment Name: At_Germinating_Seeds_cDNA_P Parameter: Tissue Value: Germinating Seeds
  misc_feature: MA Experiment ID: 108463 Result: Down-regulated in Transcription
  misc_feature: MA Experiment 108463 PARAMETER Experiment Name: At_Germinating_Seeds_cDNA_P Parameter: Age (day) Value: 3 vs. 0
  misc_feature: MA Experiment 108463 PARAMETER Experiment Name: At_Germinating_Seeds_cDNA_P Parameter: Tissue Value: Germinating Seeds
  misc_feature: MA Experiment ID: 108595 Result: Down-regulated in Transcription
  misc_feature: MA Experiment 108595 PARAMETER Experiment Name: At_Ler-pi_Ovule_cDNA_P Parameter: Plant Line Value: null
  misc_feature: MA Experiment ID: 20000111 Result: Down-regulated in Transcription
  misc_feature: MA Experiment 20000111 PARAMETER Experiment Name: At_42deg_Heat_cDNA_P Parameter: Temperature (deg C) Value: 42 vs. 22
  misc_feature: MA Experiment 20000111 PARAMETER Experiment Name: At_42deg_Heat_cDNA_P Parameter: Timepoint (hr) Value: 6
  misc_feature: MA Experiment 20000111 PARAMETER Experiment Name: At_42deg_Heat_cDNA_P Parameter: Tissue Value: Aerial
  misc_feature: MA Experiment ID: 20000173 Result: Down-regulated in Transcription
  misc_feature: MA Experiment 20000173 PARAMETER Experiment Name: At_42deg_Heat_P Parameter: Age (day) Value: 14
  misc_feature: MA Experiment 20000173 PARAMETER Experiment Name: At_42deg_Heat_P Parameter: Organism Value: A. thaliana
  misc_feature: MA Experiment 20000173 PARAMETER Experiment Name: At_42deg_Heat_P Parameter: Plant Line Value: WS
  misc_feature: MA Experiment 20000173 PARAMETER Experiment Name: At_42deg_Heat_P Parameter: Temperature (deg C) Value: 42 vs. 22
  misc_feature: MA Experiment 20000173 PARAMETER Experiment Name: At_42deg_Heat_P Parameter: Timepoint (hr) Value: 6
  misc_feature: MA Experiment 20000173 PARAMETER Experiment Name: At_42deg_Heat_P Parameter: Tissue Value: Aerial
  misc_feature: MA Experiment ID: 20001560 Result: Up-regulated in Transcription
  misc_feature: MA Experiment 20001560 PARAMETER Experiment Name: At_Drought_Soil_Dry_P Parameter: Age (day) Value: 28
  misc_feature: MA Experiment 20001560 PARAMETER Experiment Name: At_Drought_Soil_Dry_P Parameter: Organism Value: A. thaliana
  misc_feature: MA Experiment 20001560 PARAMETER Experiment Name: At_Drought_Soil_Dry_P Parameter: Plant Line Value: WS
  misc_feature: MA Experiment 20001560 PARAMETER Experiment Name: At_Drought_Soil_Dry_P Parameter: Post Timepoint (hr) Value: None
  misc_feature: MA Experiment 20001560 PARAMETER Experiment Name: At_Drought_Soil_Dry_P Parameter: Post-Treatment Value: None
  misc_feature: MA Experiment 20001560 PARAMETER Experiment Name: At_Drought_Soil_Dry_P Parameter: Timepoint (day) Value: 14
  misc_feature: MA Experiment 20001560 PARAMETER Experiment Name: At_Drought_Soil_Dry_P Parameter: Treatment Value: Drought vs. No Drought
  misc_feature: MA Experiment ID: 20001911 Result: Down-regulated in Transcription
  misc_feature: MA Experiment 20001911 PARAMETER Experiment Name: At_Drought_Reproduction_P Parameter: Age (day) Value: 40
  misc_feature: MA Experiment 20001911 PARAMETER Experiment Name: At_Drought_Reproduction_P Parameter: Organism Value: A. thaliana
  misc_feature: MA Experiment 20001911 PARAMETER Experiment Name: At_Drought_Reproduction_P Parameter: Plant Line Value: WS
  misc_feature: MA Experiment 20001911 PARAMETER Experiment Name: At_Drought_Reproduction_P Parameter: Timepoint (day) Value: 10
  misc_feature: MA Experiment 20001911 PARAMETER Experiment Name: At_Drought_Reproduction_P Parameter: Tissue Value: Flowers
  misc_feature: MA Experiment 20001911 PARAMETER Experiment Name: At_Drought_Reproduction_P Parameter: Treatment Value: Drought vs. No Drought
ggaaaggtagaagaatcgagtcggaaaaatggaaacgacgaagagtaacagcagcgagtccgatgtcaacgccaaatgggacgcttgtctcgatctcactgctcgtcgctttgtctactcttccctcggcggcgctttcgccggtcttctcttcttcaggagtccggttacgagatgggcgtcgattgcttttggtgctggaattggtattggttctgcatacacagattgttctcgtgtttttgatgcgtcttcttcaacttcagctactttattagcagctcccaagagtacggagacttctgtatctcaggcagcagaagagtgaagacaacgaggaagcttggaggtaaaaaaccaaacattgatagagttacattacgaaatggtaattgatcttgcaggacaaggcttttgagataacgccattgttaaaaaaaaacttttgcttctcagtgtggttttgtacactgatgtcaaaattgttaatgacccactcattttttttgttttgaaaaatcttatgttcttttactt

SEQ ID NO: 101727 - protein, 99 aa, Arabidopsis thaliana; identical to SEQ ID NO: 24405
  peptide (1)..(99): Ceres Seq. ID no. 13608567
  misc_feature (1)..(73): Pfam Name: Domain of unknown function (DUF543) Pfam Description: Domain of unknown function (DUF543)
  misc_feature (1)..(99): Homolog of NCBI NO: 18395129 NR Description: expressed protein [Arabidopsis thaliana]
  misc_feature (2)..(99): Homolog of NCBI NO: 18410008 NR Description: expressed protein [Arabidopsis thaliana] unknown protein [Arabidopsis thaliana]
  misc_feature (2)..(99): Homolog of NCBI NO: 21553491 NR Description: unknown [Arabidopsis thaliana]
  misc_feature (2)..(95): Homolog of NCBI NO: 25406151 NR Description: unknown protein T9N14.2 [imported] - Arabidopsis

SEQ ID NO: 101728 - protein, 91 aa, Arabidopsis thaliana
  peptide (1)..(91): Ceres Seq. ID no. 13608568
KGRRIESEKWKRRRVTAASPMSTPNGTLVSISLLVALSTLPSAALSPVFSSSGVRLRDGRRLLLVLELVLVLHTQIVLVFLMRLLQLQLLY

SEQ ID NO: 101729 - protein, 71 aa, Arabidopsis thaliana; identical to SEQ ID NO: 24406
  peptide (1)..(71): Ceres Seq. ID no. 13608569

SEQ ID NO: 101730 - DNA, 1109 bp, Arabidopsis thaliana
  misc_feature (1)..(1109): Ceres Seq. ID no. 13608577
  misc_feature: MA Experiment ID: 20001905 Result: Down-regulated in Transcription
  misc_feature: MA Experiment 20001905 PARAMETER Experiment Name: At_Drought_Reproduction_P Parameter: Age (day) Value: 40
  misc_feature: MA Experiment 20001905 PARAMETER Experiment Name: At_Drought_Reproduction_P Parameter: Organism Value: A. thaliana
  misc_feature: MA Experiment 20001905 PARAMETER Experiment Name: At_Drought_Reproduction_P Parameter: Plant Line Value: WS
  misc_feature: MA Experiment 20001905 PARAMETER Experiment Name: At_Drought_Reproduction_P Parameter: Timepoint (day) Value: 10
  misc_feature: MA Experiment 20001905 PARAMETER Experiment Name: At_Drought_Reproduction_P Parameter: Tissue Value: Rosettes
  misc_feature: MA Experiment 20001905 PARAMETER Experiment Name: At_Drought_Reproduction_P Parameter: Treatment Value: Drought vs. No Drought
ttttatctcttgagcacacacacacatacaagactctcctcacagaacgatttagatttaatcgggaaaaagttcagtcagtgacactaatgttcgaatcgaacatggttcttcaaacactatcttcttcttctcctccaattcaccgtctctatcttcaccattctcagattctcccttcttctgggtcacccagcaagatttctcttcagatacatggaaggactttggccattcgatcttttcatgaaatttctgctagaggtttaccggctttgaacaaagcttccttgaagaagctaccaatcaaaggatctacctttctgctggggcagagcttgttgatggtttctgctcacccacagttggcagcagcagcagaaatcataaagcctgaaccgatttacgaagttggagagttatttgaacttagtattcagctttcttacttgctgttactactggggttgcttggagttggtactttctatgtgatccgtcaagtacttgtacgcagagaactagacctctccgctaaagaattgcaggagcaagtaaggagcggagatgcaagtgcaacagagctctttgagcttggtgcagtgatgttgagaaggaagttttatcctgcagccaacaagtttttgcaacaagctatccagaaatgggacggtgatgatcaagatcttgctcaggtctataacgctcttggagtgagttatgtacgagaggataaacttgacaaaggaattgctcagtttgaaatggcggtgaagctgcaacccggttatgtaacagcttggaacaaccttggggatgcttatgagaagaagaaggagttgcctttggcattgaatgcgtttgaagaagttttgttgtttgatccaaacaataaggtggctcggcctcggcgagatgcgttgaaggatcgcgtgaagctttataaaggtgttgtggctgttaagtctaagaaacggtgacggctcaaacaagatgcaaactctgaaccaagaaccgttggtctctctcccccttgtgtatttttttggtttggtaatatgtatggagattttgtgttaatatgaaaatgaaactttgttgttttttgt

SEQ ID NO: 101731 - protein, 325 aa, Arabidopsis thaliana
  peptide (1)..(325): Ceres Seq. ID no. 13608578
  misc_feature (264)..(297): Pfam Name: TPR Domain Pfam Description: TPR Domain
  misc_feature (30)..(325): Homolog of NCBI NO: 22329737 NR Description: tetratricopeptide repeat (TPR)-containing protein thaliana] >gi|15294176|gb|AAK95265.1|AF410279_1 [Arabidopsis thaliana] >gi|24797054|gb|AAN64539.1|
  misc_feature (30)..(325): Homolog of NCBI NO: 30687988 NR Description: tetratricopeptide repeat (TPR)-containing protein
  misc_feature (30)..(325): Homolog of NCBI NO: 21537104 NR Description: unknown [Arabidopsis thaliana]
  misc_feature (107)..(325): Homolog of NCBI NO: 7487355 NR Description: hypothetical protein T22J18.13 - Arabidopsis >gi|3287688|gb|AAC25516.1|AAC25516 Contains similarity to ycf37 product gb|1001425 from Synechocystis sp. genome gb|D63999. gene.
  misc_feature (35)..(70): Homolog of NCBI NO: 7487355 NR Description: hypothetical protein T22J18.13 - Arabidopsis >gi|3287688|gb|AAC25516.1|AAC25516 Contains similarity to ycf37 product gb|1001425 from Synechocystis sp. genome gb|D63999. gene.
  misc_feature (121)..(325): Homolog of NCBI NO: 37535090 NR Description: putative stress inducible protein [Oryza sativa
  misc_feature (121)..(232): Homolog of NCBI NO: 37535100 NR Description: unknown protein [Oryza sativa (japonica
  misc_feature (121)..(232): Homolog of NCBI NO: 38636894 NR Description: stress inducible protein-like [Oryza sativa
  misc_feature (142)..(311): Homolog of NCBI NO: 22299949 NR Description: photosystem I assembly related protein
  misc_feature (144)..(311): Homolog of NCBI NO: 23042213 NR Description: hypothetical protein [Trichodesmium erythraeum
LSLEHTHTYKTLLTERFRFNREKVQSVTLMFESNMVLQTLSSSSPPIHRLYLHHSQILPSSGSPSKISLQIHGRTLAIRSFHEISARGLPALNKASLKKLPIKGSTFLLGQSLLMVSAHPQLAAAAEIIKPEPIYEVGELFELSIQLSYLLLLLGLLGVGTFYVIRQVLVRRELDLSAKELQEQVRSGDASATELFELGAVMLRRKFYPAANKFLQQAIQKWDGDDQDLAQVYNALGVSYVREDKLDKGIAQFEMAVKLQPGYVTAWNNLGDAYEKKKELPLALNAFEEVLLFDPNNKVARPRRDALKDRVKLYKGVVAVKSKKR

SEQ ID NO: 101732 - protein, 296 aa, Arabidopsis thaliana
  peptide (1)..(296): Ceres Seq. ID no. 13608579
  misc_feature (235)..(268): Pfam Name: TPR Domain Pfam Description: TPR Domain
  misc_feature (1)..(296): Homolog of NCBI NO: 22329737 NR Description: tetratricopeptide repeat (TPR)-containing protein thaliana] >gi|15294176|gb|AAK95265.1|AF410279_1 [Arabidopsis thaliana] >gi|24797054|gb|AAN64539.1|
  misc_feature (1)..(296): Homolog of NCBI NO: 30687988 NR Description: tetratricopeptide repeat (TPR)-containing protein
  misc_feature (1)..(296): Homolog of NCBI NO: 21537104 NR Description: unknown [Arabidopsis thaliana]
  misc_feature (78)..(296): Homolog of NCBI NO: 7487355 NR Description: hypothetical protein T22J18.13 - Arabidopsis >gi|3287688|gb|AAC25516.1|AAC25516 Contains similarity to ycf37 product gb|1001425 from Synechocystis sp. genome gb|D63999. gene.
  misc_feature (6)..(41): Homolog of NCBI NO: 7487355 NR Description: hypothetical protein T22J18.13 - Arabidopsis >gi|3287688|gb|AAC25516.1|AAC25516 Contains similarity to ycf37 product gb|1001425 from Synechocystis sp. genome gb|D63999. gene.
  misc_feature (92)..(296): Homolog of NCBI NO: 37535090 NR Description: putative stress inducible protein [Oryza sativa
  misc_feature (92)..(203): Homolog of NCBI NO: 37535100 NR Description: unknown protein [Oryza sativa (japonica
  misc_feature (92)..(203): Homolog of NCBI NO: 38636894 NR Description: stress inducible protein-like [Oryza sativa
  misc_feature (113)..(282): Homolog of NCBI NO: 22299949 NR Description: photosystem I assembly related protein
  misc_feature (115)..(282): Homolog of NCBI NO: 23042213 NR Description: hypothetical protein [Trichodesmium erythraeum
MFESNMVLQTLSSSSPPIHRLYLHHSQILPSSGSPSKISLQIHGRTLAIRSFHEISARGLPALNKASLKKLPIKGSTFLLGQSLLMVSAHPQLAAAAEIIKPEPIYEVGELFELSIQLSYLLLLLGLLGVGTFYVIRQVLVRRELDLSAKELQEQVRSGDASATELFELGAVMLRRKFYPAANKFLQQAIQKWDGDDQDLAQVYNALGVSYVREDKLDKGIAQFEMAVKLQPGYVTAWNNLGDAYEKKKELPLALNAFEEVLLFDPNNKVARPRRDALKDRVKLYKGVVAVKSKKR

SEQ ID NO: 101733 - protein, 291 aa, Arabidopsis thaliana
  peptide (1)..(291): Ceres Seq. ID no. 13608580
  misc_feature (230)..(263): Pfam Name: TPR Domain Pfam Description: TPR Domain
  misc_feature (1)..(291): Homolog of NCBI NO: 22329737 NR Description: tetratricopeptide repeat (TPR)-containing protein thaliana] >gi|15294176|gb|AAK95265.1|AF410279_1 [Arabidopsis thaliana] >gi|24797054|gb|AAN64539.1|
  misc_feature (1)..(291): Homolog of NCBI NO: 30687988 NR Description: tetratricopeptide repeat (TPR)-containing protein
  misc_feature (1)..(291): Homolog of NCBI NO: 21537104 NR Description: unknown [Arabidopsis thaliana]
  misc_feature (73)..(291): Homolog of NCBI NO: 7487355 NR Description: hypothetical protein T22J18.13 - Arabidopsis >gi|3287688|gb|AAC25516.1|AAC25516 Contains similarity to ycf37 product gb|1001425 from Synechocystis sp. genome gb|D63999. gene.
  misc_feature (1)..(36): Homolog of NCBI NO: 7487355 NR Description: hypothetical protein T22J18.13 - Arabidopsis >gi|3287688|gb|AAC25516.1|AAC25516 Contains similarity to ycf37 product gb|1001425 from Synechocystis sp. genome gb|D63999. gene.
  misc_feature (87)..(291): Homolog of NCBI NO: 37535090 NR Description: putative stress inducible protein [Oryza sativa
  misc_feature (87)..(198): Homolog of NCBI NO: 37535100 NR Description: unknown protein [Oryza sativa (japonica
  misc_feature (87)..(198): Homolog of NCBI NO: 38636894 NR Description: stress inducible protein-like [Oryza sativa
  misc_feature (108)..(277): Homolog of NCBI NO: 22299949 NR Description: photosystem I assembly related protein
  misc_feature (110)..(277): Homolog of NCBI NO: 23042213 NR Description: hypothetical protein [Trichodesmium erythraeum
MVLQTLSSSSPPIHRLYLHHSQILPSSGSPSKISLQIHGRTLAIRSFHEISARGLPALNKASLKKLPIKGSTFLLGQSLLMVSAHPQLAAAAEIIKPEPIYEVGELFELSIQLSYLLLLLGLLGVGTFYVIRQVLVRRELDLSAKELQEQVRSGDASATELFELGAVMLRRKFYPAANKFLQQAIQKWDGDDQDLAQVYNALGVSYVREDKLDKGIAQFEMAVKLQPGYVTAWNNLGDAYEKKKELPLALNAFEEVLLFDPNNKVARPRRDALKDRVKLYKGVVAVKSKKR

SEQ ID NO: 101734 - DNA, 1369 bp, Arabidopsis thaliana
  misc_feature (1)..(1369): Ceres Seq. ID no. 13608585
  misc_feature: MA Experiment ID: 108434 Result: Down-regulated in Transcription
  misc_feature: MA Experiment 108434 PARAMETER Experiment Name: At_Root_Tips_cDNA_P Parameter: Tissue Value: Root Tips
  misc_feature: MA Experiment ID: 108463 Result: Up-regulated in Transcription
  misc_feature: MA Experiment 108463 PARAMETER Experiment Name: At_Germinating_Seeds_cDNA_P Parameter: Age (day) Value: 3 vs. 0
  misc_feature: MA Experiment 108463 PARAMETER Experiment Name: At_Germinating_Seeds_cDNA_P Parameter: Tissue Value: Germinating Seeds
  misc_feature: MA Experiment ID: 108464 Result: Up-regulated in Transcription
  misc_feature: MA Experiment 108464 PARAMETER Experiment Name: At_Germinating_Seeds_cDNA_P Parameter: Age (day) Value: 4 vs. 0
  misc_feature: MA Experiment 108464 PARAMETER Experiment Name: At_Germinating_Seeds_cDNA_P Parameter: Tissue Value: Germinating Seeds
  misc_feature: MA Experiment ID: 108585 Result: Up-regulated in Transcription
  misc_feature: MA Experiment 108585 PARAMETER Experiment Name: At_5mM_NaNP_cDNA_P Parameter: Timepoint (hr) Value: 6
  misc_feature: MA Experiment 108585 PARAMETER Experiment Name: At_5mM_NaNP_cDNA_P Parameter: Tissue Value: Aerial
  misc_feature: MA Experiment 108585 PARAMETER Experiment Name: At_5mM_NaNP_cDNA_P Parameter: Treatment Value: null
  misc_feature: MA Experiment ID: 108595 Result: Down-regulated in Transcription
  misc_feature: MA Experiment 108595 PARAMETER Experiment Name: At_Ler-pi_Ovule_cDNA_P Parameter: Plant Line Value: null
  misc_feature: MA Experiment ID: 20000069 Result: Down-regulated in Transcription
  misc_feature: MA Experiment 20000069 PARAMETER Experiment Name: At_100uM_ABA_Mutants_cDNA_P Parameter: Plant Line Value: CS23
  misc_feature: MA Experiment 20000069 PARAMETER Experiment Name: At_100uM_ABA_Mutants_cDNA_P Parameter: Timepoint (hr) Value: 6
  misc_feature: MA Experiment 20000069 PARAMETER Experiment Name: At_100uM_ABA_Mutants_cDNA_P Parameter: Tissue Value: Aerial
  misc_feature: MA Experiment 20000069 PARAMETER Experiment Name: At_100uM_ABA_Mutants_cDNA_P Parameter: Treatment Value: 100uM ABA vs. No Treatment
  misc_feature: MA Experiment ID: 20000087 Result: Down-regulated in Transcription
  misc_feature: MA Experiment 20000087 PARAMETER Experiment Name: At_100uM_ABA_Mutants_cDNA_P Parameter: Plant Line Value: WS
  misc_feature: MA Experiment 20000087 PARAMETER Experiment Name: At_100uM_ABA_Mutants_cDNA_P Parameter: Timepoint (hr) Value: 6
  misc_feature: MA Experiment 20000087 PARAMETER Experiment Name: At_100uM_ABA_Mutants_cDNA_P Parameter: Tissue Value: Aerial
  misc_feature: MA Experiment 20000087 PARAMETER Experiment Name: At_100uM_ABA_Mutants_cDNA_P Parameter: Treatment Value: 100uM ABA vs. No Treatment
  misc_feature: MA Experiment ID: 20000089 Result: Down-regulated in Transcription
  misc_feature: MA Experiment ID: 20000090 Result: Down-regulated in Transcription
  misc_feature: MA Experiment ID: 20000111 Result: Up-regulated in Transcription
  misc_feature: MA Experiment 20000111 PARAMETER Experiment Name: At_42deg_Heat_cDNA_P Parameter: Temperature (deg C) Value: 42 vs. 22
  misc_feature: MA Experiment 20000111 PARAMETER Experiment Name: At_42deg_Heat_cDNA_P Parameter: Timepoint (hr) Value: 6
  misc_feature: MA Experiment 20000111 PARAMETER Experiment Name: At_42deg_Heat_cDNA_P Parameter: Tissue Value: Aerial
  misc_feature: MA Experiment ID: 20000113 Result: Up-regulated in Transcription
  misc_feature: MA Experiment 20000113 PARAMETER Experiment Name: At_42deg_Heat_cDNA_P Parameter: Temperature (deg C) Value: 42 vs. 22
  misc_feature: MA Experiment 20000113 PARAMETER Experiment Name: At_42deg_Heat_cDNA_P Parameter: Timepoint (hr) Value: 8
  misc_feature: MA Experiment 20000113 PARAMETER Experiment Name: At_42deg_Heat_cDNA_P Parameter: Tissue Value: Aerial
  misc_feature: MA Experiment ID: 20000117 Result: Down-regulated in Transcription
  misc_feature: MA Experiment 20000117 PARAMETER Experiment Name: At_100uM_ABA_Mutants_cDNA_P Parameter: Plant Line Value: Columbia
  misc_feature: MA Experiment 20000117 PARAMETER Experiment Name: At_100uM_ABA_Mutants_cDNA_P Parameter: Timepoint (hr) Value: 6
  misc_feature: MA Experiment 20000117 PARAMETER Experiment Name: At_100uM_ABA_Mutants_cDNA_P Parameter: Tissue Value: Aerial
  misc_feature: MA Experiment 20000117 PARAMETER Experiment Name: At_100uM_ABA_Mutants_cDNA_P Parameter: Treatment Value: 100uM ABA vs. No Treatment
  misc_feature: MA Experiment ID: 20000173 Result: Up-regulated in Transcription
  misc_feature: MA Experiment 20000173 PARAMETER Experiment Name: At_42deg_Heat_P Parameter: Age (day) Value: 14
  misc_feature: MA Experiment 20000173 PARAMETER Experiment Name: At_42deg_Heat_P Parameter: Organism Value: A. thaliana
  misc_feature: MA Experiment 20000173 PARAMETER Experiment Name: At_42deg_Heat_P Parameter: Plant Line Value: WS
  misc_feature: MA Experiment 20000173 PARAMETER Experiment Name: At_42deg_Heat_P Parameter: Temperature (deg C) Value: 42 vs. 22
  misc_feature: MA Experiment 20000173 PARAMETER Experiment Name: At_42deg_Heat_P Parameter: Timepoint (hr) Value: 6
  misc_feature: MA Experiment 20000173 PARAMETER Experiment Name: At_42deg_Heat_P Parameter: Tissue Value: Aerial
  misc_feature: MA Experiment ID: 20000265 Result: Down-regulated in Transcription
  misc_feature: MA Experiment 20000265 PARAMETER Experiment Name: At_Open_Flower_P Parameter: Age (day) Value: 21
  misc_feature: MA Experiment 20000265 PARAMETER Experiment Name: At_Open_Flower_P Parameter: Plant Line Value: WS
  misc_feature: MA Experiment 20000265 PARAMETER Experiment Name: At_Open_Flower_P Parameter: Tissue Value: Closed Flower vs. Whole Plant
  misc_feature: MA Experiment ID: 20001248 Result: Down-regulated in Transcription
  misc_feature: MA Experiment 20001248 PARAMETER Experiment Name: At_Far-red-induction_P Parameter: Age (day) Value: 7
  misc_feature: MA Experiment 20001248 PARAMETER Experiment Name: At_Far-red-induction_P Parameter: Light Value: Far-red vs. White
  misc_feature: MA Experiment 20001248 PARAMETER Experiment Name: At_Far-red-induction_P Parameter: Organism Value: A. thaliana
  misc_feature: MA Experiment 20001248 PARAMETER Experiment Name: At_Far-red-induction_P Parameter: Plant Line Value: Columbia
  misc_feature: MA Experiment 20001248 PARAMETER Experiment Name: At_Far-red-induction_P Parameter: Timepoint (hr) Value: 4
  misc_feature: MA Experiment 20001248 PARAMETER Experiment Name: At_Far-red-induction_P Parameter: Tissue Value: Whole Plant
  misc_feature: MA Experiment ID: 20001451 Result: Down-regulated in Transcription
  misc_feature: MA Experiment 20001451 PARAMETER Experiment Name: At_Far-red-induction_P Parameter: Age (day) Value: 7
  misc_feature: MA Experiment 20001451 PARAMETER Experiment Name: At_Far-red-induction_P Parameter: Light Value: Far-red vs. White
  misc_feature: MA Experiment 20001451 PARAMETER Experiment Name: At_Far-red-induction_P Parameter: Organism Value: A. thaliana
  misc_feature: MA Experiment 20001451 PARAMETER Experiment Name: At_Far-red-induction_P Parameter: Plant Line Value: Columbia
  misc_feature: MA Experiment 20001451 PARAMETER Experiment Name: At_Far-red-induction_P Parameter: Timepoint (hr) Value: 24
  misc_feature: MA Experiment 20001451 PARAMETER Experiment Name: At_Far-red-induction_P Parameter: Tissue Value: Whole Plant
atatatacgaaacgtaccacaaatttctaactaaagcattcatagtctctcgaaagcctcttttcagaaccgaagctctttactttcgtccaccgggaaatatgccagtcgacgtagcctcaccggccggaaaaaccgtctgcgtcaccggagctggtggatacatcgcttcttggattgttaagatacttctcgagagaggttacacagtcaaaggaaccgtacggaatccagatgatccgaagaacacacatttgagagaactagaaggaggaaaggagagactgattctgtgcaaagcagatcttcaggactacgaggctcttaaggcggcgattgatggttgcgacggcgtctttcacacggcttctcctgtcaccgacgatccggaacaaatggtggagccggccgtgaatggagccaagtttgtaattaatgctgcggctgaggccaaggtcaagcgcgtggtcatcacctcctccattggtgccgtctacatggacccgaaccgtgaccctgaggctgtcgttgacgaaagttgttggagtgatcttgacttctgcaaaaacaccaagaattggtattgttacggcaagatggtggcggaacaagcggcgtgggagacagcaaaggagaaaggtgttgacttggtggtgttgaatccggtgctggttcttggaccgccgttacagccgacgatcaacgccagtctttaccacgtcctcaaatatctaaccggctcggctaagacttatgctaatttgactcaagcttatgtggatgttcgcgatgtcgcgctggctcatgttctggtctatgaggcaccctcggcctccggacgttatctcctagccgagagtgctcgccaccgcggggaagttgttgagattctggctaagctattcccggagtatcctcttccgaccaagtgcaaggacgagaagaaccctagagccaagccatacaaattcactaaccagaagattaaggacttaggcttagagttcacttccaccaagcaaagcctctacgacacagtcaagagcttacaagagaaaggccatcttgctcctcctcctcctcctccttcagcatcgcaagaatccgtggaaaatggcattaagatcgggtcttgaaaagcttattaattccctcaagtatcccccttaagtatccttaaccattgaagttgcttttgtttgttgtctctggttatgtgaaacctctgtttcaatatgtctcgtctggttatgaatctgtacactcagttctttggccaaaccgtttgatggattttgtagtcaagtcttcatgtttgatctatgtaatagattacacttaagtaaacaacttcatttttattctatgc

SEQ ID NO: 101735 - protein, 377 aa, Arabidopsis thaliana
  peptide (1)..(377): Ceres Seq. ID no. 13608586
  misc_feature (42)..(274): Pfam Name: 3-beta hydroxysteroid dehydrogenase/isomerase family Pfam Description: 3-beta hydroxysteroid dehydrogenase/isomerase
  misc_feature (34)..(377): Homolog of NCBI NO: 15218377 NR Description: cinnamoyl-CoA reductase, putative [Arabidopsis
  misc_feature (34)..(377): Homolog of NCBI NO: 12034897 NR Description: cinnamoyl CoA reductase isoform 1 [Arabidopsis
  misc_feature (34)..(369): Homolog of NCBI NO: 21592757 NR Description: cinnamoyl CoA reductase, putative [Arabidopsis
  misc_feature (43)..(369): Homolog of NCBI NO: 15220833 NR Description: cinnamoyl-CoA reductase, putative [Arabidopsis
  misc_feature (43)..(369): Homolog of NCBI NO: 12407990 NR Description: cinnamoyl CoA reductase CCR2 [Arabidopsis
  misc_feature (34)..(370): Homolog of NCBI NO: 9998901 NR Description: cinnamoyl-CoA reductase [Populus balsamifera
  misc_feature (34)..(370): Homolog of NCBI NO: 2960364 NR Description: cinnamoyl CoA reductase [Populus balsamifera
  misc_feature (34)..(370): Homolog of NCBI NO: 7239228 NR Description: cinnamoyl CoA reductase; CCR [Populus tremuloides]
  misc_feature (40)..(370): Homolog of NCBI NO: 25140434 NR Description: cinnamoyl CoA reductase [Solanum tuberosum]
  misc_feature (34)..(365): Homolog of NCBI NO: 7431407 NR Description: cinnamoyl-CoA reductase (EC 1.2.1.44) CCR - cider
IYETYHKFLTKAFIVSRKPLFRTEALYFRPPGNMPVDVASPAGKTVCVTGAGGYIASWIVKILLERGYTVKGTVRNPDDPKNTHLRELEGGKERLILCKADLQDYEALKAAIDGCDGVFHTASPVTDDPEQMVEPAVNGAKFVINAAAEAKVKRVVITSSIGAVYMDPNRDPEAVVDESCWSDLDFCKNTKNWYCYGKMVAEQAAWETAKEKGVDLVVLNPVLVLGPPLQPTINASLYHVLKYLTGSAKTYANLTQAYVDVRDVALAHVLVYEAPSASGRYLLAESARHRGEVVEILAKLFPEYPLPTKCKDEKNPRAKPYKFTNQKIKDLGLEFTSTKQSLYDTVKSLQEKGHLAPPPPPPSASQESVENGIKIGS

SEQ ID NO: 101736 - protein, 344 aa, Arabidopsis thaliana; identical to SEQ ID NO: 22657
  peptide (1)..(344): Ceres Seq. ID no. 13608587
  misc_feature (9)..(241): Pfam Name: 3-beta hydroxysteroid dehydrogenase/isomerase family Pfam Description: 3-beta hydroxysteroid dehydrogenase/isomerase
  misc_feature (1)..(344): Homolog of NCBI NO: 15218377 NR Description: cinnamoyl-CoA reductase, putative [Arabidopsis
  misc_feature (1)..(344): Homolog of NCBI NO: 12034897 NR Description: cinnamoyl CoA reductase isoform 1 [Arabidopsis
  misc_feature (1)..(336): Homolog of NCBI NO: 21592757 NR Description: cinnamoyl CoA reductase, putative [Arabidopsis
  misc_feature (10)..(336): Homolog of NCBI NO: 15220833 NR Description: cinnamoyl-CoA reductase, putative [Arabidopsis
  misc_feature (10)..(336): Homolog of NCBI NO: 12407990 NR Description: cinnamoyl CoA reductase CCR2 [Arabidopsis
  misc_feature (1)..(337): Homolog of NCBI NO: 9998901 NR Description: cinnamoyl-CoA reductase [Populus balsamifera
  misc_feature (1)..(337): Homolog of NCBI NO: 2960364 NR Description: cinnamoyl CoA reductase [Populus balsamifera
  misc_feature (1)..(337): Homolog of NCBI NO: 7239228 NR Description: cinnamoyl CoA reductase; CCR [Populus tremuloides]
  misc_feature (7)..(337): Homolog of NCBI NO: 25140434 NR Description: cinnamoyl CoA reductase [Solanum tuberosum]
  misc_feature (1)..(332): Homolog of NCBI NO: 7431407 NR Description: cinnamoyl-CoA reductase (EC 1.2.1.44) CCR - cider

SEQ ID NO: 101737 - protein, 246 aa, Arabidopsis thaliana; identical to SEQ ID NO: 22658
  peptide (1)..(246): Ceres Seq. ID no. 13608588
  misc_feature (1)..(143): Pfam Name: 3-beta hydroxysteroid dehydrogenase/isomerase family Pfam Description: 3-beta hydroxysteroid dehydrogenase/isomerase
  misc_feature (1)..(246): Homolog of NCBI NO: 15218377 NR Description: cinnamoyl-CoA reductase, putative [Arabidopsis
  misc_feature (1)..(246): Homolog of NCBI NO: 12034897 NR Description: cinnamoyl CoA reductase isoform 1 [Arabidopsis
  misc_feature (1)..(238): Homolog of NCBI NO: 21592757 NR Description: cinnamoyl CoA reductase, putative [Arabidopsis
  misc_feature (1)..(238): Homolog of NCBI NO: 15220833 NR Description: cinnamoyl-CoA reductase, putative [Arabidopsis
  misc_feature (1)..(238): Homolog of NCBI NO: 12407990 NR Description: cinnamoyl CoA reductase CCR2 [Arabidopsis
  misc_feature (1)..(239): Homolog of NCBI NO: 9998901 NR Description: cinnamoyl-CoA reductase [Populus balsamifera
  misc_feature (1)..(239): Homolog of NCBI NO: 2960364 NR Description: cinnamoyl CoA reductase [Populus balsamifera
  misc_feature (1)..(239): Homolog of NCBI NO: 7239228 NR Description: cinnamoyl CoA reductase; CCR [Populus tremuloides]
  misc_feature (1)..(239): Homolog of NCBI NO: 25140434 NR Description: cinnamoyl CoA reductase [Solanum tuberosum]
  misc_feature (1)..(234): Homolog of NCBI NO: 7431407 NR Description: cinnamoyl-CoA reductase (EC 1.2.1.44) CCR - cider

SEQ ID NO: 101738 - DNA, 835 bp, Arabidopsis thaliana
  misc_feature (1)..(835): Ceres Seq. ID no. 13608589
  misc_feature: MA Experiment ID: 108595 Result: Down-regulated in Transcription
  misc_feature: MA Experiment 108595 PARAMETER Experiment Name: At_Ler-pi_Ovule_cDNA_P Parameter: Plant Line Value: null
gaagaaagaaagagaaaagaaattgagaagaaaaaagaaaaaaaggtgaccgtattctccgtcgattgtagccgcccgaagaaatatcttctcctctctcgtttaaccacgaatttgctctgatattagtgtttctctagccatggcgaacgcggcatctggaatggctgtgcatgatgattgcaagctgagatttctggaactgaaggctaaaaggacacaccgtttcatagtttacaagattgaggagaagcagaagcaagttgttgttgagaaagttggtcaaccgatccaaacttacgaggagtttgcagcatgtcttccagctgatgaatgccgttacgccatttacgattttgactttgtaactgctgagaattgccagaagagcaagatcttcttcatcgcgtggtgtccggatattgctaaggtgagaagcaagatgatctacgcgagctccaaggacaggttcaagagggaactagatgggattcaagtagagctacaggcaactgatccaacagagatggatctcgatgttttcaggagccgtgccaactaaaaagtaaaaaccaaagtttattatcatcatccccttgaaagatctattctcttattctgttatttttgagtgatggtactggtacttgattatgtttttacattgtgttgtgaagttatgaacctataaacaacttcattctatcggtgtttcggtcttgtgttcgatgttgtctttggttttaaaatggtgtgtaaggaccccaaatcgtctattgaagatgaacccttttaggtatatcattgatgaaatggatgattaaaagtttctctc

SEQ ID NO: 101739 - protein, 139 aa, Arabidopsis thaliana; identical to SEQ ID NO: 26126
  peptide (1)..(139): Ceres Seq. ID no. 13608590
  misc_feature (12)..(139): Pfam Name: Cofilin/tropomyosin-type actin-binding protein Pfam Description: Cofilin/tropomyosin-type actin-binding protein
  misc_feature (1)..(139): Homolog of NCBI NO: 15231309 NR Description: actin depolymerizing factor 1 (ADF1) [Arabidopsis
  misc_feature (1)..(139): Homolog of NCBI NO: 30697300 NR Description: actin depolymerizing factor 4 - like protein
  misc_feature (1)..(139): Homolog of NCBI NO: 4185511 NR Description: actin depolymerizing factor 4 [Arabidopsis
  misc_feature (8)..(139): Homolog of NCBI NO: 30697303 NR Description: actin depolymerizing factor 4 - like protein thaliana] >gi|15215859|gb|AAK91473.1| AT5g59890/mmn10_110 thaliana] >gi|19699262|gb|AAL90997.1| At1g05180/YUP8H12_21
  misc_feature (1)..(139): Homolog of NCBI NO: 17366768 NR Description: Actin-depolymerizing factor 1 (ADF 1)
  misc_feature (1)..(138): Homolog of NCBI NO: 17366765 NR Description: Actin-depolymerizing factor 2 (ADF 2)
  misc_feature (1)..(139): Homolog of NCBI NO: 30697295 NR Description: actin depolymerizing factor 3 - like protein
  misc_feature (1)..(139): Homolog of NCBI NO: 18408116 NR Description: actin depolymerizing factor 2 (ADF2) [Arabidopsis
  misc_feature (1)..(139): Homolog of NCBI NO: 38564721 NR Description: putative actin-depolymerizing factor 2
  misc_feature (8)..(139): Homolog of NCBI NO: 11276987 NR Description: actin depolymerizing factor 2 - Arabidopsis >gi|7339501|emb|CAB82824.1| actin depolymerizing factor 2 (ADF2)

SEQ ID NO: 101740 - protein, 132 aa, Arabidopsis thaliana; identical to SEQ ID NO: 26127
  peptide (1)..(132): Ceres Seq. ID no. 13608591
  misc_feature (5)..(132): Pfam Name: Cofilin/tropomyosin-type actin-binding protein Pfam Description: Cofilin/tropomyosin-type actin-binding protein
  misc_feature (1)..(132): Homolog of NCBI NO: 15231309 NR Description: actin depolymerizing factor 1 (ADF1) [Arabidopsis
  misc_feature (1)..(132): Homolog of NCBI NO: 30697300 NR Description: actin depolymerizing factor 4 - like protein
  misc_feature (1)..(132): Homolog of NCBI NO: 4185511 NR Description: actin depolymerizing factor 4 [Arabidopsis
  misc_feature (1)..(132): Homolog of NCBI NO: 30697303 NR Description: actin depolymerizing factor 4 - like protein thaliana] >gi|15215859|gb|AAK91473.1| AT5g59890/mmn10_110 thaliana] >gi|19699262|gb|AAL90997.1| At1g05180/YUP8H12_21
  misc_feature (1)..(132): Homolog of NCBI NO: 17366768 NR Description: Actin-depolymerizing factor 1 (ADF 1)
  misc_feature (1)..(131): Homolog of NCBI NO: 17366765 NR Description: Actin-depolymerizing factor 2 (ADF 2)
  misc_feature (1)..(132): Homolog of NCBI NO: 30697295 NR Description: actin depolymerizing factor 3 - like protein
  misc_feature (1)..(132): Homolog of NCBI NO: 18408116 NR Description: actin depolymerizing factor 2 (ADF2) [Arabidopsis
  misc_feature (1)..(132): Homolog of NCBI NO: 38564721 NR Description: putative actin-depolymerizing factor 2
  misc_feature (1)..(132): Homolog of NCBI NO: 11276987 NR Description: actin depolymerizing factor 2 - Arabidopsis >gi|7339501|emb|CAB82824.1| actin depolymerizing factor 2 (ADF2)

SEQ ID NO: 101741 - DNA, 1395 bp, Arabidopsis thaliana
  misc_feature (1)..(1395): Ceres Seq. ID no. 13608592
  misc_feature: MA Experiment ID: 108573 Result: Up-regulated in Transcription
  misc_feature: MA Experiment 108573 PARAMETER Experiment Name: At_Drought_cDNA_P Parameter: Timepoint (hr) Value: 6
  misc_feature: MA Experiment 108573 PARAMETER Experiment Name: At_Drought_cDNA_P Parameter: Tissue Value: Aerial
  misc_feature: MA Experiment 108573 PARAMETER Experiment Name: At_Drought_cDNA_P Parameter: Treatment Value: Drought vs. No Drought
  misc_feature: MA Experiment ID: 20000069 Result: Up-regulated in Transcription
  misc_feature: MA Experiment 20000069 PARAMETER Experiment Name: At_100uM_ABA_Mutants_cDNA_P Parameter: Plant Line Value: CS23
  misc_feature: MA Experiment 20000069 PARAMETER Experiment Name: At_100uM_ABA_Mutants_cDNA_P Parameter: Timepoint (hr) Value: 6
  misc_feature: MA Experiment 20000069 PARAMETER Experiment Name: At_100uM_ABA_Mutants_cDNA_P Parameter: Tissue Value: Aerial
  misc_feature: MA Experiment 20000069 PARAMETER Experiment Name: At_100uM_ABA_Mutants_cDNA_P Parameter: Treatment Value: 100uM ABA vs. No Treatment
  misc_feature: MA Experiment ID: 20000070 Result: Up-regulated in Transcription
  misc_feature: MA Experiment 20000070 PARAMETER Experiment Name: At_100uM_ABA_Mutants_cDNA_P Parameter: Plant Line Value: CS24
  misc_feature: MA Experiment 20000070 PARAMETER Experiment Name: At_100uM_ABA_Mutants_cDNA_P Parameter: Timepoint (hr) Value: 6
  misc_feature: MA Experiment 20000070 PARAMETER Experiment Name: At_100uM_ABA_Mutants_cDNA_P Parameter: Tissue Value: Aerial
  misc_feature: MA Experiment 20000070 PARAMETER Experiment Name: At_100uM_ABA_Mutants_cDNA_P Parameter: Treatment Value: 100uM ABA vs. No Treatment
  misc_feature: MA Experiment ID: 20000071 Result: Up-regulated in Transcription
  misc_feature: MA Experiment 20000071 PARAMETER Experiment Name: At_100uM_ABA_Mutants_cDNA_P Parameter: Plant Line Value: CS8104
  misc_feature: MA Experiment 20000071 PARAMETER Experiment Name: At_100uM_ABA_Mutants_cDNA_P Parameter: Timepoint (hr) Value: 6
  misc_feature: MA Experiment 20000071 PARAMETER Experiment Name: At_100uM_ABA_Mutants_cDNA_P Parameter: Tissue Value: Aerial
  misc_feature: MA Experiment 20000071 PARAMETER Experiment Name: At_100uM_ABA_Mutants_cDNA_P Parameter: Treatment Value: 100uM ABA vs. No Treatment
  misc_feature: MA Experiment ID: 20000090 Result: Up-regulated in Transcription
  misc_feature: MA Experiment ID: 20000113 Result: Down-regulated in Transcription
  misc_feature: MA Experiment 20000113 PARAMETER Experiment Name: At_42deg_Heat_cDNA_P Parameter: Temperature (deg C) Value: 42 vs. 22
  misc_feature: MA Experiment 20000113 PARAMETER Experiment Name: At_42deg_Heat_cDNA_P Parameter: Timepoint (hr) Value: 8
  misc_feature: MA Experiment 20000113 PARAMETER Experiment Name: At_42deg_Heat_cDNA_P Parameter: Tissue Value: Aerial
  misc_feature: MA Experiment ID: 20000117 Result: Up-regulated in Transcription
  misc_feature: MA Experiment 20000117 PARAMETER Experiment Name: At_100uM_ABA_Mutants_cDNA_P Parameter: Plant Line Value: Columbia
  misc_feature: MA Experiment 20000117 PARAMETER Experiment Name: At_100uM_ABA_Mutants_cDNA_P Parameter: Timepoint (hr) Value: 6
  misc_feature: MA Experiment 20000117 PARAMETER Experiment Name: At_100uM_ABA_Mutants_cDNA_P Parameter: Tissue Value: Aerial
  misc_feature: MA Experiment 20000117 PARAMETER Experiment Name: At_100uM_ABA_Mutants_cDNA_P Parameter: Treatment Value: 100uM ABA vs. No Treatment
  misc_feature: MA Experiment ID: 20000179 Result: Up-regulated in Transcription
  misc_feature: MA Experiment 20000179 PARAMETER Experiment Name: At_Germinating_Seeds_P Parameter: Age (hr) Value: 6 vs. 0
  misc_feature: MA Experiment 20000179 PARAMETER Experiment Name: At_Germinating_Seeds_P Parameter: Tissue Value: Germinating Seeds
  misc_feature: MA Experiment ID: 20000184 Result: Down-regulated in Transcription
  misc_feature: MA Experiment 20000184 PARAMETER Experiment Name: At_Shoots__P Parameter: Age (day) Value: 7
  misc_feature: MA Experiment 20000184 PARAMETER Experiment Name: At_Shoots__P Parameter: Tissue Value: Shoots vs. Whole Plant
  misc_feature: MA Experiment ID: 20000264 Result: Down-regulated in Transcription
  misc_feature: MA Experiment 20000264 PARAMETER Experiment Name: At_Open_Flower_P Parameter: Age (day) Value: 21
  misc_feature: MA Experiment 20000264 PARAMETER Experiment Name: At_Open_Flower_P Parameter: Plant Line Value: WS
  misc_feature: MA Experiment 20000264 PARAMETER Experiment Name: At_Open_Flower_P Parameter: Tissue Value: Open Flower vs. Whole Plant
  misc_feature: MA Experiment ID: 20000265 Result: Down-regulated in Transcription
  misc_feature: MA Experiment 20000265 PARAMETER Experiment Name: At_Open_Flower_P Parameter: Age (day) Value: 21
  misc_feature: MA Experiment 20000265 PARAMETER Experiment Name: At_Open_Flower_P Parameter: Plant Line Value: WS
  misc_feature: MA Experiment 20000265 PARAMETER Experiment Name: At_Open_Flower_P Parameter: Tissue Value: Closed Flower vs. Whole Plant
  misc_feature: MA Experiment ID: 20000286 Result: Down-regulated in Transcription
  misc_feature: MA Experiment 20000286 PARAMETER Experiment Name: At_Open_Flower_P Parameter: Age (day) Value: 21
  misc_feature: MA Experiment 20000286 PARAMETER Experiment Name: At_Open_Flower_P Parameter: Plant Line Value: WS
  misc_feature: MA Experiment 20000286 PARAMETER Experiment Name: At_Open_Flower_P Parameter: Tissue Value: Half Open vs. Whole Plant
  misc_feature: MA Experiment ID: 20000438 Result: Down-regulated in Transcription
  misc_feature: MA Experiment 20000438 PARAMETER Experiment Name: At_Shoots__P Parameter: Age (day) Value: 14
  misc_feature: MA Experiment 20000438 PARAMETER Experiment Name: At_Shoots__P Parameter: Tissue Value: Shoots vs. Whole Plant
  misc_feature: MA Experiment ID: 20000794 Result: Down-regulated in Transcription
  misc_feature: MA Experiment 20000794 PARAMETER Experiment Name: At_Petals_P Parameter: Age (day) Value: 23-25 days
  misc_feature: MA Experiment 20000794 PARAMETER Experiment Name: At_Petals_P Parameter: Plant Line Value: WS
  misc_feature: MA Experiment 20000794 PARAMETER Experiment Name: At_Petals_P Parameter: Tissue Value: Petals vs. Whole plant
  misc_feature: MA Experiment ID: 20001451 Result: Down-regulated in Transcription
  misc_feature: MA Experiment 20001451 PARAMETER Experiment Name: At_Far-red-induction_P Parameter: Age (day) Value: 7
  misc_feature: MA Experiment 20001451 PARAMETER Experiment Name: At_Far-red-induction_P Parameter: Light Value: Far-red vs. White
  misc_feature: MA Experiment 20001451 PARAMETER Experiment Name: At_Far-red-induction_P Parameter: Organism Value: A. thaliana
  misc_feature: MA Experiment 20001451 PARAMETER Experiment Name: At_Far-red-induction_P Parameter: Plant Line Value: Columbia
  misc_feature: MA Experiment 20001451 PARAMETER Experiment Name: At_Far-red-induction_P Parameter: Timepoint (hr) Value: 24
  misc_feature: MA Experiment 20001451 PARAMETER Experiment Name: At_Far-red-induction_P Parameter: Tissue Value: Whole Plant
  misc_feature: MA Experiment ID: 20001905 Result: Up-regulated in Transcription
  misc_feature: MA Experiment 20001905 PARAMETER Experiment Name: At_Drought_Reproduction_P Parameter: Age (day) Value: 40
  misc_feature: MA Experiment 20001905 PARAMETER Experiment Name: At_Drought_Reproduction_P Parameter: Organism Value: A. thaliana
  misc_feature: MA Experiment 20001905 PARAMETER Experiment Name: At_Drought_Reproduction_P Parameter: Plant Line Value: WS
  misc_feature: MA Experiment 20001905 PARAMETER Experiment Name: At_Drought_Reproduction_P Parameter: Timepoint (day) Value: 10
  misc_feature: MA Experiment 20001905 PARAMETER Experiment Name: At_Drought_Reproduction_P Parameter: Tissue Value: Rosettes
  misc_feature: MA Experiment 20001905 PARAMETER Experiment Name: At_Drought_Reproduction_P Parameter: Treatment Value: Drought vs. No Drought
atctaacttttccagataatatattcaaaattttacagagaggaagaagaagttcccgacacttgtgagagactataaaagtatacgatctcctcctctcgctctcttcagatcacaaagttttcgtttttagggttctctcatcgatctcggtttgtgatcttcttcttcatcaatggcgtctagtgataaacaaacaagcccaaagcctcctccttcaccgtctcctctccgtaattccaagttttgtcagtcaaatatgaggattttgatctcaggaggagctggattcattggttctcaccttgttgataagctgatggaaaacgaaaagaatgaggtgattgttgctgataactatttcactggttcaaaggacaaccttaagaagtggattggtcatccaagatttgagcttatccgtcacgatgtcacggagccacttttgatcgaggttgatcagatttaccatcttgcatgtcctgcttctcctatcttctacaagtacaaccctgtgaagacaatcaagaccaatgtgattggcacactgaacatgctaggtctcgccaagcgtgttggagcaaggattttgcttacctcaacctcggaggtatatggagatcctctcattcatccccagcctgagagctattggggaaatgtcaacccaattggtgttaggagctgttatgatgaaggcaagcgtgttgctgagaccttgatgtttgactaccacaggcaacatggaattgaaatccgcattgctagaatcttcaacacttatggtccacgcatgaacatcgatgatggccgtgttgtaagcaacttcattgcacaagcactccggggtgaggcattgactgttcagaaaccagggacacagactcgcagtttctgttatgtatctgacatggttgatggacttatgcgcctcatggaaggagatgacactggtcccatcaacatcggtaacccaggtgagtttacaatggtggagttggctgagacagtgaaagagctgattaacccgagcatagagataaagatggttgagaacacaccggatgatccaagacagaggaagccagacatcacaaaggctaaagaagtgttgggatgggaaccaaaggtgaagcttcgtgaaggccttccacttatggaagaagacttcaggctaaggctcggagtccacaagaactaaaactccatcaccgatcacacgcaaacgtgaatgcactacataaccaagttctacttttcatattccatggtgcaagcggttggtttcatataatatgtttctactttccacagtcgaaattattcctagagaaaaataaagattatgaacgaatgctttttatatttaaggaagataaaatttactttcttgcc

SEQ ID NO: 101742 - protein, 341 aa, Arabidopsis thaliana; identical to SEQ ID NO: 21850
  peptide (1)..(341): Ceres Seq. ID no. 13608593
  misc_feature (31)..(337): Pfam Name: NAD dependent epimerase/dehydratase family Pfam Description: NAD dependent epimerase/dehydratase family
  misc_feature (1)..(341): Homolog of NCBI NO: 15231432 NR Description: NAD-dependent epimerase/dehydratase family
  misc_feature (2)..(341): Homolog of NCBI NO: 15237853 NR Description: NAD-dependent epimerase/dehydratase family
  misc_feature (2)..(341): Homolog of NCBI NO: 14030703 NR Description: AT5g59290/mnc17_180 [Arabidopsis thaliana]
  misc_feature (3)..(340): Homolog of NCBI NO: 15226950 NR Description: NAD-dependent epimerase/dehydratase family
  misc_feature (1)..(341): Homolog of NCBI NO: 13591616 NR Description: UDP-D-glucuronate carboxy-lyase [Pisum sativum]
  misc_feature (1)..(340): Homolog of NCBI NO: 11270075 NR Description: dTDPglucose 4,6-dehydratase (EC 4.2.1.46)
  misc_feature (3)..(340): Homolog of NCBI NO: 18447934 NR Description: UDP-glucuronic acid decarboxylase [Oryza sativa
  misc_feature (3)..(340): Homolog of NCBI NO: 11121508 NR Description: d-TDP-glucose dehydratase [Phragmites australis]
  misc_feature (78)..(341): Homolog of NCBI NO: 2351580 NR Description: thymidine diphospho-glucose 4-6-dehydratase
  misc_feature (29)..(341): Homolog of NCBI NO: 15227109 NR Description: NAD-dependent epimerase/dehydratase family

SEQ ID NO: 101743 - protein, 313 aa, Arabidopsis thaliana; identical to SEQ ID NO: 21851
  peptide (1)..(313): Ceres Seq. ID no. 13608594
  misc_feature (3)..(309): Pfam Name: NAD dependent epimerase/dehydratase family Pfam Description: NAD dependent epimerase/dehydratase family
  misc_feature (1)..(313): Homolog of NCBI NO: 15231432 NR Description: NAD-dependent epimerase/dehydratase family
  misc_feature (1)..(313): Homolog of NCBI NO: 15237853 NR Description: NAD-dependent epimerase/dehydratase family
  misc_feature (1)..(313): Homolog of NCBI NO: 14030703 NR Description: AT5g59290/mnc17_180 [Arabidopsis thaliana]
  misc_feature (1)..(312): Homolog of NCBI NO: 15226950 NR Description: NAD-dependent epimerase/dehydratase family
  misc_feature (1)..(313): Homolog of NCBI NO: 13591616 NR Description: UDP-D-glucuronate carboxy-lyase [Pisum sativum]
  misc_feature (1)..(312): Homolog of NCBI NO: 11270075 NR Description: dTDPglucose 4,6-dehydratase (EC 4.2.1.46)
  misc_feature (1)..(312): Homolog of NCBI NO: 18447934 NR Description: UDP-glucuronic acid decarboxylase [Oryza sativa
  misc_feature (1)..(312): Homolog of NCBI NO: 11121508 NR Description: d-TDP-glucose dehydratase [Phragmites australis]
  misc_feature (50)..(313): Homolog of NCBI NO: 2351580 NR Description: thymidine diphospho-glucose 4-6-dehydratase
  misc_feature (1)..(313): Homolog of NCBI NO: 15227109 NR Description: NAD-dependent epimerase/dehydratase family

SEQ ID NO: 101744 - protein, 293 aa, Arabidopsis thaliana; identical to SEQ ID NO: 21852
  peptide (1)..(293): Ceres Seq. ID no. 13608595
  misc_feature (1)..(289): Pfam Name: NAD dependent epimerase/dehydratase family Pfam Description: NAD dependent epimerase/dehydratase family
  misc_feature (1)..(293): Homolog of NCBI NO: 15231432 NR Description: NAD-dependent epimerase/dehydratase family
  misc_feature (1)..(293): Homolog of NCBI NO: 15237853 NR Description: NAD-dependent epimerase/dehydratase family
  misc_feature (1)..(293): Homolog of NCBI NO: 14030703 NR Description: AT5g59290/mnc17_180 [Arabidopsis thaliana]
  misc_feature (1)..(292): Homolog of NCBI NO: 15226950 NR Description: NAD-dependent epimerase/dehydratase family
  misc_feature (1)..(293): Homolog of NCBI NO: 13591616 NR Description: UDP-D-glucuronate carboxy-lyase [Pisum sativum]
  misc_feature (1)..(292): Homolog of NCBI NO: 11270075 NR Description: dTDPglucose 4,6-dehydratase (EC 4.2.1.46)
  misc_feature (1)..(292): Homolog of NCBI NO: 18447934 NR Description: UDP-glucuronic acid decarboxylase [Oryza sativa
  misc_feature (1)..(292): Homolog of NCBI NO: 11121508 NR Description: d-TDP-glucose dehydratase [Phragmites australis]
  misc_feature (30)..(293): Homolog of NCBI NO: 2351580 NR Description: thymidine diphospho-glucose 4-6-dehydratase
  misc_feature (1)..(293): Homolog of NCBI NO: 15227109 NR Description: NAD-dependent epimerase/dehydratase family

SEQ ID NO: 101745 - DNA, 1222 bp, Arabidopsis thaliana
  misc_feature (1)..(1222): Ceres Seq. ID no. 13608601
  misc_feature: MA Experiment ID: 20000111 Result: Down-regulated in Transcription
  misc_feature: MA Experiment 20000111 PARAMETER Experiment Name: At_42deg_Heat_cDNA_P Parameter: Temperature (deg C) Value: 42 vs. 22
  misc_feature: MA Experiment 20000111 PARAMETER Experiment Name: At_42deg_Heat_cDNA_P Parameter: Timepoint (hr) Value: 6
  misc_feature: MA Experiment 20000111 PARAMETER Experiment Name: At_42deg_Heat_cDNA_P Parameter: Tissue Value: Aerial
  misc_feature: MA Experiment ID: 20000113 Result: Down-regulated in Transcription
  misc_feature: MA Experiment 20000113 PARAMETER Experiment Name: At_42deg_Heat_cDNA_P Parameter: Temperature (deg C) Value: 42 vs. 22
  misc_feature: MA Experiment 20000113 PARAMETER Experiment Name: At_42deg_Heat_cDNA_P Parameter: Timepoint (hr) Value: 8
  misc_feature: MA Experiment 20000113 PARAMETER Experiment Name: At_42deg_Heat_cDNA_P Parameter: Tissue Value: Aerial
  misc_feature: MA Experiment ID: 20000224 Result: Down-regulated in Transcription
  misc_feature: MA Experiment ID: 20000264 Result: Down-regulated in Transcription
  misc_feature: MA Experiment 20000264 PARAMETER Experiment Name: At_Open_Flower_P Parameter: Age (day) Value: 21
  misc_feature: MA Experiment 20000264 PARAMETER Experiment Name: At_Open_Flower_P Parameter: Plant Line Value: WS
  misc_feature: MA Experiment 20000264 PARAMETER Experiment Name: At_Open_Flower_P Parameter: Tissue Value: Open Flower vs. Whole Plant
attgctcctctcctctttctcacgaagaagaagacgaagcccatcaaattaaacaagaaaaattccattttcctccattgattgtgagtgagaacaaacatttaaagcttcttactcaaagtttctttctttatagatctcaaaaaattcgatatttttctcgattcatccgccattaaggttttattgcgagatcgaagagagaaggagaaaatgacgcatagagtagatcaggaatatgattatttgtttaagattgtgttgattggtgattctggtgttgggaaatcgaatatcttgtcgagattcaccaggaatgagttttgcttggaatctaaatccactattggtgttgaattcgccaccagaactactcaggttgaaggaaagaccattaaggcccagatctgggacactgcaggtcaggagaggtacagggcgatcacaagcgcgtattacagaggcgcagtgggtgcacttcttgtctacgacattactaagagacagacctttgacaatgttttaaggtggctgcgcgaactgagagaccatgcagattccaacattgtgatcatgatggctgggaacaaatccgatctgaaccacttgagatccgttgctgaggaagatggtcaaagtttggctgagaaggaaggtctctctttcctggagacatctgctcttgaagcaacaaacgtcgagaaagcgtttcagaccatcttaggtgagatctaccatatcataagcaaaaaggcactggctgcacaagaagcagcagcagctaattctgcaatccctgggcaaggaactacgattaacgtcgatgacacatctggaggcgcgaaacgagcatgttgctcttcttaaactaaaggtaaactgtttatttcggttgctccttgttcagagattcaaacttttgttttcactggcttctcttcttttcaagttttggctgatgaaacgtaactatgcaagactatgtagaatactctgtttttattctcttcggtttggggtttgtgttcagtttaaagcttgttagtagtatacttagaatcttctggtgcttgcttgctttcccttcttcttcccttggtgtgtttctattgatttctggtttataaagtattttttctatctccggtttagtccggttcgtcttggctttgtttaatcaaatcattgattcctctcttatcaatgtattgtatccggttcc

SEQ ID NO: 101746 - protein, 217 aa, Arabidopsis thaliana; identical to SEQ ID NO: 23142
  peptide (1)..(217): Ceres Seq. ID no. 13608602
  misc_feature (14)..(175): Pfam Name: Ras family Pfam Description: Ras family
  misc_feature (1)..(217): Homolog of NCBI NO: 15232652 NR Description: GTP-binding protein, putative [Arabidopsis
  misc_feature (1)..(217): Homolog of NCBI NO: 15237828 NR Description: GTP binding protein, putative [Arabidopsis
  misc_feature (1)..(217): Homolog of NCBI NO: 3024501 NR Description: RAS-RELATED PROTEIN RAB11C
  misc_feature (1)..(217): Homolog of NCBI NO: 15222396 NR Description: GTP-binding protein, putative [Arabidopsis
  misc_feature (1)..(217): Homolog of NCBI NO: 3024528 NR Description: RAS-RELATED PROTEIN RAB2BV
  misc_feature (58)..(217): Homolog of NCBI NO: 25294121 NR Description: protein F22G5.24 [imported] - Arabidopsis >gi|8778562|gb|AAF79570.1|AC022464_28 F22G5.24 [Arabidopsis
  misc_feature (1)..(56): Homolog of NCBI NO: 25294121 NR Description: protein F22G5.24 [imported] - Arabidopsis >gi|8778562|gb|AAF79570.1|AC022464_28 F22G5.24 [Arabidopsis
  misc_feature (1)..(217): Homolog of NCBI NO: 34897394 NR Description: Ras-related GTP-binding protein [Oryza sativa
  misc_feature (1)..(217): Homolog of NCBI NO: 3024506 NR Description: RAS-RELATED PROTEIN RAB11A
  misc_feature (1)..(217): Homolog of NCBI NO: 34908298 NR Description: Ras-related GTP-binding protein [Oryza sativa

SEQ ID NO: 101747 - DNA, 2064 bp, Arabidopsis thaliana
  misc_feature (1)..(2064): Ceres Seq. ID no. 13608603
  misc_feature: MA Experiment ID: 20000265 Result: Down-regulated in Transcription
  misc_feature: MA Experiment 20000265 PARAMETER Experiment Name: At_Open_Flower_P Parameter: Age (day) Value: 21
  misc_feature: MA Experiment 20000265 PARAMETER Experiment Name: At_Open_Flower_P Parameter: Plant Line Value: WS
  misc_feature: MA Experiment 20000265 PARAMETER Experiment Name: At_Open_Flower_P Parameter: Tissue Value: Closed Flower vs. Whole Plant
  misc_feature: MA Experiment ID: 20000286 Result: Down-regulated in Transcription
  misc_feature: MA Experiment 20000286 PARAMETER Experiment Name: At_Open_Flower_P Parameter: Age (day) Value: 21
  misc_feature: MA Experiment 20000286 PARAMETER Experiment Name: At_Open_Flower_P Parameter: Plant Line Value: WS
  misc_feature: MA Experiment 20000286 PARAMETER Experiment Name: At_Open_Flower_P Parameter: Tissue Value: Half Open vs. Whole Plant
  misc_feature: MA Experiment ID: 20000573 Result: Down-regulated in Transcription
  misc_feature: MA Experiment 20000573 PARAMETER Experiment Name: At_100uM_ABA_Mutants__P Parameter: Organism Value: A. thaliana
  misc_feature: MA Experiment 20000573 PARAMETER Experiment Name: At_100uM_ABA_Mutants__P Parameter: Plant Line Value: CS22 vs. Ler wt
  misc_feature: MA Experiment 20000573 PARAMETER Experiment Name: At_100uM_ABA_Mutants__P Parameter: Timepoint (hr) Value: N/A
  misc_feature: MA Experiment 20000573 PARAMETER Experiment Name: At_100uM_ABA_Mutants__P Parameter: Tissue Value: Whole Plant
  misc_feature: MA Experiment 20000573 PARAMETER Experiment Name: At_100uM_ABA_Mutants__P Parameter: Treatment Value: None
  misc_feature: MA Experiment ID: 20000574 Result: Down-regulated in Transcription
  misc_feature: MA Experiment 20000574 PARAMETER Experiment Name: At_100uM_ABA_Mutants__P Parameter: Organism Value: A. thaliana
  misc_feature: MA Experiment 20000574 PARAMETER Experiment Name: At_100uM_ABA_Mutants__P Parameter: Plant Line Value: CS23 vs. Ler wt
  misc_feature: MA Experiment 20000574 PARAMETER Experiment Name: At_100uM_ABA_Mutants__P Parameter: Timepoint (hr) Value: N/A
  misc_feature: MA Experiment 20000574 PARAMETER Experiment Name: At_100uM_ABA_Mutants__P Parameter: Tissue Value: Whole Plant
  misc_feature: MA Experiment 20000574 PARAMETER Experiment Name: At_100uM_ABA_Mutants__P Parameter: Treatment Value: None
  misc_feature: MA Experiment ID: 20000794 Result: Down-regulated in Transcription
  misc_feature: MA Experiment 20000794 PARAMETER Experiment Name: At_Petals_P Parameter: Age (day) Value: 23-25 days
  misc_feature: MA Experiment 20000794 PARAMETER Experiment Name: At_Petals_P Parameter: Plant Line Value: WS
  misc_feature: MA Experiment 20000794 PARAMETER Experiment Name: At_Petals_P Parameter: Tissue Value: Petals vs. Whole plant
atggaggacgagccacttttaccacttatgggcctgttattagtggcccaagacgagacggatgtcggatcatgcgatttggctgttgcaatccatagacaccaccgagcgagcatcttcttcttcttcttcgctaaccggagtaatcgtaagcagcttcgactggtgaaaatgtgttactctctctctatacaatcttcaattgacttccataatcgaaacgctctaaaaatccatggagatcgagcaattttgacttcgaacttacctacactcaggaggattccgtttttgccggagcgagatcgccggagaaagttggtcctctgtaccgggagagtcgtaaactcattgaaattcaccggaaacacttccgtcgatctatgtggtattcctcgtcatcgattaagagtttcttgcagcgatgctcgccgtacaccggaagaaacggcggcggagttgacggcgcaacccaatttttcagaatttataacgtcggagagagtcaaagtggttgcgatgctcgcgcttgctttggcgctatgcaatgcggatcgtgttgtgatgtccgttgcgattgttcctctttcgctttctcgtggatggagcaaatcattttccggtatcgttcagtcatcgtttctatggggatacttaatttctccaattgctggtggaactttggtggaccgttatggtggtaaagtagtcatggcgtggggtgtggctttgtggtcgttggcaacttttcttaccccttgggcggctgatagttctttgtgggctcttcttgctgcaagagcgatggttggggttgctgaaggagtggctcttccttgtatgaacaacatggttgcgagatggtttcccccaacagaacgttctagggcggttggtattgcaatggcagggtttcagcttgggaatgttgtaggactcatgttgtctcctattcttatgtctcaaggaggtatatatggcccatttgtaatttttggactatcggggttcctttggttgctcgtgtggctctctgcaacgtcaagtgcaccagatcgacatcctcagattacaaagtctgaacttgagtatataaagcaaaagaagcaaatatctactatggagaacaaacgaattagcacaagtggaatacctccttttggacgccttctctccaagatgccgacttgggctgttatagttgcaaattccatgcatagctggggtttctttgtgattctttcatggatgcccatatacttcaattcagtatatcatgtgaacctcaaacaagctgcttggtttagtgccgttccatggagtatgatggctttcacaggatacattgctggtttttggtcggatttgttgatacggcgtggtacaagcatcaccttaacgcgaaaaatcatgcagtccattggtttcattggtcctggaattgctctcattggtctaacgacggcaaaacaacctttagtggcatcagcctggcttagtttagccgttgggcttaaatcattcagccatttggggtttcttattaatcttcaggaaattgctcccgaatattccggtgttctacatggaatgtgtcttactgctgggacattagctgcgatagttggcacagttggagctggtttctttgtagaactattgggctccttccagggattcatccttcttacagcaatattgtatctcctttctgctctcttttacaacatatacgcaactggagaaagagtagattttgacacaacagcttgaaggtgaccacaaagtcacttaataggtggatcagctagtaaagaagttgcaactctatatagaatcagcttttgctctccaagtaaataccaggaacaagacctcggctttgtacagaaactagaatttcttcgtctcgatggttctctccttgataaataaatgaaaaaatgtagcaagttatctatgttcaatgtcgtgaatcgccttagagaagataatgaaaacaatgttgacgtagtatttgtttgttatacggttcaatggtatagagacacgaagactttcatc

SEQ ID NO: 101748 - protein, 590 aa, Arabidopsis thaliana
  peptide (1)..(590): Ceres Seq. ID no. 13608604
  misc_feature (171)..(588): Pfam Name: Sugar (and other) transporter Pfam Description: Sugar (and other) transporter
  misc_feature (58)..(590): Homolog of NCBI NO: 22331630 NR Description: transporter - related [Arabidopsis thaliana]
  misc_feature (58)..(590): Homolog of NCBI NO: 17064732 NR Description: putative protein [Arabidopsis thaliana]
  misc_feature (60)..(589): Homolog of NCBI NO: 11357408 NR Description: hypothetical protein F13I12.30 - Arabidopsis >gi|6522579|emb|CAB61944.1| putative protein [Arabidopsis
  misc_feature (85)..(589): Homolog of NCBI NO: 34908356 NR Description: P0529H11.31 [Oryza sativa (japonica
  misc_feature (135)..(530): Homolog of NCBI NO: 15224438 NR Description: transporter - related [Arabidopsis thaliana]
  misc_feature (156)..(584): Homolog of NCBI NO: 30678625 NR Description: expressed protein [Arabidopsis thaliana]
  misc_feature (148)..(584): Homolog of NCBI NO: 34903342 NR Description: unnamed protein product [Oryza sativa (japonica group)] >gi|6498428|dbj|BAA87831.1| unnamed protein product
  misc_feature (158)..(584): Homolog of NCBI NO: 15227589 NR Description: inorganic phosphate transporter, putative
  misc_feature (158)..(584): Homolog of NCBI NO: 17064976 NR Description: putative Na+-dependent inorganic phosphate
  misc_feature (158)..(471): Homolog of NCBI NO: 30684317 NR Description: inorganic phosphate transporter, putative
MEDEPLLPLMGLLLVAQDETDVGSCDLAVAIHRHHRASIFFFFFANRSNRKQLRLVKMCYSLSIQSSIDFHNRNALKIHGDRAILTSNLPTLRRIPFLPERDRRRKLVLCTGRVVNSLKFTGNTSVDLCGIPRHRLRVSCSDARRTPEETAAELTAQPNFSEFITSERVKVVAMLALALALCNADRVVMSVAIVPLSLSRGWSKSFSGIVQSSFLWGYLISPIAGGTLVDRYGGKVVMAWGVALWSLATFLTPWAADSSLWALLAARAMVGVAEGVALPCMNNMVARWFPPTERSRAVGIAMAGFQLGNVVGLMLSPILMSQGGIYGPFVIFGLSGFLWLLVWLSATSSAPDRHPQITKSELEYIKQKKQISTMENKRISTSGIPPFGRLLSKMPTWAVIVANSMHSWGFFVILSWMPIYFNSVYHVNLKQAAWFSAVPWSMMAFTGYIAGFWSDLLIRRGTSITLTRKIMQSIGFIGPGIALIGLTTAKQPLVASAWLSLAVGLKSFSHLGFLINLQEIAPEYSGVLHGMCLTAGTLAAIVGTVGAGFFVELLGSFQGFILLTAILYLLSALFYNIYATGERVDFDTTA

SEQ ID NO: 101749 - protein, 581 aa, Arabidopsis thaliana
  peptide (1)..(581): Ceres Seq. ID no. 13608605
  misc_feature (162)..(579): Pfam Name: Sugar (and other) transporter Pfam Description: Sugar (and other) transporter
  misc_feature (49)..(581): Homolog of NCBI NO: 22331630 NR Description: transporter - related [Arabidopsis thaliana]
  misc_feature (49)..(581): Homolog of NCBI NO: 17064732 NR Description: putative protein [Arabidopsis thaliana]
  misc_feature (51)..(580): Homolog of NCBI NO: 11357408 NR Description: hypothetical protein F13I12.30 - Arabidopsis >gi|6522579|emb|CAB61944.1| putative protein [Arabidopsis
  misc_feature (76)..(580): Homolog of NCBI NO: 34908356 NR Description: P0529H11.31 [Oryza sativa (japonica
  misc_feature (126)..(521): Homolog of NCBI NO: 15224438 NR Description: transporter - related [Arabidopsis thaliana]
  misc_feature (147)..(575): Homolog of NCBI NO: 30678625 NR Description: expressed protein [Arabidopsis thaliana]
  misc_feature (139)..(575): Homolog of NCBI NO: 34903342 NR Description: unnamed protein product [Oryza sativa (japonica group)] >gi|6498428|dbj|BAA87831.1| unnamed protein product
  misc_feature (149)..(575): Homolog of NCBI NO: 15227589 NR Description: inorganic phosphate transporter, putative
  misc_feature (149)..(575): Homolog of NCBI NO: 17064976 NR Description: putative Na+-dependent inorganic phosphate
  misc_feature (149)..(462): Homolog of NCBI NO: 30684317 NR Description: inorganic phosphate transporter, putative
MGLLLVAQDETDVGSCDLAVAIHRHHRASIFFFFFANRSNRKQLRLVKMCYSLSIQSSIDFHNRNALKIHGDRAILTSNLPTLRRIPFLPERDRRRKLVLCTGRVVNSLKFTGNTSVDLCGIPRHRLRVSCSDARRTPEETAAELTAQPNFSEFITSERVKVVAMLALALALCNADRVVMSVAIVPLSLSRGWSKSFSGIVQSSFLWGYLISPIAGGTLVDRYGGKVVMAWGVALWSLATFLTPWAADSSLWALLAARAMVGVAEGVALPCMNNMVARWFPPTERSRAVGIAMAGFQLGNVVGLMLSPILMSQGGIYGPFVIFGLSGFLWLLVWLSATSSAPDRHPQITKSELEYIKQKKQISTMENKRISTSGIPPFGRLLSKMPTWAVIVANSMHSWGFFVILSWMPIYFNSVYHVNLKQAAWFSAVPWSMMAFTGYIAGFWSDLLIRRGTSITLTRKIMQSIGFIGPGIALIGLTTAKQPLVASAWLSLAVGLKSFSHLGFLINLQEIAPEYSGVLHGMCLTAGTLAAIVGTVGAGFFVELLGSFQGFILLTAILYLLSALFYNIYATGERVDFDTTA

SEQ ID NO: 101750 - protein, 533 aa, Arabidopsis thaliana
  peptide (1)..(533): Ceres Seq. ID no. 13608606
  misc_feature (114)..(531): Pfam Name: Sugar (and other) transporter Pfam Description: Sugar (and other) transporter
  misc_feature (1)..(533): Homolog of NCBI NO: 22331630 NR Description: transporter - related [Arabidopsis thaliana]
  misc_feature (1)..(533): Homolog of NCBI NO: 17064732 NR Description: putative protein [Arabidopsis thaliana]
  misc_feature (3)..(532): Homolog of NCBI NO: 11357408 NR Description: hypothetical protein F13I12.30 - Arabidopsis >gi|6522579|emb|CAB61944.1| putative protein [Arabidopsis
  misc_feature (28)..(532): Homolog of NCBI NO: 34908356 NR Description: P0529H11.31 [Oryza sativa (japonica
  misc_feature (78)..(473): Homolog of NCBI NO: 15224438 NR Description: transporter - related [Arabidopsis thaliana]
  misc_feature (99)..(527): Homolog of NCBI NO: 30678625 NR Description: expressed protein [Arabidopsis thaliana]
  misc_feature (91)..(527): Homolog of NCBI NO: 34903342 NR Description: unnamed protein product [Oryza sativa (japonica group)] >gi|6498428|dbj|BAA87831.1| unnamed protein product
  misc_feature (101)..(527): Homolog of NCBI NO: 15227589 NR Description: inorganic phosphate transporter, putative
  misc_feature (101)..(527): Homolog of NCBI NO: 17064976 NR Description: putative Na+-dependent inorganic phosphate
  misc_feature (101)..(414): Homolog of NCBI NO: 30684317 NR Description: inorganic phosphate transporter, putative
MCYSLSIQSSIDFHNRNALKIHGDRAILTSNLPTLRRIPFLPERDRRRKLVLCTGRVVNSLKFTGNTSVDLCGIPRHRLRVSCSDARRTPEETAAELTAQPNFSEFITSERVKVVAMLALALALCNADRVVMSVAIVPLSLSRGWSKSFSGIVQSSFLWGYLISPIAGGTLVDRYGGKVVMAWGVALWSLATFLTPWAADSSLWALLAARAMVGVAEGVALPCMNNMVARWFPPTERSRAVGIAMAGFQLGNVVGLMLSPILMSQGGIYGPFVIFGLSGFLWLLVWLSATSSAPDRHPQITKSELEYIKQKKQISTMENKRISTSGIPPFGRLLSKMPTWAVIVANSMHSWGFFVILSWMPIYFNSVYHVNLKQAAWFSAVPWSMMAFTGYIAGFWSDLLIRRGTSITLTRKIMQSIGFIGPGIALIGLTTAKQPLVASAWLSLAVGLKSFSHLGFLINLQEIAPEYSGVLHGMCLTAGTLAAIVGTVGAGFFVELLGSFQGFILLTAILYLLSALFYNIYATGERVDFDTTA

SEQ ID NO: 101751 - DNA, 2167 bp, Arabidopsis thaliana
  misc_feature (1)..(2167): Ceres Seq. ID no. 13608611
  misc_feature: MA Experiment ID: 108434 Result: Down-regulated in Transcription
  misc_feature: MA Experiment 108434 PARAMETER Experiment Name: At_Root_Tips_cDNA_P Parameter: Tissue Value: Root Tips
  misc_feature: MA Experiment ID: 108435 Result: Down-regulated in Transcription
  misc_feature: MA Experiment 108435 PARAMETER Experiment Name: At_stm_Mutants_cDNA_P Parameter: Plant Line Value: wt Landsburg vs stm
  misc_feature: MA Experiment 108435 PARAMETER Experiment Name: At_stm_Mutants_cDNA_P Parameter: Tissue Value: Shoot Apical Meristem Region
  misc_feature: MA Experiment ID: 108462 Result: Up-regulated in Transcription
  misc_feature: MA Experiment 108462 PARAMETER Experiment Name: At_Germinating_Seeds_cDNA_P Parameter: Age (day) Value: 2 vs. 0
  misc_feature: MA Experiment 108462 PARAMETER Experiment Name: At_Germinating_Seeds_cDNA_P Parameter: Tissue Value: Germinating Seeds
  misc_feature: MA Experiment ID: 108463 Result: Up-regulated in Transcription
  misc_feature: MA Experiment 108463 PARAMETER Experiment Name: At_Germinating_Seeds_cDNA_P Parameter: Age (day) Value: 3 vs. 0
  misc_feature: MA Experiment 108463 PARAMETER Experiment Name: At_Germinating_Seeds_cDNA_P Parameter: Tissue Value: Germinating Seeds
  misc_feature: MA Experiment ID: 108464 Result: Up-regulated in Transcription
  misc_feature: MA Experiment 108464 PARAMETER Experiment Name: At_Germinating_Seeds_cDNA_P Parameter: Age (day) Value: 4 vs. 0
  misc_feature: MA Experiment 108464 PARAMETER Experiment Name: At_Germinating_Seeds_cDNA_P Parameter: Tissue Value: Germinating Seeds
  misc_feature: MA Experiment ID: 108489 Result: Up-regulated in Transcription
  misc_feature: MA Experiment ID: 108501 Result: Down-regulated in Transcription
  misc_feature: MA Experiment 108501 PARAMETER Experiment Name: At_ap2_floral_buds_cDNA_P Parameter: Plant Line Value: ap2 (Ler.)
  misc_feature: MA Experiment 108501 PARAMETER Experiment Name: At_ap2_floral_buds_cDNA_P Parameter: Tissue Value: Closed Flower
  misc_feature: MA Experiment ID: 108573 Result: Up-regulated in Transcription
  misc_feature: MA Experiment 108573 PARAMETER Experiment Name: At_Drought_cDNA_P Parameter: Timepoint (hr) Value: 6
  misc_feature: MA Experiment 108573 PARAMETER Experiment Name: At_Drought_cDNA_P Parameter: Tissue Value: Aerial
  misc_feature: MA Experiment 108573 PARAMETER Experiment Name: At_Drought_cDNA_P Parameter: Treatment Value: Drought vs. No Drought
  misc_feature: MA Experiment ID: 108574 Result: Down-regulated in Transcription
  misc_feature: MA Experiment 108574 PARAMETER Experiment Name: At_Wounding__cDNA_P Parameter: Timepoint (hr) Value: 1
  misc_feature: MA Experiment 108574 PARAMETER Experiment Name: At_Wounding__cDNA_P Parameter: Tissue Value: Aerial
  misc_feature: MA Experiment 108574 PARAMETER Experiment Name: At_Wounding__cDNA_P Parameter: Treatment Value: Wounding vs. No Wounding
  misc_feature: MA Experiment ID: 108579 Result: Down-regulated in Transcription
  misc_feature: MA Experiment 108579 PARAMETER Experiment Name: At_4deg_Cold_cDNA_P Parameter: Temperature (deg C) Value: 4 vs. 22
  misc_feature: MA Experiment 108579 PARAMETER Experiment Name: At_4deg_Cold_cDNA_P Parameter: Timepoint (hr) Value: 6
  misc_feature: MA Experiment 108579 PARAMETER Experiment Name: At_4deg_Cold_cDNA_P Parameter: Tissue Value: Aerial
  misc_feature: MA Experiment ID: 108585 Result: Up-regulated in Transcription
  misc_feature: MA Experiment 108585 PARAMETER Experiment Name: At_5mM_NaNP_cDNA_P Parameter: Timepoint (hr) Value: 6
  misc_feature: MA Experiment 108585 PARAMETER Experiment Name: At_5mM_NaNP_cDNA_P Parameter: Tissue Value: Aerial
  misc_feature: MA Experiment 108585 PARAMETER Experiment Name: At_5mM_NaNP_cDNA_P Parameter: Treatment Value: null
  misc_feature: MA Experiment ID: 108594 Result: Up-regulated in Transcription
  misc_feature: MA Experiment 108594 PARAMETER Experiment Name: At_Ler-rhl_Root_cDNA_P Parameter: Plant Line Value: null
  misc_feature: MA Experiment ID: 108607 Result: Up-regulated in Transcription
  misc_feature: MA Experiment 108607 PARAMETER Experiment Name: At_100uM_ABA_cDNA_P Parameter: Timepoint (hr) Value: 4
  misc_feature: MA Experiment 108607 PARAMETER Experiment Name: At_100uM_ABA_cDNA_P Parameter: Tissue Value: Aerial
  misc_feature: MA Experiment 108607 PARAMETER Experiment Name: At_100uM_ABA_cDNA_P Parameter: Treatment Value: 100uM ABA vs. No Treatment
  misc_feature: MA Experiment ID: 108668 Result: Up-regulated in Transcription
  misc_feature: MA Experiment 108668 PARAMETER Experiment Name: At_2mM_SA_cDNA_P Parameter: Plant Line Value: WS
  misc_feature: MA Experiment 108668 PARAMETER Experiment Name: At_2mM_SA_cDNA_P Parameter: Timepoint (hr) Value: 6
  misc_feature: MA Experiment 108668 PARAMETER Experiment Name: At_2mM_SA_cDNA_P Parameter: Treatment Value: 2mM SA vs. No Treatment
  misc_feature: MA Experiment ID: 20000070 Result: Up-regulated in Transcription
  misc_feature: MA Experiment 20000070 PARAMETER Experiment Name: At_100uM_ABA_Mutants_cDNA_P Parameter: Plant Line Value: CS24
  misc_feature: MA Experiment 20000070 PARAMETER Experiment Name: At_100uM_ABA_Mutants_cDNA_P Parameter: Timepoint (hr) Value: 6
  misc_feature: MA Experiment 20000070 PARAMETER Experiment Name: At_100uM_ABA_Mutants_cDNA_P Parameter: Tissue Value: Aerial
  misc_feature: MA Experiment 20000070 PARAMETER Experiment Name: At_100uM_ABA_Mutants_cDNA_P Parameter: Treatment Value: 100uM ABA vs. No Treatment
  misc_feature: MA Experiment ID: 20000072 Result: Up-regulated in Transcription
  misc_feature: MA Experiment 20000072 PARAMETER Experiment Name: At_100uM_ABA_Mutants_cDNA_P Parameter: Plant Line Value: CS8105
  misc_feature: MA Experiment 20000072 PARAMETER Experiment Name: At_100uM_ABA_Mutants_cDNA_P Parameter: Timepoint (hr) Value: 6
  misc_feature: MA Experiment 20000072 PARAMETER Experiment Name: At_100uM_ABA_Mutants_cDNA_P Parameter: Tissue Value: Aerial
  misc_feature: MA Experiment 20000072 PARAMETER Experiment Name: At_100uM_ABA_Mutants_cDNA_P Parameter: Treatment Value: 100uM ABA vs. No Treatment
  misc_feature: MA Experiment ID: 20000088 Result: Up-regulated in Transcription
  misc_feature: MA Experiment 20000088 PARAMETER Experiment Name: At_100uM_ABA_Mutants_cDNA_P Parameter: Plant Line Value: Landsberg
  misc_feature: MA Experiment 20000088 PARAMETER Experiment Name: At_100uM_ABA_Mutants_cDNA_P Parameter: Timepoint (hr) Value: 6
  misc_feature: MA Experiment 20000088 PARAMETER Experiment Name: At_100uM_ABA_Mutants_cDNA_P Parameter: Tissue Value: Aerial
  misc_feature: MA Experiment 20000088 PARAMETER Experiment Name: At_100uM_ABA_Mutants_cDNA_P Parameter: Treatment Value: 100uM ABA vs. No Treatment
  misc_feature: MA Experiment ID: 20000117 Result: Up-regulated in Transcription
  misc_feature: MA Experiment 20000117 PARAMETER Experiment Name: At_100uM_ABA_Mutants_cDNA_P Parameter: Plant Line Value: Columbia
  misc_feature: MA Experiment 20000117 PARAMETER Experiment Name: At_100uM_ABA_Mutants_cDNA_P Parameter: Timepoint (hr) Value: 6
  misc_feature: MA Experiment 20000117 PARAMETER Experiment Name: At_100uM_ABA_Mutants_cDNA_P Parameter: Tissue Value: Aerial
  misc_feature: MA Experiment 20000117 PARAMETER Experiment Name: At_100uM_ABA_Mutants_cDNA_P Parameter: Treatment Value: 100uM ABA vs. No Treatment
  misc_feature: MA Experiment ID: 20000169 Result: Up-regulated in Transcription
  misc_feature: MA Experiment 20000169 PARAMETER Experiment Name: At_100uM_ABA_P Parameter: Age (day) Value: 14
  misc_feature: MA Experiment 20000169 PARAMETER Experiment Name: At_100uM_ABA_P Parameter: Organism Value: A. thaliana
  misc_feature: MA Experiment 20000169 PARAMETER Experiment Name: At_100uM_ABA_P Parameter: Plant Line Value: WS
  misc_feature: MA Experiment 20000169 PARAMETER Experiment Name: At_100uM_ABA_P Parameter: Timepoint (hr) Value: 6
  misc_feature: MA Experiment 20000169 PARAMETER Experiment Name: At_100uM_ABA_P Parameter: Tissue Value: Aerial
  misc_feature: MA Experiment 20000169 PARAMETER Experiment Name: At_100uM_ABA_P Parameter: Treatment Value: 100uM ABA vs. No Treatment
  misc_feature: MA Experiment ID: 20000179 Result: Down-regulated in Transcription
  misc_feature: MA Experiment 20000179 PARAMETER Experiment Name: At_Germinating_Seeds_P Parameter: Age (hr) Value: 6 vs. 0
  misc_feature: MA Experiment 20000179 PARAMETER Experiment Name: At_Germinating_Seeds_P Parameter: Tissue Value: Germinating Seeds
  misc_feature: MA Experiment ID: 20000180 Result: Down-regulated in Transcription
  misc_feature: MA Experiment 20000180 PARAMETER Experiment Name: At_Germinating_Seeds_P Parameter: Age (hr) Value: 24 vs. 0
  misc_feature: MA Experiment 20000180 PARAMETER Experiment Name: At_Germinating_Seeds_P Parameter: Tissue Value: Germinating Seeds
  misc_feature: MA Experiment ID: 20000182 Result: Up-regulated in Transcription
  misc_feature: MA Experiment 20000182 PARAMETER Experiment Name: At_2mM_SA_P Parameter: Age (day) Value: 14
  misc_feature: MA Experiment 20000182 PARAMETER Experiment Name: At_2mM_SA_P Parameter: Organism Value: A. thaliana
  misc_feature: MA Experiment 20000182 PARAMETER Experiment Name: At_2mM_SA_P Parameter: Plant Line Value: WS
  misc_feature: MA Experiment 20000182 PARAMETER Experiment Name: At_2mM_SA_P Parameter: Timepoint (hr) Value: 6
  misc_feature: MA Experiment 20000182 PARAMETER Experiment Name: At_2mM_SA_P Parameter: Tissue Value: Aerial
  misc_feature: MA Experiment 20000182 PARAMETER Experiment Name: At_2mM_SA_P Parameter: Treatment Value: 2mM SA vs. No Treatment
  misc_feature: MA Experiment ID: 20000185 Result: Down-regulated in Transcription
  misc_feature: MA Experiment 20000185 PARAMETER Experiment Name: At_Roots__P Parameter: Age (day) Value: 7 vs. 21
  misc_feature: MA Experiment 20000185 PARAMETER Experiment Name: At_Roots__P Parameter: Organism Value: A. thaliana
  misc_feature: MA Experiment 20000185 PARAMETER Experiment Name: At_Roots__P Parameter: Tissue Value: Roots vs. Whole Plant
  misc_feature: MA Experiment ID: 20000213 Result: Down-regulated in Transcription
  misc_feature: MA Experiment 20000213 PARAMETER Experiment Name: At_4deg_Cold_P Parameter: Timepoint (hr) Value: 2
  misc_feature: MA Experiment ID: 20000224 Result: Down-regulated in Transcription
  misc_feature: MA Experiment ID: 20000234 Result: Down-regulated in Transcription
  misc_feature: MA Experiment 20000234 PARAMETER Experiment Name: At_Siliques_P Parameter: Age (day) Value: 21
  misc_feature: MA Experiment 20000234 PARAMETER Experiment Name: At_Siliques_P Parameter: Organism Value: A. thaliana
  misc_feature: MA Experiment 20000234 PARAMETER Experiment Name: At_Siliques_P Parameter: Plant Line Value: WS
  misc_feature: MA Experiment 20000234 PARAMETER Experiment Name: At_Siliques_P Parameter: Tissue Value: Less Than 5mm Siliques vs. Whole Plant
  misc_feature: MA Experiment ID: 20000235 Result: Down-regulated in Transcription
  misc_feature: MA Experiment 20000235 PARAMETER Experiment Name: At_Siliques_P Parameter: Age (day) Value: 21
  misc_feature: MA Experiment 20000235 PARAMETER Experiment Name: At_Siliques_P Parameter: Organism Value: A. thaliana
  misc_feature: MA Experiment 20000235 PARAMETER Experiment Name: At_Siliques_P Parameter: Plant Line Value: WS
  misc_feature: MA Experiment 20000235 PARAMETER Experiment Name: At_Siliques_P Parameter: Tissue Value: 5-10mm Siliques vs. Whole Plant
  misc_feature: MA Experiment ID: 20000264 Result: Down-regulated in Transcription
  misc_feature: MA Experiment 20000264 PARAMETER Experiment Name: At_Open_Flower_P Parameter: Age (day) Value: 21
  misc_feature: MA Experiment 20000264 PARAMETER Experiment Name: At_Open_Flower_P Parameter: Plant Line Value: WS
  misc_feature: MA Experiment 20000264 PARAMETER Experiment Name: At_Open_Flower_P Parameter: Tissue Value: Open Flower vs. Whole Plant
  misc_feature: MA Experiment ID: 20000265 Result: Down-regulated in Transcription
  misc_feature: MA Experiment 20000265 PARAMETER Experiment Name: At_Open_Flower_P Parameter: Age (day) Value: 21
  misc_feature: MA Experiment 20000265 PARAMETER Experiment Name: At_Open_Flower_P Parameter: Plant Line Value: WS
  misc_feature: MA Experiment 20000265 PARAMETER Experiment Name: At_Open_Flower_P Parameter: Tissue Value: Closed Flower vs. Whole Plant
  misc_feature: MA Experiment ID: 20000268 Result: Down-regulated in Transcription
  misc_feature: MA Experiment 20000268 PARAMETER Experiment Name: At_100mM_NaCl__P Parameter: Age (day) Value: 14
  misc_feature: MA Experiment 20000268 PARAMETER Experiment Name: At_100mM_NaCl__P Parameter: Organism Value: A. thaliana
  misc_feature: MA Experiment 20000268 PARAMETER Experiment Name: At_100mM_NaCl__P Parameter: Plant Line Value: WS
  misc_feature: MA Experiment 20000268 PARAMETER Experiment Name: At_100mM_NaCl__P Parameter: Timepoint (hr) Value: 6
  misc_feature: MA Experiment 20000268 PARAMETER Experiment Name: At_100mM_NaCl__P Parameter: Tissue Value: Whole Plant
  misc_feature: MA Experiment 20000268 PARAMETER Experiment Name: At_100mM_NaCl__P Parameter: Treatment Value: 100mM NaCl vs. No Treatment
  misc_feature: MA Experiment ID: 20000286 Result: Down-regulated in Transcription
  misc_feature: MA Experiment 20000286 PARAMETER Experiment Name: At_Open_Flower_P Parameter: Age (day) Value: 21
  misc_feature: MA Experiment 20000286 PARAMETER Experiment Name: At_Open_Flower_P Parameter: Plant Line Value: WS
  misc_feature: MA Experiment 20000286 PARAMETER Experiment Name: At_Open_Flower_P Parameter: Tissue Value: Half Open vs. Whole Plant
  misc_feature: MA Experiment ID: 20000436 Result: Up-regulated in Transcription
  misc_feature: MA Experiment 20000436 PARAMETER Experiment Name: At_Drought_P Parameter: Age (day) Value: 7
  misc_feature: MA Experiment 20000436 PARAMETER Experiment Name: At_Drought_P Parameter: Organism Value: A. thaliana
  misc_feature: MA Experiment 20000436 PARAMETER Experiment Name: At_Drought_P Parameter: Plant Line Value: WS
  misc_feature: MA Experiment 20000436 PARAMETER Experiment Name: At_Drought_P Parameter: Timepoint (hr) Value: 12
  misc_feature: MA Experiment 20000436 PARAMETER Experiment Name: At_Drought_P Parameter: Tissue Value: Whole Plant
  misc_feature: MA Experiment 20000436 PARAMETER Experiment Name: At_Drought_P Parameter: Treatment Value: Drought vs. No Drought
  misc_feature: MA Experiment ID: 20000437 Result: Up-regulated in Transcription
  misc_feature: MA Experiment 20000437 PARAMETER Experiment Name: At_Drought_P Parameter: Age (day) Value: 8
  misc_feature: MA Experiment 20000437 PARAMETER Experiment Name: At_Drought_P Parameter: Organism Value: A. thaliana
  misc_feature: MA Experiment 20000437 PARAMETER Experiment Name: At_Drought_P Parameter: Plant Line Value: WS
  misc_feature: MA Experiment 20000437 PARAMETER Experiment Name: At_Drought_P Parameter: Timepoint (hr) Value: 24
  misc_feature: MA Experiment 20000437 PARAMETER Experiment Name: At_Drought_P Parameter: Tissue Value: Whole Plant
  misc_feature: MA Experiment 20000437 PARAMETER Experiment Name: At_Drought_P Parameter: Treatment Value: Drought vs. No Drought
  misc_feature: MA Experiment ID: 20000439 Result: Down-regulated in Transcription
  misc_feature: MA Experiment 20000439 PARAMETER Experiment Name: At_Roots__P Parameter: Age (day) Value: 14 vs. 21
  misc_feature: MA Experiment 20000439 PARAMETER Experiment Name: At_Roots__P Parameter: Organism Value: A. thaliana
  misc_feature: MA Experiment 20000439 PARAMETER Experiment Name: At_Roots__P Parameter: Tissue Value: Roots vs. Whole Plant
  misc_feature: MA Experiment ID: 20000441 Result: Up-regulated in Transcription
  misc_feature: MA Experiment 20000441 PARAMETER Experiment Name: At_1uM_BR-BRZ__P Parameter: Tissue Value: Shoot Apices
  misc_feature: MA Experiment 20000441 PARAMETER Experiment Name: At_1uM_BR-BRZ__P Parameter: Treatment Value: 1uM BR vs. No Treatment
  misc_feature: MA Experiment ID: 20000443 Result: Up-regulated in Transcription
  misc_feature: MA Experiment 20000443 PARAMETER Experiment Name: At_1uM_BR-BRZ__P Parameter: Tissue Value: Shoot Apices
  misc_feature: MA Experiment 20000443 PARAMETER Experiment Name: At_1uM_BR-BRZ__P Parameter: Treatment Value: 1uM BRZ vs. No Treatment
  misc_feature: MA Experiment ID: 20000451 Result: Up-regulated in Transcription
  misc_feature: MA Experiment 20000451 PARAMETER Experiment Name: At_CS6879_Shoots-Roots_P Parameter: Age (day) Value: 14
  misc_feature: MA Experiment 20000451 PARAMETER Experiment Name: At_CS6879_Shoots-Roots_P Parameter: Organism Value: A. thaliana
  misc_feature: MA Experiment 20000451 PARAMETER Experiment Name: At_CS6879_Shoots-Roots_P Parameter: Plant Line Value: CS6879 vs. WS
  misc_feature: MA Experiment 20000451 PARAMETER Experiment Name: At_CS6879_Shoots-Roots_P Parameter: Tissue Value: Roots
  misc_feature: MA Experiment ID: 20000452 Result: Down-regulated in Transcription
  misc_feature: MA Experiment 20000452 PARAMETER Experiment Name: At_CS6879_Shoots-Roots_P Parameter: Age (day) Value: 14
  misc_feature: MA Experiment 20000452 PARAMETER Experiment Name: At_CS6879_Shoots-Roots_P Parameter: Organism Value: A. thaliana
  misc_feature: MA Experiment 20000452 PARAMETER Experiment Name: At_CS6879_Shoots-Roots_P Parameter: Plant Line Value: CS6879 vs. WS
  misc_feature: MA Experiment 20000452 PARAMETER Experiment Name: At_CS6879_Shoots-Roots_P Parameter: Tissue Value: Shoots
  misc_feature: MA Experiment ID: 20000453 Result: Up-regulated in Transcription
  misc_feature: MA Experiment 20000453 PARAMETER Experiment Name: At_100uM_ABA_P Parameter: Age (day) Value: 15
  misc_feature: MA Experiment 20000453 PARAMETER Experiment Name: At_100uM_ABA_P Parameter: Organism Value: A. thaliana
  misc_feature: MA Experiment 20000453 PARAMETER Experiment Name: At_100uM_ABA_P Parameter: Plant Line Value: WS
  misc_feature: MA Experiment 20000453 PARAMETER Experiment Name: At_100uM_ABA_P Parameter: Timepoint (hr) Value: 24
  misc_feature: MA Experiment 20000453 PARAMETER Experiment Name: At_100uM_ABA_P Parameter: Tissue Value: Aerial
  misc_feature: MA Experiment 20000453 PARAMETER Experiment Name: At_100uM_ABA_P Parameter: Treatment Value: 100uM ABA vs. No Treatment
  misc_feature: MA Experiment ID: 20000456 Result: Down-regulated in Transcription
  misc_feature: MA Experiment 20000456 PARAMETER Experiment Name: At_100uM_BA_P Parameter: Age (day) Value: 14
  misc_feature: MA Experiment 20000456 PARAMETER Experiment Name: At_100uM_BA_P Parameter: Organism Value: A. thaliana
  misc_feature: MA Experiment 20000456 PARAMETER Experiment Name: At_100uM_BA_P Parameter: Plant Line Value: WS
  misc_feature: MA Experiment 20000456 PARAMETER Experiment Name: At_100uM_BA_P Parameter: Timepoint (hr) Value: 6
  misc_feature: MA Experiment 20000456 PARAMETER Experiment Name: At_100uM_BA_P Parameter: Tissue Value: Aerial
  misc_feature: MA Experiment 20000456 PARAMETER Experiment Name: At_100uM_BA_P Parameter: Treatment Value: 100uM BA vs. No Treatment
  misc_feature: MA Experiment ID: 20000460 Result: Down-regulated in Transcription
  misc_feature: MA Experiment 20000460 PARAMETER Experiment Name: At_10percent_PEG_P Parameter: Age (day) Value: 12
  misc_feature: MA Experiment 20000460 PARAMETER Experiment Name: At_10percent_PEG_P Parameter: Organism Value: A. thaliana
  misc_feature: MA Experiment 20000460 PARAMETER Experiment Name: At_10percent_PEG_P Parameter: Plant Line Value: WS
  misc_feature: MA Experiment 20000460 PARAMETER Experiment Name: At_10percent_PEG_P Parameter: Timepoint (day) Value: 12
  misc_feature: MA Experiment 20000460 PARAMETER Experiment Name: At_10percent_PEG_P Parameter: Tissue Value: Whole Plant
  misc_feature: MA Experiment 20000460 PARAMETER Experiment Name: At_10percent_PEG_P Parameter: Treatment Value: 10percent PEG vs. No Treatment
  misc_feature: MA Experiment ID: 20000527 Result: Up-regulated in Transcription
  misc_feature: MA Experiment 20000527 PARAMETER Experiment Name: At_10percent_PEG_P Parameter: Age (day) Value: 20
  misc_feature: MA Experiment 20000527 PARAMETER Experiment Name: At_10percent_PEG_P Parameter: Organism Value: A. thaliana
  misc_feature: MA Experiment 20000527 PARAMETER Experiment Name: At_10percent_PEG_P Parameter: Plant Line Value: WS
  misc_feature: MA Experiment 20000527 PARAMETER Experiment Name: At_10percent_PEG_P Parameter: Timepoint (day) Value: 20
  misc_feature: MA Experiment 20000527 PARAMETER Experiment Name: At_10percent_PEG_P Parameter: Tissue Value: Whole Plant
  misc_feature: MA Experiment 20000527 PARAMETER Experiment Name: At_10percent_PEG_P Parameter: Treatment Value: 10percent PEG vs. No Treatment
  misc_feature: MA Experiment ID: 20000573 Result: Up-regulated in Transcription
  misc_feature: MA Experiment 20000573 PARAMETER Experiment Name: At_100uM_ABA_Mutants__P Parameter: Organism Value: A. thaliana
  misc_feature: MA Experiment 20000573 PARAMETER Experiment Name: At_100uM_ABA_Mutants__P Parameter: Plant Line Value: CS22 vs. Ler wt
  misc_feature: MA Experiment 20000573 PARAMETER Experiment Name: At_100uM_ABA_Mutants__P Parameter: Timepoint (hr) Value: N/A
  misc_feature: MA Experiment 20000573 PARAMETER Experiment Name: At_100uM_ABA_Mutants__P Parameter: Tissue Value: Whole Plant
  misc_feature: MA Experiment 20000573 PARAMETER Experiment Name: At_100uM_ABA_Mutants__P Parameter: Treatment Value: None
  misc_feature: MA Experiment ID: 20000574 Result: Up-regulated in Transcription
  misc_feature: MA Experiment 20000574 PARAMETER Experiment Name: At_100uM_ABA_Mutants__P Parameter: Organism Value: A. thaliana
  misc_feature: MA Experiment 20000574 PARAMETER Experiment Name: At_100uM_ABA_Mutants__P Parameter: Plant Line Value: CS23 vs. Ler wt
  misc_feature: MA Experiment 20000574 PARAMETER Experiment Name: At_100uM_ABA_Mutants__P Parameter: Timepoint (hr) Value: N/A
  misc_feature: MA Experiment 20000574 PARAMETER Experiment Name: At_100uM_ABA_Mutants__P Parameter: Tissue Value: Whole Plant
  misc_feature: MA Experiment 20000574 PARAMETER Experiment Name: At_100uM_ABA_Mutants__P Parameter: Treatment Value: None
  misc_feature: MA Experiment ID: 20000575 Result: Down-regulated in Transcription
  misc_feature: MA Experiment 20000575 PARAMETER Experiment Name: At_100uM_ABA_Mutants__P Parameter: Organism Value: A. thaliana
  misc_feature: MA Experiment 20000575 PARAMETER Experiment Name: At_100uM_ABA_Mutants__P Parameter: Plant Line Value: CS22
  misc_feature: MA Experiment 20000575 PARAMETER Experiment Name: At_100uM_ABA_Mutants__P Parameter: Timepoint (hr) Value: 6
  misc_feature: MA Experiment 20000575 PARAMETER Experiment Name: At_100uM_ABA_Mutants__P Parameter: Tissue Value: Whole Plant
  misc_feature: MA Experiment 20000575 PARAMETER Experiment Name: At_100uM_ABA_Mutants__P Parameter: Treatment Value: 1uM ABA vs. No Treatment
  misc_feature: MA Experiment ID: 20000576 Result: Down-regulated in Transcription
  misc_feature: MA Experiment 20000576 PARAMETER Experiment Name: At_100uM_ABA_Mutants__P Parameter: Organism Value: A. thaliana
  misc_feature: MA Experiment 20000576 PARAMETER Experiment Name: At_100uM_ABA_Mutants__P Parameter: Plant Line Value: CS23
  misc_feature: MA Experiment 20000576 PARAMETER Experiment Name: At_100uM_ABA_Mutants__P Parameter: Timepoint (hr) Value: 6
  misc_feature: MA Experiment 20000576 PARAMETER Experiment Name: At_100uM_ABA_Mutants__P Parameter: Tissue Value: Whole Plant
  misc_feature: MA Experiment 20000576 PARAMETER Experiment Name: At_100uM_ABA_Mutants__P Parameter: Treatment Value: 1uM ABA vs. No Treatment
  misc_feature: MA Experiment ID: 20000709 Result: Up-regulated in Transcription
  misc_feature: MA Experiment 20000709 PARAMETER Experiment Name: At_15mM_NH4NO3_L-to-H_P Parameter: Age (hr) Value: 14
  misc_feature: MA Experiment 20000709 PARAMETER Experiment Name: At_15mM_NH4NO3_L-to-H_P Parameter: Organism Value: A. thaliana
  misc_feature: MA Experiment 20000709 PARAMETER Experiment Name: At_15mM_NH4NO3_L-to-H_P Parameter: Plant Line Value: WS
  misc_feature: MA Experiment 20000709 PARAMETER Experiment Name: At_15mM_NH4NO3_L-to-H_P Parameter: Timepoint (hr) Value: 4
  misc_feature: MA Experiment 20000709 PARAMETER Experiment Name: At_15mM_NH4NO3_L-to-H_P Parameter: Tissue Value: Aerial
  misc_feature: MA Experiment 20000709 PARAMETER Experiment Name: At_15mM_NH4NO3_L-to-H_P Parameter: Treatment Value: 15mM NH4NO3 vs. 30mM Mannitol
  misc_feature: MA Experiment ID: 20000794 Result: Down-regulated in Transcription
  misc_feature: MA Experiment 20000794 PARAMETER Experiment Name: At_Petals_P Parameter: Age (day) Value: 23-25 days
  misc_feature: MA Experiment 20000794 PARAMETER Experiment Name: At_Petals_P Parameter: Plant Line Value: WS
  misc_feature: MA Experiment 20000794 PARAMETER Experiment Name: At_Petals_P Parameter: Tissue Value: Petals vs. Whole plant
  misc_feature: MA Experiment ID: 20001247 Result: Up-regulated in Transcription
  misc_feature: MA Experiment 20001247 PARAMETER Experiment Name: At_Far-red-induction_P Parameter: Age (day) Value: 7
  misc_feature: MA Experiment 20001247 PARAMETER Experiment Name: At_Far-red-induction_P Parameter: Light Value: Far-red vs. White
  misc_feature: MA Experiment 20001247 PARAMETER Experiment Name: At_Far-red-induction_P Parameter: Organism Value: A. thaliana
  misc_feature: MA Experiment 20001247 PARAMETER Experiment Name: At_Far-red-induction_P Parameter: Plant Line Value: Columbia
  misc_feature: MA Experiment 20001247 PARAMETER Experiment Name: At_Far-red-induction_P Parameter: Timepoint (hr) Value: 1
  misc_feature: MA Experiment 20001247 PARAMETER Experiment Name: At_Far-red-induction_P Parameter: Tissue Value: Whole Plant
  misc_feature: MA Experiment ID: 20001248 Result: Up-regulated in Transcription
  misc_feature: MA Experiment 20001248 PARAMETER Experiment Name: At_Far-red-induction_P Parameter: Age (day) Value: 7
  misc_feature: MA Experiment 20001248 PARAMETER Experiment Name: At_Far-red-induction_P Parameter: Light Value: Far-red vs. White
  misc_feature: MA Experiment 20001248 PARAMETER Experiment Name: At_Far-red-induction_P Parameter: Organism Value: A. thaliana
  misc_feature: MA Experiment 20001248 PARAMETER Experiment Name: At_Far-red-induction_P Parameter: Plant Line Value: Columbia
  misc_feature: MA Experiment 20001248 PARAMETER Experiment Name: At_Far-red-induction_P Parameter: Timepoint (hr) Value: 4
  misc_feature: MA Experiment 20001248 PARAMETER Experiment Name: At_Far-red-induction_P Parameter: Tissue Value: Whole Plant
  misc_feature: MA Experiment ID: 20001450 Result: Up-regulated in Transcription
  misc_feature: MA Experiment 20001450 PARAMETER Experiment Name: At_Far-red-induction_P Parameter: Age (day) Value: 7
  misc_feature: MA Experiment 20001450 PARAMETER Experiment Name: At_Far-red-induction_P Parameter: Light Value: Far-red vs. White
  misc_feature: MA Experiment 20001450 PARAMETER Experiment Name: At_Far-red-induction_P Parameter: Organism Value: A. thaliana
  misc_feature: MA Experiment 20001450 PARAMETER Experiment Name: At_Far-red-induction_P Parameter: Plant Line Value: Columbia
  misc_feature: MA Experiment 20001450 PARAMETER Experiment Name: At_Far-red-induction_P Parameter: Timepoint (hr) Value: 8
  misc_feature: MA Experiment 20001450 PARAMETER Experiment Name: At_Far-red-induction_P Parameter: Tissue Value: Whole Plant
  misc_feature: MA Experiment ID: 20001451 Result: Up-regulated in Transcription
  misc_feature: MA Experiment 20001451 PARAMETER Experiment Name: At_Far-red-induction_P Parameter: Age (day) Value: 7
  misc_feature: MA Experiment 20001451 PARAMETER Experiment Name: At_Far-red-induction_P Parameter: Light Value: Far-red vs. White
  misc_feature: MA Experiment 20001451 PARAMETER Experiment Name: At_Far-red-induction_P Parameter: Organism Value: A. thaliana
  misc_feature: MA Experiment 20001451 PARAMETER Experiment Name: At_Far-red-induction_P Parameter: Plant Line Value: Columbia
  misc_feature: MA Experiment 20001451 PARAMETER Experiment Name: At_Far-red-induction_P Parameter: Timepoint (hr) Value: 24
  misc_feature: MA Experiment 20001451 PARAMETER Experiment Name: At_Far-red-induction_P Parameter: Tissue Value: Whole Plant
  misc_feature: MA Experiment ID: 20001503 Result: Down-regulated in Transcription
  misc_feature: MA Experiment 20001503 PARAMETER Experiment Name: At_Far-red-enriched_P Parameter: Age (day) Value: 7
  misc_feature: MA Experiment 20001503 PARAMETER Experiment Name: At_Far-red-enriched_P Parameter: Light Value: Far-red enriched vs. White
  misc_feature: MA Experiment 20001503 PARAMETER Experiment Name: At_Far-red-enriched_P Parameter: Organism Value: A. thaliana
  misc_feature: MA Experiment 20001503 PARAMETER Experiment Name: At_Far-red-enriched_P Parameter: Plant Line Value: Columbia
  misc_feature: MA Experiment 20001503 PARAMETER Experiment Name: At_Far-red-enriched_P Parameter: Timepoint (day) Value: 3
  misc_feature: MA Experiment 20001503 PARAMETER Experiment Name: At_Far-red-enriched_P Parameter: Tissue Value: Whole Plant
  misc_feature: MA Experiment ID: 20001504 Result: Down-regulated in Transcription
  misc_feature: MA Experiment 20001504 PARAMETER Experiment Name: At_Far-red-enriched_P Parameter: Age (day) Value: 10
  misc_feature: MA Experiment 20001504 PARAMETER Experiment Name: At_Far-red-enriched_P Parameter: Light Value: Far-red enriched vs. White
  misc_feature: MA Experiment 20001504 PARAMETER Experiment Name: At_Far-red-enriched_P Parameter: Organism Value: A. thaliana
  misc_feature: MA Experiment 20001504 PARAMETER Experiment Name: At_Far-red-enriched_P Parameter: Plant Line Value: Columbia
  misc_feature: MA Experiment 20001504 PARAMETER Experiment Name: At_Far-red-enriched_P Parameter: Timepoint (day) Value: 6
  misc_feature: MA Experiment 20001504 PARAMETER Experiment Name: At_Far-red-enriched_P Parameter: Tissue Value: Whole Plant
  misc_feature: MA Experiment ID: 20001556 Result: Down-regulated in Transcription
  misc_feature: MA Experiment 20001556 PARAMETER Experiment Name: At_Drought_Soil_Dry_P Parameter: Age (day) Value: 26
  misc_feature: MA Experiment 20001556 PARAMETER Experiment Name: At_Drought_Soil_Dry_P Parameter: Organism Value: A. thaliana
  misc_feature: MA Experiment 20001556 PARAMETER Experiment Name: At_Drought_Soil_Dry_P Parameter: Plant Line Value: WS
  misc_feature: MA Experiment 20001556 PARAMETER Experiment Name: At_Drought_Soil_Dry_P Parameter: Post Timepoint (hr) Value: None
  misc_feature: MA Experiment 20001556 PARAMETER Experiment Name: At_Drought_Soil_Dry_P Parameter: Post-Treatment Value: None
  misc_feature: MA Experiment 20001556 PARAMETER Experiment Name: At_Drought_Soil_Dry_P Parameter: Timepoint (day) Value: 12
  misc_feature: MA Experiment 20001556 PARAMETER Experiment Name: At_Drought_Soil_Dry_P Parameter: Treatment Value: Drought vs. No Drought
  misc_feature: MA Experiment ID: 20001557 Result: Down-regulated in Transcription
  misc_feature: MA Experiment 20001557 PARAMETER Experiment Name: At_Drought_Soil_Dry_P Parameter: Age (day) Value: 27
  misc_feature: MA Experiment 20001557 PARAMETER Experiment Name: At_Drought_Soil_Dry_P Parameter: Organism Value: A. thaliana
  misc_feature: MA Experiment 20001557 PARAMETER Experiment Name: At_Drought_Soil_Dry_P Parameter: Plant Line Value: WS
  misc_feature: MA Experiment 20001557 PARAMETER Experiment Name: At_Drought_Soil_Dry_P Parameter: Post Timepoint (hr) Value: 3
  misc_feature: MA Experiment 20001557 PARAMETER Experiment Name: At_Drought_Soil_Dry_P Parameter: Post-Treatment Value: Re-Water vs. No Drought
  misc_feature: MA Experiment 20001557 PARAMETER Experiment Name: At_Drought_Soil_Dry_P Parameter: Timepoint (day) Value: 13
  misc_feature: MA Experiment 20001557 PARAMETER Experiment Name: At_Drought_Soil_Dry_P Parameter: Treatment Value: Drought vs. No Drought
  misc_feature: MA Experiment ID: 20001558 Result: Down-regulated in Transcription
  misc_feature: MA Experiment 20001558 PARAMETER Experiment Name: At_Drought_Soil_Dry_P Parameter: Age (day) Value: 27
  misc_feature: MA Experiment 20001558 PARAMETER Experiment Name: At_Drought_Soil_Dry_P Parameter: Organism Value: A. thaliana
  misc_feature: MA Experiment 20001558 PARAMETER Experiment Name: At_Drought_Soil_Dry_P Parameter: Plant Line Value: WS
  misc_feature: MA Experiment 20001558 PARAMETER Experiment Name: At_Drought_Soil_Dry_P Parameter: Post Timepoint (hr) Value: 6
  misc_feature: MA Experiment 20001558 PARAMETER Experiment Name: At_Drought_Soil_Dry_P Parameter: Post-Treatment Value: Re-Water vs. No Drought
  misc_feature: MA Experiment 20001558 PARAMETER Experiment Name: At_Drought_Soil_Dry_P Parameter: Timepoint (day) Value: 13
  misc_feature: MA Experiment 20001558 PARAMETER Experiment Name: At_Drought_Soil_Dry_P Parameter: Treatment Value: Drought vs. No Drought
  misc_feature: MA Experiment ID: 20001759 Result: Up-regulated in Transcription
  misc_feature: MA Experiment 20001759 PARAMETER Experiment Name: At_50mM_NH4NO3_L-to-H_P Parameter: Timepoint (hr) Value: 1
  misc_feature: MA Experiment 20001759 PARAMETER Experiment Name: At_50mM_NH4NO3_L-to-H_P Parameter: Tissue Value: Siliques
  misc_feature: MA Experiment 20001759 PARAMETER Experiment Name: At_50mM_NH4NO3_L-to-H_P Parameter: Treatment Value: 50mM NH4NO3 vs 100mM Mannitol
  misc_feature: MA Experiment ID: 20001761 Result: Up-regulated in Transcription
  misc_feature: MA Experiment 20001761 PARAMETER Experiment Name: At_50mM_NH4NO3_L-to-H_P Parameter: Timepoint (hr) Value: 4
  misc_feature: MA Experiment 20001761 PARAMETER Experiment Name: At_50mM_NH4NO3_L-to-H_P Parameter: Tissue Value: Siliques
  misc_feature: MA Experiment 20001761 PARAMETER Experiment Name: At_50mM_NH4NO3_L-to-H_P Parameter: Treatment Value: 50mM NH4NO3 vs 100mM Mannitol
  misc_feature: MA Experiment ID: 20001768 Result: Down-regulated in Transcription
  misc_feature: MA Experiment 20001768 PARAMETER Experiment Name: At_Far-red-enriched-adult_P Parameter: Age (day) Value: 28
  misc_feature: MA Experiment 20001768 PARAMETER Experiment Name: At_Far-red-enriched-adult_P Parameter: Light Value: Far-red enriched vs. White
  misc_feature: MA Experiment 20001768 PARAMETER Experiment Name: At_Far-red-enriched-adult_P Parameter: Organism Value: A. thaliana
  misc_feature: MA Experiment 20001768 PARAMETER Experiment Name: At_Far-red-enriched-adult_P Parameter: Plant Line Value: Columbia
  misc_feature: MA Experiment 20001768 PARAMETER Experiment Name: At_Far-red-enriched-adult_P Parameter: Timepoint (hr) Value: 1
  misc_feature: MA Experiment 20001768 PARAMETER Experiment Name: At_Far-red-enriched-adult_P Parameter: Tissue Value: Aerial
  misc_feature: MA Experiment ID: 20001770 Result: Down-regulated in Transcription
  misc_feature: MA Experiment 20001770 PARAMETER Experiment Name: At_Far-red-enriched-adult_P Parameter: Age (day) Value: 28
  misc_feature: MA Experiment 20001770 PARAMETER Experiment Name: At_Far-red-enriched-adult_P Parameter: Light Value: Far-red enriched vs. White
  misc_feature: MA Experiment 20001770 PARAMETER Experiment Name: At_Far-red-enriched-adult_P Parameter: Organism Value: A. thaliana
  misc_feature: MA Experiment 20001770 PARAMETER Experiment Name: At_Far-red-enriched-adult_P Parameter: Plant Line Value: Columbia
  misc_feature: MA Experiment 20001770 PARAMETER Experiment Name: At_Far-red-enriched-adult_P Parameter: Timepoint (hr) Value: 8
  misc_feature: MA Experiment 20001770 PARAMETER Experiment Name: At_Far-red-enriched-adult_P Parameter: Tissue Value: Aerial
gacatcaaaaacacgaatatcgatagtacacttctacgtgcaattttctcctttctcttcctggacatctgtctgtttattacattttcttgtaatctctttttggggttttacaatatctatcccctaaagtttcggaaaattctgtttttctgttctcattcttcgtgatctttttcactttcttcaaaaaaaaaacatgtgtggaatacttgccgtgttaggatgttccgatgattctcaggccaagagagttcgtgttcttgagctttctcgcagattgaggcacagaggacctgactggagtggcttatatcagaacggagataattacttggcccatcaacgtcttgccgtcatcgatcctgcttccggtgatcaacctcttttcaacgaggacaagaccattgttgtcacggtgaacggagagatttataaccatgaggagctgagaaaacgtctgaagaatcacaagttccgtactggtagtgattgtgaagtcattgctcacttgtacgaggagtatggtgtggattttgttgatatgttggatggaatattctcctttgtgttgctcgacacacgagataactctttcatggtggctcgtgatgcgattggtgtcacttcgctctacattggttggggactagacggatctgtgtggatatcttcagagatgaaaggcctaaacgatgactgtgagcatttcgaaacgtttcctccaggtcatttttattcaagcaaattaggagggtttaagcaatggtataatcctccttggttcaatgaatctgttccttcaacgccttatgagcctcttgcgataagacgcgcctttgaaaacgctgtgattaagcggttgatgactgatgttccatttggagttttgctctctggtggtcttgattcttcccttgttgcctccatcactgcacgtcacttggccggtactaaggcggctaagcaatggggtcctcagctccattccttttgcgttggtcttgagggctcaccggacttgaaggcagggaaagaggtggcggaatatttggggacggtgcaccacgagttccacttctcggtgcaggacgggattgatgcgatagaggatgtgatttaccatgttgagacctatgatgtgacgactatcagagcgagcacaccgatgttcttgatgtcccggaaaatcaagtctctaggggtcaagatggttctctccggcgaaggtgcggacgagatctttggagggtacctctatttccacaaggcacctaacaagaaagagtttcaccaagaaacttgtcgcaagatcaaggctcttcacaagtatgactgtctaagagccaacaaatctacctctgcctttggactagaggcacgtgttcctttccttgacaaagacttcatcaacacagctatgtctctcgaccctgaatccaagatgatcaagccagaggaaggaaggatcgagaaatgggttctaaggagagcctttgacgacgaagaacgtccttatctaccaaaacacattctctacagacagaaagaacagttcagtgatggtgttggctacagttggatcgatggcctgaaagatcacgctgctcaaaatgtcaatgacaagatgatgtcgaacgcggggcatatcttccctcacaacactccaaacactaaagaagcttactactacagaatgatctttgaaaggttcttcccgcagaactctgcgagactaacggttcctggaggtgccaccgtggcttgttcgactgcaaaggcagtggagtgggatgcaagctggtccaacaatatggatccatcaggaagagccgctatcggagttcacctttcggcctacgatggcaagaacgtggcattgaccataccaccacttaaggcaattgacaacatgccgatgatgatgggtcaaggagttgtgattcagtcataacttcgaaggagaaatggatgaaatatgtgttatatcttcccaatgggtgaagtgttttgtatgattttaaaaataagaatgtgatcctttttttttcctatgaagatctgaatgtataatctatcttgtaaaaatttgtttctttgtaagatttgaatgtaccgcttttacgtagatcgatgtacatcaatcttataagtttcaattatgtat

SEQ ID NO: 101752 - protein, 584 aa, Arabidopsis thaliana; identical to SEQ ID NO: 35014
  peptide (1)..(584): Ceres Seq. ID no. 13608612
  misc_feature (193)..(516): Pfam Name: Asparagine synthase Pfam Description: Asparagine synthase
  misc_feature (1)..(584): Homolog of NCBI NO: 11136554 NR Description: asparagine synthetase [Raphanus sativus]
  misc_feature (1)..(584): Homolog of NCBI NO: 1351988 NR Description: Asparagine synthetase [glutamine-hydrolyzing] dependent asparagine synthetase) >gi|1084354|pir||S52387
  misc_feature (1)..(508): Homolog of NCBI NO: 30692849 NR Description: glutamine-dependent asparagine synthetase
  misc_feature (1)..(584): Homolog of NCBI NO: 3132675 NR Description: asparagine synthetase [Elaeagnus umbellata]
  misc_feature (1)..(584): Homolog of NCBI NO: 3821280 NR Description: asparagine synthetase type II [Phaseolus vulgaris]
  misc_feature (1)..(576): Homolog of NCBI NO: 6049841 NR Description: asparagine synthetase [Helianthus annuus]
  misc_feature (1)..(584): Homolog of NCBI NO: 28394774 NR Description: asparagine synthetase [Securigera parviflora]
  misc_feature (1)..(584): Homolog of NCBI NO: 2522320 NR Description: asparagine synthetase [Medicago sativa]

SEQ ID NO: 101753 - protein, 469 aa, Arabidopsis thaliana; identical to SEQ ID NO: 35015
  peptide (1)..(469): Ceres Seq. ID no. 13608613
  misc_feature (78)..(401): Pfam Name: Asparagine synthase Pfam Description: Asparagine synthase
  misc_feature (1)..(469): Homolog of NCBI NO: 11136554 NR Description: asparagine synthetase [Raphanus sativus]
  misc_feature (1)..(469): Homolog of NCBI NO: 1351988 NR Description: Asparagine synthetase [glutamine-hydrolyzing] dependent asparagine synthetase) >gi|1084354|pir||S52387
  misc_feature (1)..(393): Homolog of NCBI NO: 30692849 NR Description: glutamine-dependent asparagine synthetase
  misc_feature (1)..(469): Homolog of NCBI NO: 3132675 NR Description: asparagine synthetase [Elaeagnus umbellata]
  misc_feature (1)..(469): Homolog of NCBI NO: 3821280 NR Description: asparagine synthetase type II [Phaseolus vulgaris]
  misc_feature (1)..(461): Homolog of NCBI NO: 6049841 NR Description: asparagine synthetase [Helianthus annuus]
  misc_feature (1)..(469): Homolog of NCBI NO: 28394774 NR Description: asparagine synthetase [Securigera parviflora]
  misc_feature (1)..(469): Homolog of NCBI NO: 2522320 NR Description: asparagine synthetase [Medicago sativa]

SEQ ID NO: 101754 - protein, 451 aa, Arabidopsis thaliana; identical to SEQ ID NO: 35016
  peptide (1)..(451): Ceres Seq. ID no. 13608614
  misc_feature (60)..(383): Pfam Name: Asparagine synthase Pfam Description: Asparagine synthase
  misc_feature (1)..(451): Homolog of NCBI NO: 11136554 NR Description: asparagine synthetase [Raphanus sativus]
  misc_feature (1)..(451): Homolog of NCBI NO: 1351988 NR Description: Asparagine synthetase [glutamine-hydrolyzing] dependent asparagine synthetase) >gi|1084354|pir||S52387
  misc_feature (1)..(375): Homolog of NCBI NO: 30692849 NR Description: glutamine-dependent asparagine synthetase
  misc_feature (1)..(451): Homolog of NCBI NO: 3132675 NR Description: asparagine synthetase [Elaeagnus umbellata]
  misc_feature (1)..(451): Homolog of NCBI NO: 3821280 NR Description: asparagine synthetase type II [Phaseolus vulgaris]
  misc_feature (1)..(443): Homolog of NCBI NO: 6049841 NR Description: asparagine synthetase [Helianthus annuus]
  misc_feature (1)..(451): Homolog of NCBI NO: 28394774 NR Description: asparagine synthetase [Securigera parviflora]
  misc_feature (1)..(451): Homolog of NCBI NO: 2522320 NR Description: asparagine synthetase [Medicago sativa]

SEQ ID NO: 101755 - DNA, 1266 bp, Arabidopsis thaliana
  misc_feature (1)..(1266): Ceres Seq. ID no. 13608615
  misc_feature: MA Experiment ID: 20000179 Result: Up-regulated in Transcription
  misc_feature: MA Experiment 20000179 PARAMETER Experiment Name: At_Germinating_Seeds_P Parameter: Age (hr) Value: 6 vs. 0
  misc_feature: MA Experiment 20000179 PARAMETER Experiment Name: At_Germinating_Seeds_P Parameter: Tissue Value: Germinating Seeds
  misc_feature: MA Experiment ID: 20000180 Result: Up-regulated in Transcription
  misc_feature: MA Experiment 20000180 PARAMETER Experiment Name: At_Germinating_Seeds_P Parameter: Age (hr) Value: 24 vs. 0
  misc_feature: MA Experiment 20000180 PARAMETER Experiment Name: At_Germinating_Seeds_P Parameter: Tissue Value: Germinating Seeds
  misc_feature: MA Experiment ID: 20000185 Result: Down-regulated in Transcription
  misc_feature: MA Experiment 20000185 PARAMETER Experiment Name: At_Roots__P Parameter: Age (day) Value: 7 vs. 21
  misc_feature: MA Experiment 20000185 PARAMETER Experiment Name: At_Roots__P Parameter: Organism Value: A. thaliana
  misc_feature: MA Experiment 20000185 PARAMETER Experiment Name: At_Roots__P Parameter: Tissue Value: Roots vs. Whole Plant
  misc_feature: MA Experiment ID: 20000227 Result: Down-regulated in Transcription
  misc_feature: MA Experiment 20000227 PARAMETER Experiment Name: At_Root-Tips-vs-Tops_P Parameter: Tissue Value: Root Tips vs. Root Tops
  misc_feature: MA Experiment ID: 20000264 Result: Down-regulated in Transcription
  misc_feature: MA Experiment 20000264 PARAMETER Experiment Name: At_Open_Flower_P Parameter: Age (day) Value: 21
  misc_feature: MA Experiment 20000264 PARAMETER Experiment Name: At_Open_Flower_P Parameter: Plant Line Value: WS
  misc_feature: MA Experiment 20000264 PARAMETER Experiment Name: At_Open_Flower_P Parameter: Tissue Value: Open Flower vs. Whole Plant
  misc_feature: MA Experiment ID: 20000269 Result: Down-regulated in Transcription
  misc_feature: MA Experiment 20000269 PARAMETER Experiment Name: At_1mM_KNO3_L-vs-H_Roots_P Parameter: Age (day) Value: 7,10,12
  misc_feature: MA Experiment 20000269 PARAMETER Experiment Name: At_1mM_KNO3_L-vs-H_Roots_P Parameter: Organism Value: A. thaliana
  misc_feature: MA Experiment 20000269 PARAMETER Experiment Name: At_1mM_KNO3_L-vs-H_Roots_P Parameter: Plant Line Value: WS
  misc_feature: MA Experiment 20000269 PARAMETER Experiment Name: At_1mM_KNO3_L-vs-H_Roots_P Parameter: Timepoint (day) Value: 7,10,12
  misc_feature: MA Experiment 20000269 PARAMETER Experiment Name: At_1mM_KNO3_L-vs-H_Roots_P Parameter: Tissue Value: Roots
  misc_feature: MA Experiment 20000269 PARAMETER Experiment Name: At_1mM_KNO3_L-vs-H_Roots_P Parameter: Treatment Value: 1mM KNO3 vs. 50mM KNO3
  misc_feature: MA Experiment ID: 20000286 Result: Down-regulated in Transcription
  misc_feature: MA Experiment 20000286 PARAMETER Experiment Name: At_Open_Flower_P Parameter: Age (day) Value: 21
  misc_feature: MA Experiment 20000286 PARAMETER Experiment Name: At_Open_Flower_P Parameter: Plant Line Value: WS
  misc_feature: MA Experiment 20000286 PARAMETER Experiment Name: At_Open_Flower_P Parameter: Tissue Value: Half Open vs. Whole Plant
  misc_feature: MA Experiment ID: 20000439 Result: Down-regulated in Transcription
  misc_feature: MA Experiment 20000439 PARAMETER Experiment Name: At_Roots__P Parameter: Age (day) Value: 14 vs. 21
  misc_feature: MA Experiment 20000439 PARAMETER Experiment Name: At_Roots__P Parameter: Organism Value: A. thaliana
  misc_feature: MA Experiment 20000439 PARAMETER Experiment Name: At_Roots__P Parameter: Tissue Value: Roots vs. Whole Plant
  misc_feature: MA Experiment ID: 20000441 Result: Up-regulated in Transcription
  misc_feature: MA Experiment 20000441 PARAMETER Experiment Name: At_1uM_BR-BRZ__P Parameter: Tissue Value: Shoot Apices
  misc_feature: MA Experiment 20000441 PARAMETER Experiment Name: At_1uM_BR-BRZ__P Parameter: Treatment Value: 1uM BR vs. No Treatment
  misc_feature: MA Experiment ID: 20000578 Result: Down-regulated in Transcription
  misc_feature: MA Experiment 20000578 PARAMETER Experiment Name: At_CS3726__P Parameter: Organism Value: A. thaliana
  misc_feature: MA Experiment 20000578 PARAMETER Experiment Name: At_CS3726__P Parameter: Plant Line Value: CS3726
  misc_feature: MA Experiment 20000578 PARAMETER Experiment Name: At_CS3726__P Parameter: Tissue Value: Whole Plant
  misc_feature: MA Experiment ID: 20000794 Result: Down-regulated in Transcription
  misc_feature: MA Experiment 20000794 PARAMETER Experiment Name: At_Petals_P Parameter: Age (day) Value: 23-25 days
  misc_feature: MA Experiment 20000794 PARAMETER Experiment Name: At_Petals_P Parameter: Plant Line Value: WS
  misc_feature: MA Experiment 20000794 PARAMETER Experiment Name: At_Petals_P Parameter: Tissue Value: Petals vs. Whole plant
  misc_feature: MA Experiment ID: 20001557 Result: Down-regulated in Transcription
  misc_feature: MA Experiment 20001557 PARAMETER Experiment Name: At_Drought_Soil_Dry_P Parameter: Age (day) Value: 27
  misc_feature: MA Experiment 20001557 PARAMETER Experiment Name: At_Drought_Soil_Dry_P Parameter: Organism Value: A. thaliana
  misc_feature: MA Experiment 20001557 PARAMETER Experiment Name: At_Drought_Soil_Dry_P Parameter: Plant Line Value: WS
  misc_feature: MA Experiment 20001557 PARAMETER Experiment Name: At_Drought_Soil_Dry_P Parameter: Post Timepoint (hr) Value: 3
  misc_feature: MA Experiment 20001557 PARAMETER Experiment Name: At_Drought_Soil_Dry_P Parameter: Post-Treatment Value: Re-Water vs. No Drought
  misc_feature: MA Experiment 20001557 PARAMETER Experiment Name: At_Drought_Soil_Dry_P Parameter: Timepoint (day) Value: 13
  misc_feature: MA Experiment 20001557 PARAMETER Experiment Name: At_Drought_Soil_Dry_P Parameter: Treatment Value: Drought vs. No Drought
  misc_feature: MA Experiment ID: 20001906 Result: Down-regulated in Transcription
  misc_feature: MA Experiment 20001906 PARAMETER Experiment Name: At_Drought_Reproduction_P Parameter: Age (day) Value: 35
  misc_feature: MA Experiment 20001906 PARAMETER Experiment Name: At_Drought_Reproduction_P Parameter: Organism Value: A. thaliana
  misc_feature: MA Experiment 20001906 PARAMETER Experiment Name: At_Drought_Reproduction_P Parameter: Plant Line Value: WS
  misc_feature: MA Experiment 20001906 PARAMETER Experiment Name: At_Drought_Reproduction_P Parameter: Timepoint (day) Value: 5
  misc_feature: MA Experiment 20001906 PARAMETER Experiment Name: At_Drought_Reproduction_P Parameter: Tissue Value: Siliques
  misc_feature: MA Experiment 20001906 PARAMETER Experiment Name: At_Drought_Reproduction_P Parameter: Treatment Value: Drought vs. No Drought
aaccgataagcctgtatctcctctcaaaccaatctcctccgtcaaatcaaccacgtcatctaatccaacggtagatactcagtcatcaaaccacagccacaaaactcgtttcaagaaacgaataaacttacaaaatcccctccaagtcttatttcttcacaaccatctctgaactcatctttcaatctctcttgattccaatccattcttcttcaagtgccgggttctcgggtcggatcttctaagtctagctagggataatggctactgtcactactcatgcctcggcctcgattttccgaccttgtacttcaaagccaagattcctcaccggttcttccggtaggttgaaccgcgacttgtcgtttacatcgatcggttcatcggccaaaacgtcgtcgttcaaggttgaagctaagaaaggagaatggttgcccggtttggcatcgcctgattatctcaccggcagtcttgccggtgacaatgggtttgacccgttgggtctagcagaggatccagagaacttgaaatggttcgtccaggcagagctggtcaacggacgatgggctatgctcggtgtcgctgggatgcttttgccggaagttttcaccaagatcggaatcataaatgttcctgagtggtacgatgctgggaaagagcagtattttgcatcgtcgtcgacattgttcgtgatcgagttcatattgtttcattacgttgagatcagacggtggcaagacatcaagaacccaggaagtgtgaaccaagaccctatctttaagcaatacagcttacctaagggtgaagttggttaccctggtggaatctttaacccgcttaactttgctcctacgcaagaggccaaggagaaagagctagcaaacgggaggttggcgatgttggcattcttagggtttgtggttcaacacaatgtgactggaaaaggaccatttgagaatctgttgcagcacttgtctgacccatggcacaacactattgtccaaaccttcaactaaagagtgaagacagacttatgatctcatacctatctatcttccatcactttcatgtctgtctgtgagtgtgtttcatcttagagttcttggtttttgagcttgaattattgttgaaccgttgtagctccatgaacaaatttggaatcttcaatgtacagaggaactaagttaatcaacattgttgtactctttaatatctattattcatgtggcaacagttatatataagcacaccataacttagattcac

SEQ ID NO: 101756 - protein, 251 aa, Arabidopsis thaliana; identical to SEQ ID NO: 26326
  peptide (1)..(251): Ceres Seq. ID no. 13608616
  misc_feature (62)..(224): Pfam Name: Chlorophyll A-B binding protein Pfam Description: Chlorophyll A-B binding protein
  misc_feature (1)..(251): Homolog of NCBI NO: 30692874 NR Description: light-harvesting chlorophyll a/b binding protein
  misc_feature (1)..(251): Homolog of NCBI NO: 100196 NR Description: chlorophyll a/b-binding protein (cab-11) - tomato
  misc_feature (1)..(249): Homolog of NCBI NO: 11277626 NR Description: chlorophyll a/b-binding protein [imported] -
  misc_feature (1)..(251): Homolog of NCBI NO: 100197 NR Description: chlorophyll a/b-binding protein (cab-12) - tomato
  misc_feature (1)..(250): Homolog of NCBI NO: 13385204 NR Description: cDNA sequence BC002118 [Mus musculus]
  misc_feature (1)..(249): Homolog of NCBI NO: 322392 NR Description: chlorophyll a/b-binding protein type 4,
  misc_feature (8)..(249): Homolog of NCBI NO: 322393 NR Description: chlorophyll a/b-binding protein type 4, I - Scotch pine (fragment) >gi|829287|emb|CAA78901.1| Lhca4
  misc_feature (1)..(249): Homolog of NCBI NO: 20218813 NR Description: putative chlorophyll a/b-binding protein type 4
  misc_feature (53)..(249): Homolog of NCBI NO: 1076630 NR Description: light-harvesting chlorophyll a - common tobacco
  misc_feature (18)..(251): Homolog of NCBI NO: 9624495 NR Description: chlorophyll a/b-binding protein precursor

SEQ ID NO: 101757 - protein, 148 aa, Arabidopsis thaliana; identical to SEQ ID NO: 26327
  peptide (1)..(148): Ceres Seq. ID no. 13608617
  misc_feature (1)..(121): Pfam Name: Chlorophyll A-B binding protein Pfam Description: Chlorophyll A-B binding protein
  misc_feature (1)..(148): Homolog of NCBI NO: 30692874 NR Description: light-harvesting chlorophyll a/b binding protein
  misc_feature (1)..(148): Homolog of NCBI NO: 100196 NR Description: chlorophyll a/b-binding protein (cab-11) - tomato
  misc_feature (1)..(146): Homolog of NCBI NO: 11277626 NR Description: chlorophyll a/b-binding protein [imported] -
  misc_feature (1)..(148): Homolog of NCBI NO: 100197 NR Description: chlorophyll a/b-binding protein (cab-12) - tomato
  misc_feature (1)..(147): Homolog of NCBI NO: 13385204 NR Description: cDNA sequence BC002118 [Mus musculus]
  misc_feature (1)..(146): Homolog of NCBI NO: 322392 NR Description: chlorophyll a/b-binding protein type 4,
  misc_feature (1)..(146): Homolog of NCBI NO: 322393 NR Description: chlorophyll a/b-binding protein type 4, I - Scotch pine (fragment) >gi|829287|emb|CAA78901.1| Lhca4
  misc_feature (1)..(146): Homolog of NCBI NO: 20218813 NR Description: putative chlorophyll a/b-binding protein type 4
  misc_feature (1)..(146): Homolog of NCBI NO: 1076630 NR Description: light-harvesting chlorophyll a - common tobacco
  misc_feature (1)..(148): Homolog of NCBI NO: 9624495 NR Description: chlorophyll a/b-binding protein precursor

SEQ ID NO: 101758 - protein, 142 aa, Arabidopsis thaliana; identical to SEQ ID NO: 26328
  peptide (1)..(142): Ceres Seq. ID no. 13608618
  misc_feature (1)..(115): Pfam Name: Chlorophyll A-B binding protein Pfam Description: Chlorophyll A-B binding protein
  misc_feature (1)..(142): Homolog of NCBI NO: 30692874 NR Description: light-harvesting chlorophyll a/b binding protein
  misc_feature (1)..(142): Homolog of NCBI NO: 100196 NR Description: chlorophyll a/b-binding protein (cab-11) - tomato
  misc_feature (1)..(140): Homolog of NCBI NO: 11277626 NR Description: chlorophyll a/b-binding protein [imported] -
  misc_feature (1)..(142): Homolog of NCBI NO: 100197 NR Description: chlorophyll a/b-binding protein (cab-12) - tomato
  misc_feature (1)..(141): Homolog of NCBI NO: 13385204 NR Description: cDNA sequence BC002118 [Mus musculus]
  misc_feature (1)..(140): Homolog of NCBI NO: 322392 NR Description: chlorophyll a/b-binding protein type 4,
  misc_feature (1)..(140): Homolog of NCBI NO: 322393 NR Description: chlorophyll a/b-binding protein type 4, I - Scotch pine (fragment) >gi|829287|emb|CAA78901.1| Lhca4
  misc_feature (1)..(140): Homolog of NCBI NO: 20218813 NR Description: putative chlorophyll a/b-binding protein type 4
  misc_feature (1)..(140): Homolog of NCBI NO: 1076630 NR Description: light-harvesting chlorophyll a - common tobacco
  misc_feature (1)..(142): Homolog of NCBI NO: 9624495 NR Description: chlorophyll a/b-binding protein precursor

SEQ ID NO: 101759 - DNA, 1733 bp, Arabidopsis thaliana
  misc_feature (1)..(1733): Ceres Seq. ID no. 13608624
  misc_feature: MA Experiment ID: 108461 Result: Up-regulated in Transcription
  misc_feature: MA Experiment 108461 PARAMETER Experiment Name: At_Germinating_Seeds_cDNA_P Parameter: Age (day) Value: 1 vs. 0
  misc_feature: MA Experiment 108461 PARAMETER Experiment Name: At_Germinating_Seeds_cDNA_P Parameter: Tissue Value: Germinating Seeds
  misc_feature: MA Experiment ID: 20000088 Result: Up-regulated in Transcription
  misc_feature: MA Experiment 20000088 PARAMETER Experiment Name: At_100uM_ABA_Mutants_cDNA_P Parameter: Plant Line Value: Landsberg
  misc_feature: MA Experiment 20000088 PARAMETER Experiment Name: At_100uM_ABA_Mutants_cDNA_P Parameter: Timepoint (hr) Value: 6
  misc_feature: MA Experiment 20000088 PARAMETER Experiment Name: At_100uM_ABA_Mutants_cDNA_P Parameter: Tissue Value: Aerial
  misc_feature: MA Experiment 20000088 PARAMETER Experiment Name: At_100uM_ABA_Mutants_cDNA_P Parameter: Treatment Value: 100uM ABA vs. No Treatment
  misc_feature: MA Experiment ID: 20000794 Result: Up-regulated in Transcription
  misc_feature: MA Experiment 20000794 PARAMETER Experiment Name: At_Petals_P Parameter: Age (day) Value: 23-25 days
  misc_feature: MA Experiment 20000794 PARAMETER Experiment Name: At_Petals_P Parameter: Plant Line Value: WS
  misc_feature: MA Experiment 20000794 PARAMETER Experiment Name: At_Petals_P Parameter: Tissue Value: Petals vs. Whole plant
atcattcttagaaccaaaacggaaagtcccaacgatcccattttactccttttcaccacctctagtagcagagagagagagagagtatggcgattacggtgccgagacggcaactcttcatcggcggtcaatggactgagcccgttctccgtaaaactctccctgttgtcaatcccgccaccgaagacatcatcggttatattccagctgcaacttctgaagatgtggagcttgctgtggaagctgctaggaaagcatttactaggaacaacggaaaggattgggctagagcaactggtgctgttcgtgccaaatacttgcgcgctattgcagctaaggtaatagagaggaagtctgaactagctaatcttgaggctattgattgcggtaaacctctagatgaagcagcatgggacatggatgatgttgctggatgttttgaatattatgctgacctagctgaaggcttggatgcaaagcagaagactcctctttctcttccgatggatacttttaagggttatattctcaaggaacccattggcgtagttggcatgattactccatggaactatccgttattgatggctgtctggaaagtcgctccttcacttgctgctgggtgcacggctatactgaaaccttcagagttggcctccctgacatgtttggagctcgctgatatttgccgcgaggtgggtctaccacctggtgttcttaatattctgactggtttaggaactgaagcaggtgctccactggcatcgcatccacatgttgacaagattgtattcactggaagcacaacaactggaagcagcattatgacttccgctgccaaattggtgaaaccagtttccttggagcttgggggtaaaagccctatcattgtctttgatgatgtcgatattgataaagctgtggaatggactatgtttggttgtttctggacgaatgggcagatttgtagtgccacatctcgacttcttgtgcatgaaaggattgctgacgagtttttggacaagctggtaaagtggaccaagaacattaagatttcagatccttttgaagaaggctgtaggcttggtcctgttgtcagtaaaggacagtacgagagagttctaaagtttgtctcaaacgctaggaatgaaggtgcaactgttctttgtggaggagttcgtcctgagcatttaaagaagggatactttgttgaacctgcgattgtttcaaatgtgactacttcaatggaaatctggagagaggaagtctttggtcctgctctgtgtgtgaaaacattctccaccgaggatgaggcaattcagcttgcaaatgactctcaatatggattagcaggcgcagtattatcaaatgatctggagcggtgtgatcgtgttagtaaggctttccaggcgggaatagtgtgggtcaactgctctcagccatgcttctgccaagctccatggggtggaaccaaacgcagtggatttggccgtgaattgggagaatggggacttgagaactacttgagtgtgaagcaggtgactcagtatatctctgatgaaccatggggatggtacaaacctccttccaagctctgagacaaacactagttcctgatatttccttaaaacatgtactcatgagaatataccaataaagcaagagacccttctgtaagagaaatggtattgctactttaaattcttgaaaaaaatgaaaaataagatgagatg

SEQ ID NO: 101760 - protein, 503 aa, Arabidopsis thaliana; identical to SEQ ID NO: 24564
  peptide (1)..(503): Ceres Seq. ID no. 13608625
  misc_feature (1)..(503): Homolog of NCBI NO: 15228346 NR Description: betaine-aldehyde dehydrogenase, putative (BADH) thaliana] >gi|7431494|pir||T13006 betaine aldehyde dehydrogenase
  misc_feature (1)..(503): Homolog of NCBI NO: 33943628 NR Description: betaine aldehyde dehydrogenase [Brassica napus]
  misc_feature (1)..(501): Homolog of NCBI NO: 18410730 NR Description: betaine-aldehyde dehydrogenase (BADH)
  misc_feature (1)..(500): Homolog of NCBI NO: 11251896 NR Description: betaine-aldehyde dehydrogenase (EC 1.2.1.8) - Amaranthus hypochondriacus >gi|2388710|gb|AAB70010.1| betaine
  misc_feature (1)..(503): Homolog of NCBI NO: 15131692 NR Description: putative aminoaldehyde dehydrogenase [Pisum
  misc_feature (1)..(503): Homolog of NCBI NO: 11414910 NR Description: betaine aldehyde dehydrogenase [Avicennia marina]
  misc_feature (1)..(500): Homolog of NCBI NO: 2811031 NR Description: Betaine-aldehyde dehydrogenase, chloroplast (BADH) >gi|2109299|gb|AAB58165.1| betaine aldehyde dehydrogenase
  misc_feature (1)..(503): Homolog of NCBI NO: 30698520 NR Description: betaine aldehyde dehydrogenase [Oryza sativa
  misc_feature (5)..(503): Homolog of NCBI NO: 3913464 NR Description: Betaine-aldehyde dehydrogenase (BADH)
  misc_feature (1)..(503): Homolog of NCBI NO: 17221346 NR Description: aminoaldehyde dehydrogenase [Pisum sativum]

SEQ ID NO: 101761 - protein, 393 aa, Arabidopsis thaliana; identical to SEQ ID NO: 24565
  peptide (1)..(393): Ceres Seq. ID no. 13608626
  misc_feature (1)..(393): Homolog of NCBI NO: 15228346 NR Description: betaine-aldehyde dehydrogenase, putative (BADH) thaliana] >gi|7431494|pir||T13006 betaine aldehyde dehydrogenase
  misc_feature (1)..(393): Homolog of NCBI NO: 33943628 NR Description: betaine aldehyde dehydrogenase [Brassica napus]
  misc_feature (1)..(391): Homolog of NCBI NO: 18410730 NR Description: betaine-aldehyde dehydrogenase (BADH)
  misc_feature (1)..(390): Homolog of NCBI NO: 11251896 NR Description: betaine-aldehyde dehydrogenase (EC 1.2.1.8) - Amaranthus hypochondriacus >gi|2388710|gb|AAB70010.1| betaine
  misc_feature (1)..(393): Homolog of NCBI NO: 15131692 NR Description: putative aminoaldehyde dehydrogenase [Pisum
  misc_feature (1)..(393): Homolog of NCBI NO: 11414910 NR Description: betaine aldehyde dehydrogenase [Avicennia marina]
  misc_feature (1)..(390): Homolog of NCBI NO: 2811031 NR Description: Betaine-aldehyde dehydrogenase, chloroplast (BADH) >gi|2109299|gb|AAB58165.1| betaine aldehyde dehydrogenase
  misc_feature (1)..(393): Homolog of NCBI NO: 30698520 NR Description: betaine aldehyde dehydrogenase [Oryza sativa
  misc_feature (1)..(393): Homolog of NCBI NO: 3913464 NR Description: Betaine-aldehyde dehydrogenase (BADH)
  misc_feature (1)..(393): Homolog of NCBI NO: 17221346 NR Description: aminoaldehyde dehydrogenase [Pisum sativum]

SEQ ID NO: 101762 - protein, 364 aa, Arabidopsis thaliana; identical to SEQ ID NO: 24566
  peptide (1)..(364): Ceres Seq. ID no. 13608627
  misc_feature (1)..(364): Homolog of NCBI NO: 15228346 NR Description: betaine-aldehyde dehydrogenase, putative (BADH) thaliana] >gi|7431494|pir||T13006 betaine aldehyde dehydrogenase
  misc_feature (1)..(364): Homolog of NCBI NO: 33943628 NR Description: betaine aldehyde dehydrogenase [Brassica napus]
  misc_feature (1)..(362): Homolog of NCBI NO: 18410730 NR Description: betaine-aldehyde dehydrogenase (BADH)
  misc_feature (1)..(361): Homolog of NCBI NO: 11251896 NR Description: betaine-aldehyde dehydrogenase (EC 1.2.1.8) - Amaranthus hypochondriacus >gi|2388710|gb|AAB70010.1| betaine
  misc_feature (1)..(364): Homolog of NCBI NO: 15131692 NR Description: putative aminoaldehyde dehydrogenase [Pisum
  misc_feature (1)..(364): Homolog of NCBI NO: 11414910 NR Description: betaine aldehyde dehydrogenase [Avicennia marina]
  misc_feature (1)..(361): Homolog of NCBI NO: 2811031 NR Description: Betaine-aldehyde dehydrogenase, chloroplast (BADH) >gi|2109299|gb|AAB58165.1| betaine aldehyde dehydrogenase
  misc_feature (1)..(364): Homolog of NCBI NO: 30698520 NR Description: betaine aldehyde dehydrogenase [Oryza sativa
  misc_feature (1)..(364): Homolog of NCBI NO: 3913464 NR Description: Betaine-aldehyde dehydrogenase (BADH)
  misc_feature (1)..(364): Homolog of NCBI NO: 17221346 NR Description: aminoaldehyde dehydrogenase [Pisum sativum]

SEQ ID NO: 101763 - DNA, 883 bp, Arabidopsis thaliana
  misc_feature (1)..(883): Ceres Seq. ID no. 13608636
  misc_feature: MA Experiment ID: 108433 Result: Down-regulated in Transcription
  misc_feature: MA Experiment 108433 PARAMETER Experiment Name: At_rhl_Mutant2_cDNA_P Parameter: Age (day) Value: 7
  misc_feature: MA Experiment 108433 PARAMETER Experiment Name: At_rhl_Mutant2_cDNA_P Parameter: Organism Value: A. thaliana
  misc_feature: MA Experiment 108433 PARAMETER Experiment Name: At_rhl_Mutant2_cDNA_P Parameter: Plant Line Value: rhl Mutant vs. wt landsburg
  misc_feature: MA Experiment 108433 PARAMETER Experiment Name: At_rhl_Mutant2_cDNA_P Parameter: Tissue Value: Roots
  misc_feature: MA Experiment ID: 108462 Result: Down-regulated in Transcription
  misc_feature: MA Experiment 108462 PARAMETER Experiment Name: At_Germinating_Seeds_cDNA_P Parameter: Age (day) Value: 2 vs. 0
  misc_feature: MA Experiment 108462 PARAMETER Experiment Name: At_Germinating_Seeds_cDNA_P Parameter: Tissue Value: Germinating Seeds
  misc_feature: MA Experiment ID: 108463 Result: Down-regulated in Transcription
  misc_feature: MA Experiment 108463 PARAMETER Experiment Name: At_Germinating_Seeds_cDNA_P Parameter: Age (day) Value: 3 vs. 0
  misc_feature: MA Experiment 108463 PARAMETER Experiment Name: At_Germinating_Seeds_cDNA_P Parameter: Tissue Value: Germinating Seeds
  misc_feature: MA Experiment ID: 108464 Result: Down-regulated in Transcription
  misc_feature: MA Experiment 108464 PARAMETER Experiment Name: At_Germinating_Seeds_cDNA_P Parameter: Age (day) Value: 4 vs. 0
  misc_feature: MA Experiment 108464 PARAMETER Experiment Name: At_Germinating_Seeds_cDNA_P Parameter: Tissue Value: Germinating Seeds
  misc_feature: MA Experiment ID: 108585 Result: Up-regulated in Transcription
  misc_feature: MA Experiment 108585 PARAMETER Experiment Name: At_5mM_NaNP_cDNA_P Parameter: Timepoint (hr) Value: 6
  misc_feature: MA Experiment 108585 PARAMETER Experiment Name: At_5mM_NaNP_cDNA_P Parameter: Tissue Value: Aerial
  misc_feature: MA Experiment 108585 PARAMETER Experiment Name: At_5mM_NaNP_cDNA_P Parameter: Treatment Value: null
  misc_feature: MA Experiment ID: 20000113 Result: Up-regulated in Transcription
  misc_feature: MA Experiment 20000113 PARAMETER Experiment Name: At_42deg_Heat_cDNA_P Parameter: Temperature (deg C) Value: 42 vs. 22
  misc_feature: MA Experiment 20000113 PARAMETER Experiment Name: At_42deg_Heat_cDNA_P Parameter: Timepoint (hr) Value: 8
  misc_feature: MA Experiment 20000113 PARAMETER Experiment Name: At_42deg_Heat_cDNA_P Parameter: Tissue Value: Aerial
  misc_feature: MA Experiment ID: 20000224 Result: Down-regulated in Transcription
  misc_feature: MA Experiment ID: 20001557 Result: Up-regulated in Transcription
  misc_feature: MA Experiment 20001557 PARAMETER Experiment Name: At_Drought_Soil_Dry_P Parameter: Age (day) Value: 27
  misc_feature: MA Experiment 20001557 PARAMETER Experiment Name: At_Drought_Soil_Dry_P Parameter: Organism Value: A. thaliana
  misc_feature: MA Experiment 20001557 PARAMETER Experiment Name: At_Drought_Soil_Dry_P Parameter: Plant Line Value: WS
  misc_feature: MA Experiment 20001557 PARAMETER Experiment Name: At_Drought_Soil_Dry_P Parameter: Post Timepoint (hr) Value: 3
  misc_feature: MA Experiment 20001557 PARAMETER Experiment Name: At_Drought_Soil_Dry_P Parameter: Post-Treatment Value: Re-Water vs. No Drought
  misc_feature: MA Experiment 20001557 PARAMETER Experiment Name: At_Drought_Soil_Dry_P Parameter: Timepoint (day) Value: 13
  misc_feature: MA Experiment 20001557 PARAMETER Experiment Name: At_Drought_Soil_Dry_P Parameter: Treatment Value: Drought vs. No Drought
aaaaataatatcgagacgagacgggtttgtttcttctctctatctctatatctaccaaaatcctttgccccccgaatctagttctctcgatcgaccctgtgacgatggctaataaccaagcaagccttcttctgcagaaacagcttaaagatctgtgtaagaaacctgttgatggtttctctgctggcctcgttgatgagaagaacgttttccaatggagcgtctctattatgggtcctcctgatactttgtatgaaggtggcttttttaatgcaattatgtcgtttccggagaattatccagtttcaccaccaactgtgacgtttacctcggagatgtggcatcctaatgtttattctgatggaaaagtttgcatttctattcttcatcctcctggtgatgatcctcatggatacgagcttgcctctgaacgttggacccctgtccatacggtagaaagcattgtgttgagtatcatatcgatgctctcaggtcccaacgatgagtcaccagcgaatgtggaagctgcaaaggaatggagagacaacagagcagagtttaggaagaaagtgagtcgctgtgtgagaagatcgcaagagatgctatgaacatctctccagcgtttttttcgtgttgtagaaatatcgattctaatcttcttatgagaaagcctaagcagaaccaaccatcttcaagcagcagccagatgaatctgactttgcaaaagcttctctttctttttcctttttgggttttgttctctaaggtttggtttggaatattggtgtggaatcaaatccgctccatattttaggattatattattgcactcgttaatggattcgtttgatctggctttttaactttattctggttttgggtt

SEQ ID NO: 101764 - protein, 167 aa, Arabidopsis thaliana; identical to SEQ ID NO: 35878
  peptide (1)..(167): Ceres Seq. ID no. 13608637
  misc_feature (1)..(167): Homolog of NCBI NO: 18410268 NR Description: ubiquitin-conjugating enzyme 14 (UBC14)
  misc_feature (1)..(166): Homolog of NCBI NO: 19347846 NR Description: putative E2, ubiquitin-conjugating enzyme UBC7
  misc_feature (1)..(166): Homolog of NCBI NO: 28973769 NR Description: putative E2, ubiquitin-conjugating enzyme UBC7
  misc_feature (4)..(166): Homolog of NCBI NO: 31088843 NR Description: Ubiquitin-conjugating enzyme E2 7
  misc_feature (3)..(166): Homolog of NCBI NO: 18408206 NR Description: ubiquitin-conjugating enzyme 13 (UBC13)
  misc_feature (4)..(167): Homolog of NCBI NO: 34908132 NR Description: putative Ubiquitin carrier protein UBC7 [Oryza
  misc_feature (4)..(167): Homolog of NCBI NO: 7437989 NR Description: ubiquitin-conjugating enzyme E2 - maize
  misc_feature (5)..(166): Homolog of NCBI NO: 7437988 NR Description: ubiquitin-conjugating enzyme - maize
  misc_feature (34)..(166): Homolog of NCBI NO: 18424219 NR Description: ubiquitin-conjugating enzyme 7 (UBC7)
  misc_feature (21)..(167): Homolog of NCBI NO: 136647 NR Description: Ubiquitin-conjugating enzyme E2 7

SEQ ID NO: 101765 - protein, 125 aa, Arabidopsis thaliana; identical to SEQ ID NO: 35879
  peptide (1)..(125): Ceres Seq. ID no. 13608638
  misc_feature (1)..(125): Homolog of NCBI NO: 18410268 NR Description: ubiquitin-conjugating enzyme 14 (UBC14)
  misc_feature (1)..(124): Homolog of NCBI NO: 19347846 NR Description: putative E2, ubiquitin-conjugating enzyme UBC7
  misc_feature (1)..(124): Homolog of NCBI NO: 28973769 NR Description: putative E2, ubiquitin-conjugating enzyme UBC7
  misc_feature (1)..(124): Homolog of NCBI NO: 31088843 NR Description: Ubiquitin-conjugating enzyme E2 7
  misc_feature (1)..(124): Homolog of NCBI NO: 18408206 NR Description: ubiquitin-conjugating enzyme 13 (UBC13)
  misc_feature (1)..(125): Homolog of NCBI NO: 34908132 NR Description: putative Ubiquitin carrier protein UBC7 [Oryza
  misc_feature (1)..(125): Homolog of NCBI NO: 7437989 NR Description: ubiquitin-conjugating enzyme E2 - maize
  misc_feature (1)..(124): Homolog of NCBI NO: 7437988 NR Description: ubiquitin-conjugating enzyme - maize
  misc_feature (1)..(124): Homolog of NCBI NO: 18424219 NR Description: ubiquitin-conjugating enzyme 7 (UBC7)
  misc_feature (1)..(125): Homolog of NCBI NO: 136647 NR Description: Ubiquitin-conjugating enzyme E2 7

SEQ ID NO: 101766 - protein, 109 aa, Arabidopsis thaliana; identical to SEQ ID NO: 35880
  peptide (1)..(109): Ceres Seq. ID no. 13608639
  misc_feature (1)..(109): Homolog of NCBI NO: 18410268 NR Description: ubiquitin-conjugating enzyme 14 (UBC14)
  misc_feature (1)..(108): Homolog of NCBI NO: 19347846 NR Description: putative E2, ubiquitin-conjugating enzyme UBC7
  misc_feature (1)..(108): Homolog of NCBI NO: 28973769 NR Description: putative E2, ubiquitin-conjugating enzyme UBC7
  misc_feature (1)..(108): Homolog of NCBI NO: 31088843 NR Description: Ubiquitin-conjugating enzyme E2 7
  misc_feature (1)..(108): Homolog of NCBI NO: 18408206 NR Description: ubiquitin-conjugating enzyme 13 (UBC13)
  misc_feature (1)..(109): Homolog of NCBI NO: 34908132 NR Description: putative Ubiquitin carrier protein UBC7 [Oryza
  misc_feature (1)..(109): Homolog of NCBI NO: 7437989 NR Description: ubiquitin-conjugating enzyme E2 - maize
  misc_feature (1)..(108): Homolog of NCBI NO: 7437988 NR Description: ubiquitin-conjugating enzyme - maize
  misc_feature (1)..(108): Homolog of NCBI NO: 18424219 NR Description: ubiquitin-conjugating enzyme 7 (UBC7)
  misc_feature (1)..(109): Homolog of NCBI NO: 136647 NR Description: Ubiquitin-conjugating enzyme E2 7

SEQ ID NO: 101767 - DNA, 1101 bp, Arabidopsis thaliana
  misc_feature (1)..(1101): Ceres Seq. ID no. 13608640
  misc_feature: MA Experiment ID: 108434 Result: Up-regulated in Transcription
  misc_feature: MA Experiment 108434 PARAMETER Experiment Name: At_Root_Tips_cDNA_P Parameter: Tissue Value: Root Tips
  misc_feature: MA Experiment ID: 108577 Result: Up-regulated in Transcription
  misc_feature: MA Experiment 108577 PARAMETER Experiment Name: At_42deg_Heat_cDNA_P Parameter: Temperature (deg C) Value: 42 vs. 22
  misc_feature: MA Experiment 108577 PARAMETER Experiment Name: At_42deg_Heat_cDNA_P Parameter: Timepoint (hr) Value: 6
  misc_feature: MA Experiment 108577 PARAMETER Experiment Name: At_42deg_Heat_cDNA_P Parameter: Tissue Value: Aerial
  misc_feature: MA Experiment ID: 108579 Result: Down-regulated in Transcription
  misc_feature: MA Experiment 108579 PARAMETER Experiment Name: At_4deg_Cold_cDNA_P Parameter: Temperature (deg C) Value: 4 vs. 22
  misc_feature: MA Experiment 108579 PARAMETER Experiment Name: At_4deg_Cold_cDNA_P Parameter: Timepoint (hr) Value: 6
  misc_feature: MA Experiment 108579 PARAMETER Experiment Name: At_4deg_Cold_cDNA_P Parameter: Tissue Value: Aerial
  misc_feature: MA Experiment ID: 20000224 Result: Down-regulated in Transcription
  misc_feature: MA Experiment ID: 20000437 Result: Up-regulated in Transcription
  misc_feature: MA Experiment 20000437 PARAMETER Experiment Name: At_Drought_P Parameter: Age (day) Value: 8
  misc_feature: MA Experiment 20000437 PARAMETER Experiment Name: At_Drought_P Parameter: Organism Value: A. thaliana
  misc_feature: MA Experiment 20000437 PARAMETER Experiment Name: At_Drought_P Parameter: Plant Line Value: WS
  misc_feature: MA Experiment 20000437 PARAMETER Experiment Name: At_Drought_P Parameter: Timepoint (hr) Value: 24
  misc_feature: MA Experiment 20000437 PARAMETER Experiment Name: At_Drought_P Parameter: Tissue Value: Whole Plant
  misc_feature: MA Experiment 20000437 PARAMETER Experiment Name: At_Drought_P Parameter: Treatment Value: Drought vs. No Drought
  misc_feature: MA Experiment ID: 20001905 Result: Down-regulated in Transcription
  misc_feature: MA Experiment 20001905 PARAMETER Experiment Name: At_Drought_Reproduction_P Parameter: Age (day) Value: 40
  misc_feature: MA Experiment 20001905 PARAMETER Experiment Name: At_Drought_Reproduction_P Parameter: Organism Value: A. thaliana
  misc_feature: MA Experiment 20001905 PARAMETER Experiment Name: At_Drought_Reproduction_P Parameter: Plant Line Value: WS
  misc_feature: MA Experiment 20001905 PARAMETER Experiment Name: At_Drought_Reproduction_P Parameter: Timepoint (day) Value: 10
  misc_feature: MA Experiment 20001905 PARAMETER Experiment Name: At_Drought_Reproduction_P Parameter: Tissue Value: Rosettes
  misc_feature: MA Experiment 20001905 PARAMETER Experiment Name: At_Drought_Reproduction_P Parameter: Treatment Value: Drought vs. No Drought
ataagaagggcttagggttcacttcagatctgtctttgaacattgctactctcaagtgatcaaattaactccgtcgcaggtgatgaggagatacagtccgccttattacagtcctccgaggagaggatacggtggtcgaggtagaagtcctcctcctcctcctcctcgacgtggatatggtggtggtggtggtggtggtggacgtagaggatctagccatggaagtctcttggttcgtaacattcctcttgattgcagaccagaagagcttcgtgagccctttgagaggtttggacctgtgagagatgtctatatccccagagactattactcagggcaaccgcgggggtttgcgtttgtggagtttgttgatgcatatgatgctggggaggctcaaagaagcatgaacaggagaagctttgctggaagagagataacggtggttgttgcttcagagtctaggaaaaggcctgaagagatgcgtgtgaagactaggactcgtagtagggaaccttcaggctccagggatcgttctcatggacggtctcgttcacgttcaatctctcgatcacgttctccacgtcgtccgtcagattctagaagcagataccgatcaaggtcttactctcctgcaccaagacgaagaggaggtcctcctcgtggggaagaagatgaaaattacagtcgtaggtcctactcccctggctatgaaggtgctgctgctgctgctccagatcgggacagaaatggagacaatgagattagagaaaaaccgggctatgaagcagaggatagacgtcgtggtggaagagcagtttcaaggtcgccatcaggatccaggtccaggtctgtggaggtatctccaagatgaaacttatgtgaagaagtggccgaccaaaactttgtgcaacgctttatgggttttgcatttctctagtagtgcgtctctgtgtctttaaaaactccttactctggcttgtcaaagatattttgtcttgtgatgtgatgttacttgaaatcggtttcggtttattgggtcttattataaaattgtatgaagaagattggttatgcttttgatgtgagacaggtttaaaaccc

SEQ ID NO: 101768 - protein, 262 aa, Arabidopsis thaliana; identical to SEQ ID NO: 35092
  peptide (1)..(262): Ceres Seq. ID no. 13608641
  misc_feature (49)..(120): Pfam Name: RNA recognition motif. (a.k.a. RRM, RBD, or RNP domain) Pfam Description: RNA recognition motif. (a.k.a. RRM, RBD, or RNP
  misc_feature (1)..(262): Homolog of NCBI NO: 18410283 NR Description: arginine/serine-rich protein SCL30 [Arabidopsis >gi|20466366|gb|AAM20500.1| putative RNA binding protein thaliana] >gi|21554261|gb|AAM63336.1| putative RNA putative RNA
  misc_feature (1)..(262): Homolog of NCBI NO: 9843657 NR Description: SC35-like splicing factor SCL30, 30 kD
  misc_feature (1)..(262): Homolog of NCBI NO: 11358671 NR Description: probable RNA binding protein - Arabidopsis >gi|7076789|emb|CAB75904.1| putative RNA binding protein
  misc_feature (1)..(140): Homolog of NCBI NO: 12002297 NR Description: unknown [Oryza sativa]
  misc_feature (2)..(262): Homolog of NCBI NO: 11358835 NR Description: serine/arginine-rich protein [imported] -
  misc_feature (2)..(256): Homolog of NCBI NO: 15293081 NR Description: unknown protein [Arabidopsis thaliana]
  misc_feature (2)..(262): Homolog of NCBI NO: 15231285 NR Description: arginine/serine-rich splicing factor SCL30a
  misc_feature (2)..(212): Homolog of NCBI NO: 18405316 NR Description: arginine/serine-rich protein [Arabidopsis
  misc_feature (2)..(262): Homolog of NCBI NO: 9843661 NR Description: SC35-like splicing factor SCL30a, 30a kD
  misc_feature (48)..(244): Homolog of NCBI NO: 23613056 NR Description: Ser/Arg-rich splicing factor, putative [Plasmodium

SEQ ID NO: 101769 - protein, 155 aa, Arabidopsis thaliana; identical to SEQ ID NO: 35093
  peptide (1)..(155): Ceres Seq. ID no. 13608642
  misc_feature (45)..(99): Pfam Name: Protamine P1 Pfam Description: Protamine P1
  misc_feature (1)..(155): Homolog of NCBI NO: 18410283 NR Description: arginine/serine-rich protein SCL30 [Arabidopsis >gi|20466366|gb|AAM20500.1| putative RNA binding protein thaliana] >gi|21554261|gb|AAM63336.1| putative RNA putative RNA
  misc_feature (1)..(155): Homolog of NCBI NO: 9843657 NR Description: SC35-like splicing factor SCL30, 30 kD
  misc_feature (1)..(155): Homolog of NCBI NO: 11358671 NR Description: probable RNA binding protein - Arabidopsis >gi|7076789|emb|CAB75904.1| putative RNA binding protein
  misc_feature (1)..(33): Homolog of NCBI NO: 12002297 NR Description: unknown [Oryza sativa]
  misc_feature (1)..(155): Homolog of NCBI NO: 11358835 NR Description: serine/arginine-rich protein [imported] -
  misc_feature (1)..(149): Homolog of NCBI NO: 15293081 NR Description: unknown protein [Arabidopsis thaliana]
  misc_feature (1)..(155): Homolog of NCBI NO: 15231285 NR Description: arginine/serine-rich splicing factor SCL30a
  misc_feature (1)..(105): Homolog of NCBI NO: 18405316 NR Description: arginine/serine-rich protein [Arabidopsis
  misc_feature (1)..(155): Homolog of NCBI NO: 9843661 NR Description: SC35-like splicing factor SCL30a, 30a kD
  misc_feature (1)..(137): Homolog of NCBI NO: 23613056 NR Description: Ser/Arg-rich splicing factor, putative [Plasmodium

SEQ ID NO: 101770 - protein, 140 aa, Arabidopsis thaliana; identical to SEQ ID NO: 35094
  peptide (1)..(140): Ceres Seq. ID no. 13608643

SEQ ID NO: 101771 - DNA, 1208 bp, Arabidopsis thaliana
  misc_feature (1)..(1208): Ceres Seq. ID no. 13608673
  misc_feature: MA Experiment ID: 108434 Result: Down-regulated in Transcription
  misc_feature: MA Experiment 108434 PARAMETER Experiment Name: At_Root_Tips_cDNA_P Parameter: Tissue Value: Root Tips
  misc_feature: MA Experiment ID: 108595 Result: Up-regulated in Transcription
  misc_feature: MA Experiment 108595 PARAMETER Experiment Name: At_Ler-pi_Ovule_cDNA_P Parameter: Plant Line Value: null
  misc_feature: MA Experiment ID: 20000495 Result: Down-regulated in Transcription
  misc_feature: MA Experiment 20000495 PARAMETER Experiment Name: At_Guard_Cells_P Parameter: Harvest Date Value: 8/2/2002
  misc_feature: MA Experiment 20000495 PARAMETER Experiment Name: At_Guard_Cells_P Parameter: Organism Value: A. thaliana
  misc_feature: MA Experiment 20000495 PARAMETER Experiment Name: At_Guard_Cells_P Parameter: Tissue Value: Guard Cells vs. Leaves
  misc_feature: MA Experiment ID: 20001757 Result: Down-regulated in Transcription
  misc_feature: MA Experiment 20001757 PARAMETER Experiment Name: At_50mM_NH4NO3_L-to-H_P Parameter: Timepoint (hr) Value: 6
  misc_feature: MA Experiment 20001757 PARAMETER Experiment Name: At_50mM_NH4NO3_L-to-H_P Parameter: Tissue Value: Leaf
  misc_feature: MA Experiment 20001757 PARAMETER Experiment Name: At_50mM_NH4NO3_L-to-H_P Parameter: Treatment Value: 50mM NH4NO3 vs 100mM Mannitol
aatctcatagactcatagcaatggcgaatcacaacagtttcacttacatggaccatagcttcagcgatataagtctcaactttgattcctctgctttcagcgattgtaacagtgacatatcctgcgagtttccaacaactacctccgagagccgtcaacgaaaactcttcctctcttgcgccgttgataattccgatgacgtgatcagaaatctcataacgcatcttgagtcatcttcttcgatcgaggaacagaagcaagctgctatggagattagactcttatcaaagaacaaaccagagaatcgtatcaaactcgctaaagccggtgctattaaaccgttggtttctttaatctcgtcttcggatcttcagcttcaagagtatggagtcactgcggtgttgaatctatctctctgcgatgagaacaaagagatgattgtttcttccggtgcggttaaaccgctcgttaatgcgttgagattaggaacaccgacgacgaaagagaacgctgcttgtgctctgctccggttatctcaagtggaggaaaacaaaatcacgattgggagatcaggagcgattcctttactagtgaaccttctagaaaatggcggattcagagcgaagaaagacgcgtcgacggctttatactcgttgtgttcgacgaacgagaacaaaaccagagctgttgaatctgggattatgaagccgttagtggagttaatgattgattttgaatcggatatggttgataaatcagcgtttgttatgaatctgttaatgtcggcgccggaatcgaagccggcggttgtggaagaaggaggagttccggtgttggttgagattgttgaagcgggaacacagagacagaaggagataagtgtgtcgatattgttgcagctttgtgaggagagtgttgtgtatcgaaccatggtggctcgtgaaggagcggttcctccgctcgtggctttatcgcagggtagtgcgagtcgtggtgctaaggtaaaggctgaggcgttgatagagcttcttaggcaacccagacaacaacaacaacaacaacaacactttgaatctaacgacaacgagagataacactttagtttgggctttttattaatgggcctttgtagaatacatatcttgttaattatttggacggcccaagctgaacacatatcttgttaattattggtcgatgtgttttgc

SEQ ID NO: 101772 - protein, 363 aa, Arabidopsis thaliana
  peptide (1)..(363): Ceres Seq. ID no. 13608674
  misc_feature (139)..(179): Pfam Name: Armadillo/beta-catenin-like repeat Pfam Description: Armadillo/beta-catenin-like repeat
  misc_feature (7)..(363): Homolog of NCBI NO: 15237730 NR Description: expressed protein [Arabidopsis thaliana]
  misc_feature (7)..(363): Homolog of NCBI NO: 26452835 NR Description: unknown protein [Arabidopsis thaliana]
  misc_feature (34)..(363): Homolog of NCBI NO: 8843789 NR Description: phosphoinositide-specific phospholipase C-line
  misc_feature (7)..(347): Homolog of NCBI NO: 18395805 NR Description: expressed protein [Arabidopsis thaliana]
  misc_feature (7)..(347): Homolog of NCBI NO: 21592960 NR Description: unknown [Arabidopsis thaliana]
  misc_feature (7)..(347): Homolog of NCBI NO: 16226454 NR Description: AT3g01400/T13O15_4 [Arabidopsis thaliana]
  misc_feature (20)..(347): Homolog of NCBI NO: 34393600 NR Description: arm repeat-containing protein-like protein [Oryza
  misc_feature (78)..(349): Homolog of NCBI NO: 26452478 NR Description: unknown protein [Arabidopsis thaliana]
  misc_feature (43)..(347): Homolog of NCBI NO: 28974687 NR Description: arm repeat-containing protein [Nicotiana tabacum]
  misc_feature (82)..(348): Homolog of NCBI NO: 34393717 NR Description: arm repeat containing protein homolog-like [Oryza
SHRLIAMANHNSFTYMDHSFSDISLNFDSSAFSDCNSDISCEFPTTTSESRQRKLFLSCAVDNSDDVIRNLITHLESSSSIEEQKQAAMEIRLLSKNKPENRIKLAKAGAIKPLVSLISSSDLQLQEYGVTAVLNLSLCDENKEMIVSSGAVKPLVNALRLGTPTTKENAACALLRLSQVEENKITIGRSGAIPLLVNLLENGGFRAKKDASTALYSLCSTNENKTRAVESGIMKPLVELMIDFESDMVDKSAFVMNLLMSAPESKPAVVEEGGVPVLVEIVEAGTQRQKEISVSILLQLCEESVVYRTMVAREGAVPPLVALSQGSASRGAKVKAEALIELLRQPRQQQQQQQHFESNDNER

SEQ ID NO: 101773 - protein, 357 aa, Arabidopsis thaliana
  peptide (1)..(357): Ceres Seq. ID no. 13608675
  misc_feature (133)..(173): Pfam Name: Armadillo/beta-catenin-like repeat Pfam Description: Armadillo/beta-catenin-like repeat
  misc_feature (1)..(357): Homolog of NCBI NO: 15237730 NR Description: expressed protein [Arabidopsis thaliana]
  misc_feature (1)..(357): Homolog of NCBI NO: 26452835 NR Description: unknown protein [Arabidopsis thaliana]
  misc_feature (28)..(357): Homolog of NCBI NO: 8843789 NR Description: phosphoinositide-specific phospholipase C-line
  misc_feature (1)..(341): Homolog of NCBI NO: 18395805 NR Description: expressed protein [Arabidopsis thaliana]
  misc_feature (1)..(341): Homolog of NCBI NO: 21592960 NR Description: unknown [Arabidopsis thaliana]
  misc_feature (1)..(341): Homolog of NCBI NO: 16226454 NR Description: AT3g01400/T13O15_4 [Arabidopsis thaliana]
  misc_feature (14)..(341): Homolog of NCBI NO: 34393600 NR Description: arm repeat-containing protein-like protein [Oryza
  misc_feature (72)..(343): Homolog of NCBI NO: 26452478 NR Description: unknown protein [Arabidopsis thaliana]
  misc_feature (37)..(341): Homolog of NCBI NO: 28974687 NR Description: arm repeat-containing protein [Nicotiana tabacum]
  misc_feature (76)..(342): Homolog of NCBI NO: 34393717 NR Description: arm repeat containing protein homolog-like [Oryza
MANHNSFTYMDHSFSDISLNFDSSAFSDCNSDISCEFPTTTSESRQRKLFLSCAVDNSDDVIRNLITHLESSSSIEEQKQAAMEIRLLSKNKPENRIKLAKAGAIKPLVSLISSSDLQLQEYGVTAVLNLSLCDENKEMIVSSGAVKPLVNALRLGTPTTKENAACALLRLSQVEENKITIGRSGAIPLLVNLLENGGFRAKKDASTALYSLCSTNENKTRAVESGIMKPLVELMIDFESDMVDKSAFVMNLLMSAPESKPAVVEEGGVPVLVEIVEAGTQRQKEISVSILLQLCEESVVYRTMVAREGAVPPLVALSQGSASRGAKVKAEALIELLRQPRQQQQQQQHFESNDNER

SEQ ID NO: 101774 - protein, 348 aa, Arabidopsis thaliana
  peptide (1)..(348): Ceres Seq. ID no. 13608676
  misc_feature (124)..(164): Pfam Name: Armadillo/beta-catenin-like repeat Pfam Description: Armadillo/beta-catenin-like repeat
  misc_feature (1)..(348): Homolog of NCBI NO: 15237730 NR Description: expressed protein [Arabidopsis thaliana]
  misc_feature (1)..(348): Homolog of NCBI NO: 26452835 NR Description: unknown protein [Arabidopsis thaliana]
  misc_feature (19)..(348): Homolog of NCBI NO: 8843789 NR Description: phosphoinositide-specific phospholipase C-line
  misc_feature (1)..(332): Homolog of NCBI NO: 18395805 NR Description: expressed protein [Arabidopsis thaliana]
  misc_feature (1)..(332): Homolog of NCBI NO: 21592960 NR Description: unknown [Arabidopsis thaliana]
  misc_feature (1)..(332): Homolog of NCBI NO: 16226454 NR Description: AT3g01400/T13O15_4 [Arabidopsis thaliana]
  misc_feature (5)..(332): Homolog of NCBI NO: 34393600 NR Description: arm repeat-containing protein-like protein [Oryza
  misc_feature (63)..(334): Homolog of NCBI NO: 26452478 NR Description: unknown protein [Arabidopsis thaliana]
  misc_feature (28)..(332): Homolog of NCBI NO: 28974687 NR Description: arm repeat-containing protein [Nicotiana tabacum]
  misc_feature (67)..(333): Homolog of NCBI NO: 34393717 NR Description: arm repeat containing protein homolog-like [Oryza
MDHSFSDISLNFDSSAFSDCNSDISCEFPTTTSESRQRKLFLSCAVDNSDDVIRNLITHLESSSSIEEQKQAAMEIRLLSKNKPENRIKLAKAGAIKPLVSLISSSDLQLQEYGVTAVLNLSLCDENKEMIVSSGAVKPLVNALRLGTPTTKENAACALLRLSQVEENKITIGRSGAIPLLVNLLENGGFRAKKDASTALYSLCSTNENKTRAVESGIMKPLVELMIDFESDMVDKSAFVMNLLMSAPESKPAVVEEGGVPVLVEIVEAGTQRQKEISVSILLQLCEESVVYRTMVAREGAVPPLVALSQGSASRGAKVKAEALIELLRQPRQQQQQQQHFESNDNER

SEQ ID NO: 101775 - DNA, 1162 bp, Arabidopsis thaliana
  misc_feature (1)..(1162): Ceres Seq. ID no. 13608677
  misc_feature: MA Experiment ID: 108573 Result: Up-regulated in Transcription
  misc_feature: MA Experiment 108573 PARAMETER Experiment Name: At_Drought_cDNA_P Parameter: Timepoint (hr) Value: 6
  misc_feature: MA Experiment 108573 PARAMETER Experiment Name: At_Drought_cDNA_P Parameter: Tissue Value: Aerial
  misc_feature: MA Experiment 108573 PARAMETER Experiment Name: At_Drought_cDNA_P Parameter: Treatment Value: Drought vs. No Drought
  misc_feature: MA Experiment ID: 108595 Result: Down-regulated in Transcription
  misc_feature: MA Experiment 108595 PARAMETER Experiment Name: At_Ler-pi_Ovule_cDNA_P Parameter: Plant Line Value: null
  misc_feature: MA Experiment ID: 20001451 Result: Down-regulated in Transcription
  misc_feature: MA Experiment 20001451 PARAMETER Experiment Name: At_Far-red-induction_P Parameter: Age (day) Value: 7
  misc_feature: MA Experiment 20001451 PARAMETER Experiment Name: At_Far-red-induction_P Parameter: Light Value: Far-red vs. White
  misc_feature: MA Experiment 20001451 PARAMETER Experiment Name: At_Far-red-induction_P Parameter: Organism Value: A. thaliana
  misc_feature: MA Experiment 20001451 PARAMETER Experiment Name: At_Far-red-induction_P Parameter: Plant Line Value: Columbia
  misc_feature: MA Experiment 20001451 PARAMETER Experiment Name: At_Far-red-induction_P Parameter: Timepoint (hr) Value: 24
  misc_feature: MA Experiment 20001451 PARAMETER Experiment Name: At_Far-red-induction_P Parameter: Tissue Value: Whole Plant
gtgttttctagtgttgcagaaaatggcaactactagtactactacaaagctctccgttctctgctgctctttcatttcatctcctctcgttgactctcctccttctctcgccttcttctctccgattccacgattcctcactgtccgaatcgcgactagctttagatcgagctctaggtttccggccaccaaaatccgcaagtcttcactcgccgccgtgatgtttccggaaaattcggttttatcagatgtctgcgcgtttggagtcactagcatcgttgcgttctcgtgcctcggtttctggggagagattggcaaacgtggcatcttcgaccagaaactcatccggaagcttgtgcatataaatattgggctagtttttatgctttgctggccgctgttcagttctggaatccaaggagcacttttcgcatctcttgtacctggactcaatatagtaaggatgctattgctggggcttggagtgtaccacgacgaaggaacaatcaagtcaatgagcagacatggagatcgcagggaactacttaaggggccgctttactatgtactgtcaatcacatcagcctgcatctactattggaaatcatccccaatcgcgattgcggtgatatgcaacctttgcgcaggagatggtatggctgacattgtgggtcggcggtttggaacagagaagcttccttacaacaaaaacaaatcatttgctggtagcattggaatggccaccgccgggtttctagcatctgttgcgtatatgtactactttgcttcatttggttacatcgaggatagcgggggaatgattcttcgtttcctcgtcatctctatagcatcagctcttgtggaatcactcccaataagcaccgacattgacgacaatctcaccatttccttaacctctgccttggccggattcttactcttctaataataccctctcgttgttatgtatcatcaaataaagggtcgagcttgattgctgatatggaggtaaaactgcattcattgttcccatcttcttctgtatgtacgtattagtgaaacatctcatattgttgttgtccacaaatcttatttttcagctgcaattgcagttgggtacaatgttgtaatgttctatccattagtgagacatatgatgacg

SEQ ID NO: 101776 - protein, 314 aa, Arabidopsis thaliana
  peptide (1)..(314): Ceres Seq. ID no. 13608678
  misc_feature (8)..(314): Homolog of NCBI NO: 15237702 NR Description: expressed protein [Arabidopsis thaliana]
  misc_feature (8)..(314): Homolog of NCBI NO: 21593148 NR Description: unknown [Arabidopsis thaliana]
  misc_feature (8)..(279): Homolog of NCBI NO: 8843778 NR Description: emb|CAB85555.1~gene_id:MZN1.2~similar to unknown
  misc_feature (66)..(314): Homolog of NCBI NO: 34907982 NR Description: P0446G04.23 [Oryza sativa (japonica
  misc_feature (62)..(314): Homolog of NCBI NO: 15238184 NR Description: expressed protein [Arabidopsis thaliana]
  misc_feature (62)..(314): Homolog of NCBI NO: 28393229 NR Description: unknown protein [Arabidopsis thaliana]
  misc_feature (62)..(314): Homolog of NCBI NO: 21537252 NR Description: unknown [Arabidopsis thaliana]
  misc_feature (118)..(308): Homolog of NCBI NO: 28850457 NR Description: similar to Oryza sativa (japonica
  misc_feature (68)..(312): Homolog of NCBI NO: 21674801 NR Description: conserved hypothetical protein [Chlorobium TLS] >gi|21648018|gb|AAM73208.1| conserved hypothetical protein
  misc_feature (112)..(311): Homolog of NCBI NO: 20094414 NR Description: Dolichol kinase [Methanopyrus kandleri AV19]
CFLVLQKMATTSTTTKLSVLCCSFISSPLVDSPPSLAFFSPIPRFLTVRIATSFRSSSRFPATKIRKSSLAAVMFPENSVLSDVCAFGVTSIVAFSCLGFWGEIGKRGIFDQKLIRKLVHINIGLVFMLCWPLFSSGIQGALFASLVPGLNIVRMLLLGLGVYHDEGTIKSMSRHGDRRELLKGPLYYVLSITSACIYYWKSSPIAIAVICNLCAGDGMADIVGRRFGTEKLPYNKNKSFAGSIGMATAGFLASVAYMYYFASFGYIEDSGGMILRFLVISIASALVESLPISTDIDDNLTISLTSALAGFLLF

SEQ ID NO: 101777 - protein, 307 aa, Arabidopsis thaliana
  peptide (1)..(307): Ceres Seq. ID no. 13608679
  misc_feature (1)..(307): Homolog of NCBI NO: 15237702 NR Description: expressed protein [Arabidopsis thaliana]
  misc_feature (1)..(307): Homolog of NCBI NO: 21593148 NR Description: unknown [Arabidopsis thaliana]
  misc_feature (1)..(272): Homolog of NCBI NO: 8843778 NR Description: emb|CAB85555.1~gene_id:MZN1.2~similar to unknown
  misc_feature (59)..(307): Homolog of NCBI NO: 34907982 NR Description: P0446G04.23 [Oryza sativa (japonica
  misc_feature (55)..(307): Homolog of NCBI NO: 15238184 NR Description: expressed protein [Arabidopsis thaliana]
  misc_feature (55)..(307): Homolog of NCBI NO: 28393229 NR Description: unknown protein [Arabidopsis thaliana]
  misc_feature (55)..(307): Homolog of NCBI NO: 21537252 NR Description: unknown [Arabidopsis thaliana]
  misc_feature (111)..(301): Homolog of NCBI NO: 28850457 NR Description: similar to Oryza sativa (japonica
  misc_feature (61)..(305): Homolog of NCBI NO: 21674801 NR Description: conserved hypothetical protein [Chlorobium TLS] >gi|21648018|gb|AAM73208.1| conserved hypothetical protein
  misc_feature (105)..(304): Homolog of NCBI NO: 20094414 NR Description: Dolichol kinase [Methanopyrus kandleri AV19]
MATTSTTTKLSVLCCSFISSPLVDSPPSLAFFSPIPRFLTVRIATSFRSSSRFPATKIRKSSLAAVMFPENSVLSDVCAFGVTSIVAFSCLGFWGEIGKRGIFDQKLIRKLVHINIGLVFMLCWPLFSSGIQGALFASLVPGLNIVRMLLLGLGVYHDEGTIKSMSRHGDRRELLKGPLYYVLSITSACIYYWKSSPIAIAVICNLCAGDGMADIVGRRFGTEKLPYNKNKSFAGSIGMATAGFLASVAYMYYFASFGYIEDSGGMILRFLVISIASALVESLPISTDIDDNLTISLTSALAGFLLF

SEQ ID NO: 101778 - protein, 241 aa, Arabidopsis thaliana
  peptide (1)..(241): Ceres Seq. ID no. 13608680
  misc_feature (1)..(241): Homolog of NCBI NO: 15237702 NR Description: expressed protein [Arabidopsis thaliana]
  misc_feature (1)..(241): Homolog of NCBI NO: 21593148 NR Description: unknown [Arabidopsis thaliana]
  misc_feature (1)..(206): Homolog of NCBI NO: 8843778 NR Description: emb|CAB85555.1~gene_id:MZN1.2~similar to unknown
  misc_feature (1)..(241): Homolog of NCBI NO: 34907982 NR Description: P0446G04.23 [Oryza sativa (japonica
  misc_feature (1)..(241): Homolog of NCBI NO: 15238184 NR Description: expressed protein [Arabidopsis thaliana]
  misc_feature (1)..(241): Homolog of NCBI NO: 28393229 NR Description: unknown protein [Arabidopsis thaliana]
  misc_feature (1)..(241): Homolog of NCBI NO: 21537252 NR Description: unknown [Arabidopsis thaliana]
  misc_feature (45)..(235): Homolog of NCBI NO: 28850457 NR Description: similar to Oryza sativa (japonica
  misc_feature (1)..(239): Homolog of NCBI NO: 21674801 NR Description: conserved hypothetical protein [Chlorobium TLS] >gi|21648018|gb|AAM73208.1| conserved hypothetical protein
  misc_feature (39)..(238): Homolog of NCBI NO: 20094414 NR Description: Dolichol kinase [Methanopyrus kandleri AV19]
MFPENSVLSDVCAFGVTSIVAFSCLGFWGEIGKRGIFDQKLIRKLVHINIGLVFMLCWPLFSSGIQGALFASLVPGLNIVRMLLLGLGVYHDEGTIKSMSRHGDRRELLKGPLYYVLSITSACIYYWKSSPIAIAVICNLCAGDGMADIVGRRFGTEKLPYNKNKSFAGSIGMATAGFLASVAYMYYFASFGYIEDSGGMILRFLVISIASALVESLPISTDIDDNLTISLTSALAGFLLF

SEQ ID NO: 101779 - DNA, 1364 bp, Arabidopsis thaliana
  misc_feature (1)..(1364): Ceres Seq. ID no. 13608681
  misc_feature: MA Experiment ID: 20000182 Result: Down-regulated in Transcription
  misc_feature: MA Experiment 20000182 PARAMETER Experiment Name: At_2mM_SA_P Parameter: Age (day) Value: 14
  misc_feature: MA Experiment 20000182 PARAMETER Experiment Name: At_2mM_SA_P Parameter: Organism Value: A. thaliana
  misc_feature: MA Experiment 20000182 PARAMETER Experiment Name: At_2mM_SA_P Parameter: Plant Line Value: WS
  misc_feature: MA Experiment 20000182 PARAMETER Experiment Name: At_2mM_SA_P Parameter: Timepoint (hr) Value: 6
  misc_feature: MA Experiment 20000182 PARAMETER Experiment Name: At_2mM_SA_P Parameter: Tissue Value: Aerial
  misc_feature: MA Experiment 20000182 PARAMETER Experiment Name: At_2mM_SA_P Parameter: Treatment Value: 2mM SA vs. No Treatment
  misc_feature: MA Experiment ID: 20000185 Result: Down-regulated in Transcription
  misc_feature: MA Experiment 20000185 PARAMETER Experiment Name: At_Roots__P Parameter: Age (day) Value: 7 vs. 21
  misc_feature: MA Experiment 20000185 PARAMETER Experiment Name: At_Roots__P Parameter: Organism Value: A. thaliana
  misc_feature: MA Experiment 20000185 PARAMETER Experiment Name: At_Roots__P Parameter: Tissue Value: Roots vs. Whole Plant
  misc_feature: MA Experiment ID: 20001248 Result: Up-regulated in Transcription
  misc_feature: MA Experiment 20001248 PARAMETER Experiment Name: At_Far-red-induction_P Parameter: Age (day) Value: 7
  misc_feature: MA Experiment 20001248 PARAMETER Experiment Name: At_Far-red-induction_P Parameter: Light Value: Far-red vs. White
  misc_feature: MA Experiment 20001248 PARAMETER Experiment Name: At_Far-red-induction_P Parameter: Organism Value: A. thaliana
  misc_feature: MA Experiment 20001248 PARAMETER Experiment Name: At_Far-red-induction_P Parameter: Plant Line Value: Columbia
  misc_feature: MA Experiment 20001248 PARAMETER Experiment Name: At_Far-red-induction_P Parameter: Timepoint (hr) Value: 4
  misc_feature: MA Experiment 20001248 PARAMETER Experiment Name: At_Far-red-induction_P Parameter: Tissue Value: Whole Plant
  misc_feature: MA Experiment ID: 20001557 Result: Up-regulated in Transcription
  misc_feature: MA Experiment 20001557 PARAMETER Experiment Name: At_Drought_Soil_Dry_P Parameter: Age (day) Value: 27
  misc_feature: MA Experiment 20001557 PARAMETER Experiment Name: At_Drought_Soil_Dry_P Parameter: Organism Value: A. thaliana
  misc_feature: MA Experiment 20001557 PARAMETER Experiment Name: At_Drought_Soil_Dry_P Parameter: Plant Line Value: WS
  misc_feature: MA Experiment 20001557 PARAMETER Experiment Name: At_Drought_Soil_Dry_P Parameter: Post Timepoint (hr) Value: 3
  misc_feature: MA Experiment 20001557 PARAMETER Experiment Name: At_Drought_Soil_Dry_P Parameter: Post-Treatment Value: Re-Water vs. No Drought
  misc_feature: MA Experiment 20001557 PARAMETER Experiment Name: At_Drought_Soil_Dry_P Parameter: Timepoint (day) Value: 13
  misc_feature: MA Experiment 20001557 PARAMETER Experiment Name: At_Drought_Soil_Dry_P Parameter: Treatment Value: Drought vs. No Drought
  misc_feature: MA Experiment ID: 20001558 Result: Up-regulated in Transcription
  misc_feature: MA Experiment 20001558 PARAMETER Experiment Name: At_Drought_Soil_Dry_P Parameter: Age (day) Value: 27
  misc_feature: MA Experiment 20001558 PARAMETER Experiment Name: At_Drought_Soil_Dry_P Parameter: Organism Value: A. thaliana
  misc_feature: MA Experiment 20001558 PARAMETER Experiment Name: At_Drought_Soil_Dry_P Parameter: Plant Line Value: WS
  misc_feature: MA Experiment 20001558 PARAMETER Experiment Name: At_Drought_Soil_Dry_P Parameter: Post Timepoint (hr) Value: 6
  misc_feature: MA Experiment 20001558 PARAMETER Experiment Name: At_Drought_Soil_Dry_P Parameter: Post-Treatment Value: Re-Water vs. No Drought
  misc_feature: MA Experiment 20001558 PARAMETER Experiment Name: At_Drought_Soil_Dry_P Parameter: Timepoint (day) Value: 13
  misc_feature: MA Experiment 20001558 PARAMETER Experiment Name: At_Drought_Soil_Dry_P Parameter: Treatment Value: Drought vs. No Drought
  misc_feature: MA Experiment ID: 20001911 Result: Down-regulated in Transcription
  misc_feature: MA Experiment 20001911 PARAMETER Experiment Name: At_Drought_Reproduction_P Parameter: Age (day) Value: 40
  misc_feature: MA Experiment 20001911 PARAMETER Experiment Name: At_Drought_Reproduction_P Parameter: Organism Value: A. thaliana
  misc_feature: MA Experiment 20001911 PARAMETER Experiment Name: At_Drought_Reproduction_P Parameter: Plant Line Value: WS
  misc_feature: MA Experiment 20001911 PARAMETER Experiment Name: At_Drought_Reproduction_P Parameter: Timepoint (day) Value: 10
  misc_feature: MA Experiment 20001911 PARAMETER Experiment Name: At_Drought_Reproduction_P Parameter: Tissue Value: Flowers
  misc_feature: MA Experiment 20001911 PARAMETER Experiment Name: At_Drought_Reproduction_P Parameter: Treatment Value: Drought vs. No Drought
aaaagaatgggttctcttcttcctcttcttggcatctcagtagtctccgccattttctttctggttcttcaacaaccagaacaatcttcttcagccattatactgagcttgaagaaacgccatggaagctcctctggtagtagtggtaaccagtacagttcaagcagaccatcagctggtttccaagggaacaggagcacgtgctctctcttcctcggcacgtgggttcgtgataactcttatcctctctataaaccggcggattgtcccggcgtcgttgagcctgagttcgattgtcagatgtacggtcgtcctgactctgactacctcaagtatcgatggcaacctcagaattgcaatttacccacgttcaatggtgctcagtttctgttgaaaatgaagggcaaaaccataatgtttgcgggtgattcattggggaagaatcaatgggagtctttgatctgccttattgtttcatctgcaccgtccactcggacagaaatgaccagaggcttgcctctctccaccttcagattcttggattatgggataacaatgtcattttacaaagctccgttcttggtggacatagatgctgttcaaggcaagcgtgtgttgaagctggatgagatctctggtaatgccaatgcttggcatgacgctgatctcctcatcttcaacactggtcactggtggagccacaccggatctatgcaaggatgggacttgattcaatcaggcaattcttattaccaagacatggaccgttttgtggcaatggagaaagcacttcgtacttgggcgtattgggtcgaaactcacgttgatagatcccgaacacaagtcttgttcctctccatttctccaacacacgacaacccgagtgactgggcggcatcatcgtcttcaggatccaagaactgctacggagaaacagaaccgatcacaggaacagcttatccagtgagctcctacacagatcagctaagatcagtgattgttgaagtgcttcacgggatgcacaatccggcgtttcttctcgacataacactcctctcttccctaagaaaagacggtcatccgtcagtatacagcggcctcattagcggttcacaaaggtctagaccagaccagtctgcagattgtagccattggtgtttgcctggtttacctgatacatggaaccagttgttgtatacgcttctcatctattagcttctttttaaatctctttccatcaaattattcggttagtaatattttaacacattcgaagagagaatcttaagattaatcacggaatcagtcaattgtataaactttttgaggaaattttctttcaaatgaattataatttttattcc

SEQ ID NO: 101780 - protein, 404 aa, Arabidopsis thaliana
  peptide (1)..(404): Ceres Seq. ID no. 13608682
  misc_feature (3)..(404): Homolog of NCBI NO: 15237711 NR Description: expressed protein [Arabidopsis thaliana] gene_id:MZN1.6~pir||T02484~strong similarity to unknown protein thaliana] >gi|26449857|dbj|BAC42051.1| unknown protein
  misc_feature (3)..(404): Homolog of NCBI NO: 21553643 NR Description: unknown [Arabidopsis thaliana]
  misc_feature (12)..(404): Homolog of NCBI NO: 18402220 NR Description: expressed protein [Arabidopsis thaliana]
  misc_feature (7)..(402): Homolog of NCBI NO: 18396930 NR Description: expressed protein [Arabidopsis thaliana] unknown protein [Arabidopsis thaliana]
  misc_feature (35)..(366): Homolog of NCBI NO: 34911864 NR Description: OSJNBb0032K15.9 [Oryza sativa (japonica
  misc_feature (3)..(402): Homolog of NCBI NO: 18403435 NR Description: expressed protein [Arabidopsis thaliana] expressed protein [Arabidopsis thaliana]
  misc_feature (65)..(404): Homolog of NCBI NO: 15224585 NR Description: expressed protein [Arabidopsis thaliana]
  misc_feature (65)..(404): Homolog of NCBI NO: 30350855 NR Description: hypothetical protein At2g30900 [Arabidopsis
  misc_feature (50)..(402): Homolog of NCBI NO: 18406003 NR Description: expressed protein [Arabidopsis thaliana]
  misc_feature (68)..(402): Homolog of NCBI NO: 21593142 NR Description: unknown [Arabidopsis thaliana]
KRMGSLLPLLGISVVSAIFFLVLQQPEQSSSAIILSLKKRHGSSSGSSGNQYSSSRPSAGFQGNRSTCSLFLGTWVRDNSYPLYKPADCPGVVEPEFDCQMYGRPDSDYLKYRWQPQNCNLPTFNGAQFLLKMKGKTIMFAGDSLGKNQWESLICLIVSSAPSTRTEMTRGLPLSTFRFLDYGITMSFYKAPFLVDIDAVQGKRVLKLDEISGNANAWHDADLLIFNTGHWWSHTGSMQGWDLIQSGNSYYQDMDRFVAMEKALRTWAYWVETHVDRSRTQVLFLSISPTHDNPSDWAASSSSGSKNCYGETEPITGTAYPVSSYTDQLRSVIVEVLHGMHNPAFLLDITLLSSLRKDGHPSVYSGLISGSQRSRPDQSADCSHWCLPGLPDTWNQLLYTLLIY

SEQ ID NO: 101781 - protein, 402 aa, Arabidopsis thaliana
  peptide (1)..(402): Ceres Seq. ID no. 13608683
  misc_feature (1)..(402): Homolog of NCBI NO: 15237711 NR Description: expressed protein [Arabidopsis thaliana] gene_id:MZN1.6~pir||T02484~strong similarity to unknown protein thaliana] >gi|26449857|dbj|BAC42051.1| unknown protein
  misc_feature (1)..(402): Homolog of NCBI NO: 21553643 NR Description: unknown [Arabidopsis thaliana]
  misc_feature (10)..(402): Homolog of NCBI NO: 18402220 NR Description: expressed protein [Arabidopsis thaliana]
  misc_feature (5)..(400): Homolog of NCBI NO: 18396930 NR Description: expressed protein [Arabidopsis thaliana] unknown protein [Arabidopsis thaliana]
  misc_feature (33)..(364): Homolog of NCBI NO: 34911864 NR Description: OSJNBb0032K15.9 [Oryza sativa (japonica
  misc_feature (1)..(400): Homolog of NCBI NO: 18403435 NR Description: expressed protein [Arabidopsis thaliana] expressed protein [Arabidopsis thaliana]
  misc_feature (63)..(402): Homolog of NCBI NO: 15224585 NR Description: expressed protein [Arabidopsis thaliana]
  misc_feature (63)..(402): Homolog of NCBI NO: 30350855 NR Description: hypothetical protein At2g30900 [Arabidopsis
  misc_feature (48)..(400): Homolog of NCBI NO: 18406003 NR Description: expressed protein [Arabidopsis thaliana]
  misc_feature (66)..(400): Homolog of NCBI NO: 21593142 NR Description: unknown [Arabidopsis thaliana]
MGSLLPLLGISVVSAIFFLVLQQPEQSSSAIILSLKKRHGSSSGSSGNQYSSSRPSAGFQGNRSTCSLFLGTWVRDNSYPLYKPADCPGVVEPEFDCQMYGRPDSDYLKYRWQPQNCNLPTFNGAQFLLKMKGKTIMFAGDSLGKNQWESLICLIVSSAPSTRTEMTRGLPLSTFRFLDYGITMSFYKAPFLVDIDAVQGKRVLKLDEISGNANAWHDADLLIFNTGHWWSHTGSMQGWDLIQSGNSYYQDMDRFVAMEKALRTWAYWVETHVDRSRTQVLFLSISPTHDNPSDWAASSSSGSKNCYGETEPITGTAYPVSSYTDQLRSVIVEVLHGMHNPAFLLDITLLSSLRKDGHPSVYSGLISGSQRSRPDQSADCSHWCLPGLPDTWNQLLYTLLIY

SEQ ID NO: 101782 - protein, 304 aa, Arabidopsis thaliana
  peptide (1)..(304): Ceres Seq. ID no. 13608684
  misc_feature (1)..(304): Homolog of NCBI NO: 15237711 NR Description: expressed protein [Arabidopsis thaliana] gene_id:MZN1.6~pir||T02484~strong similarity to unknown protein thaliana] >gi|26449857|dbj|BAC42051.1| unknown protein
  misc_feature (1)..(304): Homolog of NCBI NO: 21553643 NR Description: unknown [Arabidopsis thaliana]
  misc_feature (1)..(304): Homolog of NCBI NO: 18402220 NR Description: expressed protein [Arabidopsis thaliana]
  misc_feature (1)..(302): Homolog of NCBI NO: 18396930 NR Description: expressed protein [Arabidopsis thaliana] unknown protein [Arabidopsis thaliana]
  misc_feature (1)..(266): Homolog of NCBI NO: 34911864 NR Description: OSJNBb0032K15.9 [Oryza sativa (japonica
  misc_feature (1)..(302): Homolog of NCBI NO: 18403435 NR Description: expressed protein [Arabidopsis thaliana] expressed protein [Arabidopsis thaliana]
  misc_feature (1)..(304): Homolog of NCBI NO: 15224585 NR Description: expressed protein [Arabidopsis thaliana]
  misc_feature (1)..(304): Homolog of NCBI NO: 30350855 NR Description: hypothetical protein At2g30900 [Arabidopsis
  misc_feature (1)..(302): Homolog of NCBI NO: 18406003 NR Description: expressed protein [Arabidopsis thaliana]
  misc_feature (1)..(302): Homolog of NCBI NO: 21593142 NR Description: unknown [Arabidopsis thaliana]
MYGRPDSDYLKYRWQPQNCNLPTFNGAQFLLKMKGKTIMFAGDSLGKNQWESLICLIVSSAPSTRTEMTRGLPLSTFRFLDYGITMSFYKAPFLVDIDAVQGKRVLKLDEISGNANAWHDADLLIFNTGHWWSHTGSMQGWDLIQSGNSYYQDMDRFVAMEKALRTWAYWVETHVDRSRTQVLFLSISPTHDNPSDWAASSSSGSKNCYGETEPITGTAYPVSSYTDQLRSVIVEVLHGMHNPAFLLDITLLSSLRKDGHPSVYSGLISGSQRSRPDQSADCSHWCLPGLPDTWNQLLYTLLIY

SEQ ID NO: 101783 - DNA, 929 bp, Arabidopsis thaliana
  misc_feature (1)..(929): Ceres Seq. ID no. 13608686
  misc_feature: MA Experiment ID: 20000185 Result: Down-regulated in Transcription
  misc_feature: MA Experiment 20000185 PARAMETER Experiment Name: At_Roots__P Parameter: Age (day) Value: 7 vs. 21
  misc_feature: MA Experiment 20000185 PARAMETER Experiment Name: At_Roots__P Parameter: Organism Value: A. thaliana
  misc_feature: MA Experiment 20000185 PARAMETER Experiment Name: At_Roots__P Parameter: Tissue Value: Roots vs. Whole Plant
  misc_feature: MA Experiment ID: 20000235 Result: Down-regulated in Transcription
  misc_feature: MA Experiment 20000235 PARAMETER Experiment Name: At_Siliques_P Parameter: Age (day) Value: 21
  misc_feature: MA Experiment 20000235 PARAMETER Experiment Name: At_Siliques_P Parameter: Organism Value: A. thaliana
  misc_feature: MA Experiment 20000235 PARAMETER Experiment Name: At_Siliques_P Parameter: Plant Line Value: WS
  misc_feature: MA Experiment 20000235 PARAMETER Experiment Name: At_Siliques_P Parameter: Tissue Value: 5-10mm Siliques vs. Whole Plant
  misc_feature: MA Experiment ID: 20000264 Result: Down-regulated in Transcription
  misc_feature: MA Experiment 20000264 PARAMETER Experiment Name: At_Open_Flower_P Parameter: Age (day) Value: 21
  misc_feature: MA Experiment 20000264 PARAMETER Experiment Name: At_Open_Flower_P Parameter: Plant Line Value: WS
  misc_feature: MA Experiment 20000264 PARAMETER Experiment Name: At_Open_Flower_P Parameter: Tissue Value: Open Flower vs. Whole Plant
  misc_feature: MA Experiment ID: 20000439 Result: Down-regulated in Transcription
  misc_feature: MA Experiment 20000439 PARAMETER Experiment Name: At_Roots__P Parameter: Age (day) Value: 14 vs. 21
  misc_feature: MA Experiment 20000439 PARAMETER Experiment Name: At_Roots__P Parameter: Organism Value: A. thaliana
  misc_feature: MA Experiment 20000439 PARAMETER Experiment Name: At_Roots__P Parameter: Tissue Value: Roots vs. Whole Plant
  misc_feature: MA Experiment ID: 20000794 Result: Down-regulated in Transcription
  misc_feature: MA Experiment 20000794 PARAMETER Experiment Name: At_Petals_P Parameter: Age (day) Value: 23-25 days
  misc_feature: MA Experiment 20000794 PARAMETER Experiment Name: At_Petals_P Parameter: Plant Line Value: WS
  misc_feature: MA Experiment 20000794 PARAMETER Experiment Name: At_Petals_P Parameter: Tissue Value: Petals vs. Whole plant
aaagaaagaaaaaaatgccttcttttgcttttggatctcatcaccatttggcgaatcctacagactcgccgccgtactccgtcgaaattagcatcgacggtgactcctccgactgggattctttgtctcaggtcgatttagagtccggcggtgtaccggcgccggagaaacagctacattccggtggtaagaagaggagaactaggaggagaaagaggaggaagaagaagaagaagaagaaaggtggaagagattgcaggatctgtcatcttcctttagagactaacaaagaagctgaagatgaagatgaagaagaagaagatgattctgatgatgatgaagatgaagaagatgaagaagaagaagaagaagaagaagaagaagaatattatggtttgcctttgcaattaggttgctcttgtaaaggtgatttgggtgttgctcatagtaagtgtgctgagacttggtttaagatcaaaggaaacatgacatgtgagatatgcggcgcaatggctctaaacgtggctggtgaacaatctaatccggagagcactgcttctacacattcacaagcagctgcgggacaatctctaactcagacagagccacgaggaatctggcatggtcgccctgttatgaacttcttacttgctgctatggtcttcgccttcgttgtttcttggctttttcacttcaaagtcctcaagtgaaacgttttccatctctctctctctctctctctctctttcgcccacccgcacgagctcactcttctcctgttcttgagccgcttgcaatcgctgaatcaatccctcctgttgcttgattattcacacgttttgtagctgtaaaaacttggtagtgtttagattgttgtaacttgtgagatttacattttgtataatattgttctctgctccggcttcgtg

SEQ ID NO: 101784 - protein, 235 aa, Arabidopsis thaliana
  peptide (1)..(235): Ceres Seq. ID no. 13608687
  misc_feature (85)..(167): Pfam Name: Zinc finger, C3HC4 type (RING finger) Pfam Description: Zinc finger, C3HC4 type (RING finger)
  misc_feature (5)..(235): Homolog of NCBI NO: 15237796 NR Description: zinc finger (C3HC4-type RING finger) protein
  misc_feature (5)..(235): Homolog of NCBI NO: 21537129 NR Description: unknown [Arabidopsis thaliana]
  misc_feature (131)..(235): Homolog of NCBI NO: 9759231 NR Description: gb|AAD32776.1~gene_id:K19M22.19~similar to
  misc_feature (5)..(95): Homolog of NCBI NO: 9759231 NR Description: gb|AAD32776.1~gene_id:K19M22.19~similar to
  misc_feature (131)..(233): Homolog of NCBI NO: 15239254 NR Description: zinc finger (C3HC4-type RING finger) protein [Arabidopsis thaliana] >gi|9759108|dbj|BAB09677.1| to unknown protein [Arabidopsis thaliana]
  misc_feature (131)..(233): Homolog of NCBI NO: 34908318 NR Description: P0529H11.12 [Oryza sativa (japonica
  misc_feature (105)..(233): Homolog of NCBI NO: 15224415 NR Description: zinc finger (C3HC4-type RING finger) protein [Arabidopsis thaliana] >gi|25408580|pir||B84799 hypothetical
  misc_feature (93)..(128): Homolog of NCBI NO: 15242846 NR Description: hypothetical protein [Arabidopsis thaliana]
  misc_feature (93)..(128): Homolog of NCBI NO: 15242846 NR Description: hypothetical protein [Arabidopsis thaliana]
  misc_feature (93)..(128): Homolog of NCBI NO: 15242846 NR Description: hypothetical protein [Arabidopsis thaliana]
RKKKMPSFAFGSHHHLANPTDSPPYSVEISIDGDSSDWDSLSQVDLESGGVPAPEKQLHSGGKKRRTRRRKRRKKKKKKKGGRDCRICHLPLETNKEAEDEDEEEEDDSDDDEDEEDEEEEEEEEEEEYYGLPLQLGCSCKGDLGVAHSKCAETWFKIKGNMTCEICGAMALNVAGEQSNPESTASTHSQAAAGQSLTQTEPRGIWHGRPVMNFLLAAMVFAFVVSWLFHFKVLK

SEQ ID NO: 101785 - protein, 231 aa, Arabidopsis thaliana
  peptide (1)..(231): Ceres Seq. ID no. 13608688
  misc_feature (81)..(163): Pfam Name: Zinc finger, C3HC4 type (RING finger) Pfam Description: Zinc finger, C3HC4 type (RING finger)
  misc_feature (1)..(231): Homolog of NCBI NO: 15237796 NR Description: zinc finger (C3HC4-type RING finger) protein
  misc_feature (1)..(231): Homolog of NCBI NO: 21537129 NR Description: unknown [Arabidopsis thaliana]
  misc_feature (127)..(231): Homolog of NCBI NO: 9759231 NR Description: gb|AAD32776.1~gene_id:K19M22.19~similar to
  misc_feature (1)..(91): Homolog of NCBI NO: 9759231 NR Description: gb|AAD32776.1~gene_id:K19M22.19~similar to
  misc_feature (127)..(229): Homolog of NCBI NO: 15239254 NR Description: zinc finger (C3HC4-type RING finger) protein [Arabidopsis thaliana] >gi|9759108|dbj|BAB09677.1| to unknown protein [Arabidopsis thaliana]
  misc_feature (127)..(229): Homolog of NCBI NO: 34908318 NR Description: P0529H11.12 [Oryza sativa (japonica
  misc_feature (101)..(229): Homolog of NCBI NO: 15224415 NR Description: zinc finger (C3HC4-type RING finger) protein [Arabidopsis thaliana] >gi|25408580|pir||B84799 hypothetical
  misc_feature (89)..(124): Homolog of NCBI NO: 15242846 NR Description: hypothetical protein [Arabidopsis thaliana]
  misc_feature (89)..(124): Homolog of NCBI NO: 15242846 NR Description: hypothetical protein [Arabidopsis thaliana]
  misc_feature (89)..(124): Homolog of NCBI NO: 15242846 NR Description: hypothetical protein [Arabidopsis thaliana]
MPSFAFGSHHHLANPTDSPPYSVEISIDGDSSDWDSLSQVDLESGGVPAPEKQLHSGGKKRRTRRRKRRKKKKKKKGGRDCRICHLPLETNKEAEDEDEEEEDDSDDDEDEEDEEEEEEEEEEEYYGLPLQLGCSCKGDLGVAHSKCAETWFKIKGNMTCEICGAMALNVAGEQSNPESTASTHSQAAAGQSLTQTEPRGIWHGRPVMNFLLAAMVFAFVVSWLFHFKVLK

SEQ ID NO: 101786 - DNA, 1619 bp, Arabidopsis thaliana
  misc_feature (1)..(1619): Ceres Seq. ID no. 13608693
  misc_feature: MA Experiment ID: 108489 Result: Up-regulated in Transcription
  misc_feature: MA Experiment ID: 20000264 Result: Up-regulated in Transcription
  misc_feature: MA Experiment 20000264 PARAMETER Experiment Name: At_Open_Flower_P Parameter: Age (day) Value: 21
  misc_feature: MA Experiment 20000264 PARAMETER Experiment Name: At_Open_Flower_P Parameter: Plant Line Value: WS
  misc_feature: MA Experiment 20000264 PARAMETER Experiment Name: At_Open_Flower_P Parameter: Tissue Value: Open Flower vs. Whole Plant
  misc_feature: MA Experiment ID: 20000286 Result: Up-regulated in Transcription
  misc_feature: MA Experiment 20000286 PARAMETER Experiment Name: At_Open_Flower_P Parameter: Age (day) Value: 21
  misc_feature: MA Experiment 20000286 PARAMETER Experiment Name: At_Open_Flower_P Parameter: Plant Line Value: WS
  misc_feature: MA Experiment 20000286 PARAMETER Experiment Name: At_Open_Flower_P Parameter: Tissue Value: Half Open vs. Whole Plant
  misc_feature: MA Experiment ID: 20000439 Result: Up-regulated in Transcription
  misc_feature: MA Experiment 20000439 PARAMETER Experiment Name: At_Roots__P Parameter: Age (day) Value: 14 vs. 21
  misc_feature: MA Experiment 20000439 PARAMETER Experiment Name: At_Roots__P Parameter: Organism Value: A. thaliana
  misc_feature: MA Experiment 20000439 PARAMETER Experiment Name: At_Roots__P Parameter: Tissue Value: Roots vs. Whole Plant
  misc_feature: MA Experiment ID: 20000495 Result: Up-regulated in Transcription
  misc_feature: MA Experiment 20000495 PARAMETER Experiment Name: At_Guard_Cells_P Parameter: Harvest Date Value: 8/2/2002
  misc_feature: MA Experiment 20000495 PARAMETER Experiment Name: At_Guard_Cells_P Parameter: Organism Value: A. thaliana
  misc_feature: MA Experiment 20000495 PARAMETER Experiment Name: At_Guard_Cells_P Parameter: Tissue Value: Guard Cells vs. Leaves
  misc_feature: MA Experiment ID: 20000496 Result: Up-regulated in Transcription
  misc_feature: MA Experiment 20000496 PARAMETER Experiment Name: At_Guard_Cells_P Parameter: Harvest Date Value: 7/19/2002
  misc_feature: MA Experiment 20000496 PARAMETER Experiment Name: At_Guard_Cells_P Parameter: Organism Value: Canola
  misc_feature: MA Experiment 20000496 PARAMETER Experiment Name: At_Guard_Cells_P Parameter: Tissue Value: Guard Cells vs. Leaves
  misc_feature: MA Experiment ID: 20000794 Result: Up-regulated in Transcription
  misc_feature: MA Experiment 20000794 PARAMETER Experiment Name: At_Petals_P Parameter: Age (day) Value: 23-25 days
  misc_feature: MA Experiment 20000794 PARAMETER Experiment Name: At_Petals_P Parameter: Plant Line Value: WS
  misc_feature: MA Experiment 20000794 PARAMETER Experiment Name: At_Petals_P Parameter: Tissue Value: Petals vs. Whole plant
  misc_feature: MA Experiment ID: 20001451 Result: Up-regulated in Transcription
  misc_feature: MA Experiment 20001451 PARAMETER Experiment Name: At_Far-red-induction_P Parameter: Age (day) Value: 7
  misc_feature: MA Experiment 20001451 PARAMETER Experiment Name: At_Far-red-induction_P Parameter: Light Value: Far-red vs. White
  misc_feature: MA Experiment 20001451 PARAMETER Experiment Name: At_Far-red-induction_P Parameter: Organism Value: A. thaliana
  misc_feature: MA Experiment 20001451 PARAMETER Experiment Name: At_Far-red-induction_P Parameter: Plant Line Value: Columbia
  misc_feature: MA Experiment 20001451 PARAMETER Experiment Name: At_Far-red-induction_P Parameter: Timepoint (hr) Value: 24
  misc_feature: MA Experiment 20001451 PARAMETER Experiment Name: At_Far-red-induction_P Parameter: Tissue Value: Whole Plant
attgtttagattccaggtcaaactgtgatccattatctttgctactaaactaagttcttttctctgatcgaatcaaaaagttttcaactttctaaatttttttagttctaaggaaaaaacctctccgagaatggttttatcggtgaagcaaacactctctccgaaaatcggacttttccgacgaaacccttcatcctcactaggaagatctcctgtttctctctcgtttccatcgacggagcttccaaaacgcaccgttttagccgtgtcaaagccgcttcatctctcttcttctctgagagctaagtctccggtagtgagatgtgaagcttatgaagctgaccgatcagagcctcatccgatcggtgatgatgctgcggcggcggaaacgaaatcagaggcggctaagaaattgaagatcgggatttactttgctacttggtgggctttgaacgttgtgttcaatatctacaacaagaaggtcttgaacgcttatccttacccatggcttacctcgacgctttctcttgccgctggttcgttgatgatgcttatctcttgggctgttgggatcgttgagactcccaagacggattttgatttctggaaaactctttttccggttgctgtggcacacacaattggtcatgtggctgcaacggtgagtatgtcaaaggttgctgtttctttcactcacatcatcaagagtggtgaacctgcgtttagtgtgcttgtctcgaggtttattttgggtgaaaccttccctacttcggtttacttgtctctcattccaatcattggtggttgcgctctgtctgcccttaccgagcttaacttcaacatgattggtttcatgggagctatgatttcgaacttggctttcgtgttccgtaacatcttctcgaagaagggaatgaagggaaagtctgtgagcgggatgaactactacgcctgtctctcaatgctgtccctattgatcctcactccctttgccattgctgttgaaggacctcagatgtgggtcgatggctggcagacagcgctcgctactgtcggaccacagtttgtctggtgggtggttgcgcagagtgtgttctatcacctctacaaccaagtgtcttacatgtctttagaccaaatctctcccttgacgtttagtgttggtaacaccatgaaacgtatctccgtcattgtctcctccatcattatcttccgcactccagtccagcccgtcaatgctcttggagcagccattgctatccttggaaccttcttgtattcccaggcaaagctctgatgcgaaagacataagagtgtaataagggtctggtgttgagctcctgacttcggttaaaaccgggaaaagagcttaatgtagatatttgtcctcaataatgaaagaaatgatgagattggacactaccatgtttagagtgtgttaggcagtttttttttttttacttttgagtttttttgaatttgggggaatgagaagattgcctctttgtaactaaagtgggaaatagatatttgtccccttgagaataagacaccctgcaactctctttttaacttggagagacatattataaaaagtagagaatatttatctcgagatt

SEQ ID NO: 101787 - protein, 388 aa, Arabidopsis thaliana; identical to SEQ ID NO: 22731
  peptide (1)..(388): Ceres Seq. ID no. 13608694
  misc_feature (1)..(388): Homolog of NCBI NO: 18423670 NR Description: glucose-6-phosphate/phosphate translocator, [Arabidopsis thaliana] >gi|7229675|gb|AAF42936.1|AF233658_1
  misc_feature (1)..(388): Homolog of NCBI NO: 21554690 NR Description: glucose-6-phosphate/phosphate translocator
  misc_feature (1)..(388): Homolog of NCBI NO: 9758260 NR Description: glucose-6-phosphate/phosphate translocator
  misc_feature (1)..(387): Homolog of NCBI NO: 7488807 NR Description: glucose-6-phosphate/phosphate-translocator
  misc_feature (8)..(387): Homolog of NCBI NO: 18407336 NR Description: glucose-6-phosphate/phosphate-translocator,
  misc_feature (8)..(387): Homolog of NCBI NO: 14596173 NR Description: Similar to
  misc_feature (8)..(385): Homolog of NCBI NO: 7484980 NR Description: glucose-6-phosphate/phosphate translocator
  misc_feature (53)..(387): Homolog of NCBI NO: 7489258 NR Description: probable
  misc_feature (53)..(387): Homolog of NCBI NO: 27752361 NR Description: glucose-6-phosphate/phosphate translocator 2
  misc_feature (40)..(387): Homolog of NCBI NO: 9295277 NR Description: glucose-6P/phosphate translocator precursor

SEQ ID NO: 101788 - protein, 250 aa, Arabidopsis thaliana; identical to SEQ ID NO: 22732
  peptide (1)..(250): Ceres Seq. ID no. 13608695
  misc_feature (1)..(250): Homolog of NCBI NO: 18423670 NR Description: glucose-6-phosphate/phosphate translocator, [Arabidopsis thaliana] >gi|7229675|gb|AAF42936.1|AF233658_1
  misc_feature (1)..(250): Homolog of NCBI NO: 21554690 NR Description: glucose-6-phosphate/phosphate translocator
  misc_feature (1)..(250): Homolog of NCBI NO: 9758260 NR Description: glucose-6-phosphate/phosphate translocator
  misc_feature (1)..(249): Homolog of NCBI NO: 7488807 NR Description: glucose-6-phosphate/phosphate-translocator
  misc_feature (1)..(249): Homolog of NCBI NO: 18407336 NR Description: glucose-6-phosphate/phosphate-translocator,
  misc_feature (1)..(249): Homolog of NCBI NO: 14596173 NR Description: Similar to
  misc_feature (1)..(247): Homolog of NCBI NO: 7484980 NR Description: glucose-6-phosphate/phosphate translocator
  misc_feature (1)..(249): Homolog of NCBI NO: 7489258 NR Description: probable
  misc_feature (1)..(249): Homolog of NCBI NO: 27752361 NR Description: glucose-6-phosphate/phosphate translocator 2
  misc_feature (1)..(249): Homolog of NCBI NO: 9295277 NR Description: glucose-6P/phosphate translocator precursor

SEQ ID NO: 101789 - protein, 249 aa, Arabidopsis thaliana; identical to SEQ ID NO: 22733
  peptide (1)..(249): Ceres Seq. ID no. 13608696
  misc_feature (1)..(249): Homolog of NCBI NO: 18423670 NR Description: glucose-6-phosphate/phosphate translocator, [Arabidopsis thaliana] >gi|7229675|gb|AAF42936.1|AF233658_1
  misc_feature (1)..(249): Homolog of NCBI NO: 21554690 NR Description: glucose-6-phosphate/phosphate translocator
  misc_feature (1)..(249): Homolog of NCBI NO: 9758260 NR Description: glucose-6-phosphate/phosphate translocator
  misc_feature (1)..(248): Homolog of NCBI NO: 7488807 NR Description: glucose-6-phosphate/phosphate-translocator
  misc_feature (1)..(248): Homolog of NCBI NO: 18407336 NR Description: glucose-6-phosphate/phosphate-translocator,
  misc_feature (1)..(248): Homolog of NCBI NO: 14596173 NR Description: Similar to
  misc_feature (1)..(246): Homolog of NCBI NO: 7484980 NR Description: glucose-6-phosphate/phosphate translocator
  misc_feature (1)..(248): Homolog of NCBI NO: 7489258 NR Description: probable
  misc_feature (1)..(248): Homolog of NCBI NO: 27752361 NR Description: glucose-6-phosphate/phosphate translocator 2
  misc_feature (1)..(248): Homolog of NCBI NO: 9295277 NR Description: glucose-6P/phosphate translocator precursor

SEQ ID NO: 101790 - DNA, 1625 bp, Arabidopsis thaliana
  misc_feature (1)..(1625): Ceres Seq. ID no. 13608697
  misc_feature: MA Experiment ID: 108434 Result: Down-regulated in Transcription
  misc_feature: MA Experiment 108434 PARAMETER Experiment Name: At_Root_Tips_cDNA_P Parameter: Tissue Value: Root Tips
  misc_feature: MA Experiment ID: 108489 Result: Up-regulated in Transcription
  misc_feature: MA Experiment ID: 108569 Result: Up-regulated in Transcription
  misc_feature: MA Experiment 108569 PARAMETER Experiment Name: At_0.001%_MeJA__cDNA_P Parameter: Timepoint (hr) Value: 6
  misc_feature: MA Experiment 108569 PARAMETER Experiment Name: At_0.001%_MeJA__cDNA_P Parameter: Tissue Value: Aerial
  misc_feature: MA Experiment 108569 PARAMETER Experiment Name: At_0.001%_MeJA__cDNA_P Parameter: Treatment Value: 0.001% MeJA vs. No Treatment
  misc_feature: MA Experiment ID: 108585 Result: Up-regulated in Transcription
  misc_feature: MA Experiment 108585 PARAMETER Experiment Name: At_5mM_NaNP_cDNA_P Parameter: Timepoint (hr) Value: 6
  misc_feature: MA Experiment 108585 PARAMETER Experiment Name: At_5mM_NaNP_cDNA_P Parameter: Tissue Value: Aerial
  misc_feature: MA Experiment 108585 PARAMETER Experiment Name: At_5mM_NaNP_cDNA_P Parameter: Treatment Value: null
  misc_feature: MA Experiment ID: 108595 Result: Down-regulated in Transcription
  misc_feature: MA Experiment 108595 PARAMETER Experiment Name: At_Ler-pi_Ovule_cDNA_P Parameter: Plant Line Value: null
  misc_feature: MA Experiment ID: 20000069 Result: Up-regulated in Transcription
  misc_feature: MA Experiment 20000069 PARAMETER Experiment Name: At_100uM_ABA_Mutants_cDNA_P Parameter: Plant Line Value: CS23
  misc_feature: MA Experiment 20000069 PARAMETER Experiment Name: At_100uM_ABA_Mutants_cDNA_P Parameter: Timepoint (hr) Value: 6
  misc_feature: MA Experiment 20000069 PARAMETER Experiment Name: At_100uM_ABA_Mutants_cDNA_P Parameter: Tissue Value: Aerial
  misc_feature: MA Experiment 20000069 PARAMETER Experiment Name: At_100uM_ABA_Mutants_cDNA_P Parameter: Treatment Value: 100uM ABA vs. No Treatment
  misc_feature: MA Experiment ID: 20000070 Result: Up-regulated in Transcription
  misc_feature: MA Experiment 20000070 PARAMETER Experiment Name: At_100uM_ABA_Mutants_cDNA_P Parameter: Plant Line Value: CS24
  misc_feature: MA Experiment 20000070 PARAMETER Experiment Name: At_100uM_ABA_Mutants_cDNA_P Parameter: Timepoint (hr) Value: 6
  misc_feature: MA Experiment 20000070 PARAMETER Experiment Name: At_100uM_ABA_Mutants_cDNA_P Parameter: Tissue Value: Aerial
  misc_feature: MA Experiment 20000070 PARAMETER Experiment Name: At_100uM_ABA_Mutants_cDNA_P Parameter: Treatment Value: 100uM ABA vs. No Treatment
  misc_feature: MA Experiment ID: 20000071 Result: Up-regulated in Transcription
  misc_feature: MA Experiment 20000071 PARAMETER Experiment Name: At_100uM_ABA_Mutants_cDNA_P Parameter: Plant Line Value: CS8104
  misc_feature: MA Experiment 20000071 PARAMETER Experiment Name: At_100uM_ABA_Mutants_cDNA_P Parameter: Timepoint (hr) Value: 6
  misc_feature: MA Experiment 20000071 PARAMETER Experiment Name: At_100uM_ABA_Mutants_cDNA_P Parameter: Tissue Value: Aerial
  misc_feature: MA Experiment 20000071 PARAMETER Experiment Name: At_100uM_ABA_Mutants_cDNA_P Parameter: Treatment Value: 100uM ABA vs. No Treatment
  misc_feature: MA Experiment ID: 20000072 Result: Up-regulated in Transcription
  misc_feature: MA Experiment 20000072 PARAMETER Experiment Name: At_100uM_ABA_Mutants_cDNA_P Parameter: Plant Line Value: CS8105
  misc_feature: MA Experiment 20000072 PARAMETER Experiment Name: At_100uM_ABA_Mutants_cDNA_P Parameter: Timepoint (hr) Value: 6
  misc_feature: MA Experiment 20000072 PARAMETER Experiment Name: At_100uM_ABA_Mutants_cDNA_P Parameter: Tissue Value: Aerial
  misc_feature: MA Experiment 20000072 PARAMETER Experiment Name: At_100uM_ABA_Mutants_cDNA_P Parameter: Treatment Value: 100uM ABA vs. No Treatment
  misc_feature: MA Experiment ID: 20000088 Result: Up-regulated in Transcription
  misc_feature: MA Experiment 20000088 PARAMETER Experiment Name: At_100uM_ABA_Mutants_cDNA_P Parameter: Plant Line Value: Landsberg
  misc_feature: MA Experiment 20000088 PARAMETER Experiment Name: At_100uM_ABA_Mutants_cDNA_P Parameter: Timepoint (hr) Value: 6
  misc_feature: MA Experiment 20000088 PARAMETER Experiment Name: At_100uM_ABA_Mutants_cDNA_P Parameter: Tissue Value: Aerial
  misc_feature: MA Experiment 20000088 PARAMETER Experiment Name: At_100uM_ABA_Mutants_cDNA_P Parameter: Treatment Value: 100uM ABA vs. No Treatment
  misc_feature: MA Experiment ID: 20000089 Result: Up-regulated in Transcription
  misc_feature: MA Experiment ID: 20000090 Result: Up-regulated in Transcription
  misc_feature: MA Experiment ID: 20000117 Result: Up-regulated in Transcription
  misc_feature: MA Experiment 20000117 PARAMETER Experiment Name: At_100uM_ABA_Mutants_cDNA_P Parameter: Plant Line Value: Columbia
  misc_feature: MA Experiment 20000117 PARAMETER Experiment Name: At_100uM_ABA_Mutants_cDNA_P Parameter: Timepoint (hr) Value: 6
  misc_feature: MA Experiment 20000117 PARAMETER Experiment Name: At_100uM_ABA_Mutants_cDNA_P Parameter: Tissue Value: Aerial
  misc_feature: MA Experiment 20000117 PARAMETER Experiment Name: At_100uM_ABA_Mutants_cDNA_P Parameter: Treatment Value: 100uM ABA vs. No Treatment
  misc_feature: MA Experiment ID: 20000234 Result: Down-regulated in Transcription
  misc_feature: MA Experiment 20000234 PARAMETER Experiment Name: At_Siliques_P Parameter: Age (day) Value: 21
  misc_feature: MA Experiment 20000234 PARAMETER Experiment Name: At_Siliques_P Parameter: Organism Value: A. thaliana
  misc_feature: MA Experiment 20000234 PARAMETER Experiment Name: At_Siliques_P Parameter: Plant Line Value: WS
  misc_feature: MA Experiment 20000234 PARAMETER Experiment Name: At_Siliques_P Parameter: Tissue Value: Less Than 5mm Siliques vs. Whole Plant
  misc_feature: MA Experiment ID: 20000235 Result: Down-regulated in Transcription
  misc_feature: MA Experiment 20000235 PARAMETER Experiment Name: At_Siliques_P Parameter: Age (day) Value: 21
  misc_feature: MA Experiment 20000235 PARAMETER Experiment Name: At_Siliques_P Parameter: Organism Value: A. thaliana
  misc_feature: MA Experiment 20000235 PARAMETER Experiment Name: At_Siliques_P Parameter: Plant Line Value: WS
  misc_feature: MA Experiment 20000235 PARAMETER Experiment Name: At_Siliques_P Parameter: Tissue Value: 5-10mm Siliques vs. Whole Plant
  misc_feature: MA Experiment ID: 20000438 Result: Down-regulated in Transcription
  misc_feature: MA Experiment 20000438 PARAMETER Experiment Name: At_Shoots__P Parameter: Age (day) Value: 14
  misc_feature: MA Experiment 20000438 PARAMETER Experiment Name: At_Shoots__P Parameter: Tissue Value: Shoots vs. Whole Plant
  misc_feature: MA Experiment ID: 20001757 Result: Up-regulated in Transcription
  misc_feature: MA Experiment 20001757 PARAMETER Experiment Name: At_50mM_NH4NO3_L-to-H_P Parameter: Timepoint (hr) Value: 6
  misc_feature: MA Experiment 20001757 PARAMETER Experiment Name: At_50mM_NH4NO3_L-to-H_P Parameter: Tissue Value: Leaf
  misc_feature: MA Experiment 20001757 PARAMETER Experiment Name: At_50mM_NH4NO3_L-to-H_P Parameter: Treatment Value: 50mM NH4NO3 vs 100mM Mannitol
tttcaaggagaagaatatatttgactcagagagagattcattcagtaatggcagcctcaggcacctctgctactttcagagcctccgtttcttcagctccttcctcttcttcccaattgacccatttgaaatcacccttcaaagctgtcaaatatacgcctctgccatcgtctcgctccaagtcatcatccttctccgtctcctgcaccatcgccaaggacccgcctgttctcatggccgccggatctgacccggccctgtggcaacgacccgattcgttcggtcggtttgggaagtttggtgggaagtatgtacctgaaacccttatgcacgctctatctgagcttgaatccgctttctatgctcttgccaccgacgatgatttccagagagagttggctggaatcttgaaggactatgtgggtagagaaagtcctctgtattttgcagagaggcttacggagcattacaggcgcgagaatggcgaagggcctcttatatacttgaagagagaagacttgaatcacacaggagctcacaagattaacaacgctgtggctcaggctcttcttgctaagcggttggggaagaagaggattattgctgagacaggagcgggtcaacatggtgtggctacagctactgtgtgtgcccgttttggtttggagtgtattatctatatgggtgctcaagatatggagagacaagcactcaatgtgttcagaatgcgacttcttggtgccgaggtgagaggagtccactctggaacagcgacattgaaggatgcgacatctgaagcgataagagattgggtgacaaatgtggagactacccattacatattgggatctgtggcgggtcctcatccttaccccatgatggtcagagactttcacgctgtgattggtaaagaaacaaggaaacaagcgttggagaaatggggcgggaagccggatgtcttggtggcttgtgtcggtggtggttcaaacgctatgggactcttccatgaatttgtgaatgacacagaggtccggatgatcggtgtggaagcagcgggattcggattggacagtggcaaacacgctgctacattgacaaagggagatgttggtgtcctccatggagctatgagttacttgctgcaagatgatgatggacaaatcattgaaccacactccatcagtgcaggattggactaccctggagtcggacccgagcacagtttctttaaagacatgggacgggctgaatactatagcataaccgacgaagaagcgttggaagcgttcaagagagtgtcgcggttagagggaatcattccagcactggagacctcacacgcactagcttacctcgagaagctatgtcccacattatcagacgggacgagagtggtcttgaacttcagcggaagaggagataaagatgttcagacagtggctaaatatcttgatgtttgaagagagaaacacttatgtttgtttttcagttattcagacagaatgaaatcctttttgtacttgtaatctgtttgtactttacttctctctggtcagtacgtttccaacaaaattggaaatagaaaaagattacgaagagaacgaaatttgaataaatgtattatc

SEQ ID NO: 101791 - protein, 485 aa, Arabidopsis thaliana
  peptide (1)..(485): Ceres Seq. ID no. 13608698
  misc_feature (137)..(471): Pfam Name: Pyridoxal-phosphate dependent enzyme Pfam Description: Pyridoxal-phosphate dependent enzyme
  misc_feature (16)..(485): Homolog of NCBI NO: 15239755 NR Description: tryptophan synthase, beta subunit 1 (TSB1) thaliana] >gi|136251|sp|P14671|TRP1_ARATH Tryptophan synthase chain 1, chloroplast precursor >gi|99767|pir||A31393 tryptophan
  misc_feature (16)..(485): Homolog of NCBI NO: 81661 NR Description: tryptophan synthase (EC 4.2.1.20) beta-2 chain
  misc_feature (16)..(485): Homolog of NCBI NO: 15236977 NR Description: tryptophan synthase, beta subunit 2 (TSB2) thaliana] >gi|1174779|sp|P25269|TRP2_ARATH Tryptophan synthase
  misc_feature (11)..(485): Homolog of NCBI NO: 7437014 NR Description: probable tryptophan synthase (EC 4.2.1.20) beta - rice >gi|2081609|dbj|BAA19928.1| tryptophan synthase B [Oryza
  misc_feature (21)..(485): Homolog of NCBI NO: 3915165 NR Description: Tryptophan synthase beta chain 2, chloroplast >gi|2792520|gb|AAB97087.1| tryptophan synthase beta subunit acuminata] >gi|2801771|gb|AAB97526.1| tryptophan synthase beta
  misc_feature (19)..(485): Homolog of NCBI NO: 18481702 NR Description: tryptophan synthase beta-subunit [Sorghum bicolor]
  misc_feature (58)..(485): Homolog of NCBI NO: 1174780 NR Description: Tryptophan synthase beta chain 2, chloroplast (Orange pericarp 2) >gi|320135|pir||PQ0450 tryptophan synthase
  misc_feature (89)..(485): Homolog of NCBI NO: 38636821 NR Description: putative tryptophan synthase beta-subunit [Oryza
  misc_feature (97)..(485): Homolog of NCBI NO: 1174778 NR Description: Tryptophan synthase beta chain 1 (Orange pericarp
  misc_feature (82)..(483): Homolog of NCBI NO: 17231286 NR Description: tryptophan synthase beta subunit [Nostoc sp. PCC >gi|24212554|sp|Q8YQM6|TRB2_ANASP Tryptophan synthase beta chain >gi|25291917|pir||AC2280 tryptophan synthase beta chain
SRRRIYLTQREIHSVMAASGTSATFRASVSSAPSSSSQLTHLKSPFKAVKYTPLPSSRSKSSSFSVSCTIAKDPPVLMAAGSDPALWQRPDSFGRFGKFGGKYVPETLMHALSELESAFYALATDDDFQRELAGILKDYVGRESPLYFAERLTEHYRRENGEGPLIYLKREDLNHTGAHKINNAVAQALLAKRLGKKRIIAETGAGQHGVATATVCARFGLECIIYMGAQDMERQALNVFRMRLLGAEVRGVHSGTATLKDATSEAIRDWVTNVETTHYILGSVAGPHPYPMMVRDFHAVIGKETRKQALEKWGGKPDVLVACVGGGSNAMGLFHEFVNDTEVRMIGVEAAGFGLDSGKHAATLTKGDVGVLHGAMSYLLQDDDGQIIEPHSISAGLDYPGVGPEHSFFKDMGRAEYYSITDEEALEAFKRVSRLEGIIPALETSHALAYLEKLCPTLSDGTRVVLNFSGRGDKDVQTVAKYLDV

SEQ ID NO: 101792 - protein, 470 aa, Arabidopsis thaliana; identical to SEQ ID NO: 22870
  peptide (1)..(470): Ceres Seq. ID no. 13608699
  misc_feature (122)..(456): Pfam Name: Pyridoxal-phosphate dependent enzyme Pfam Description: Pyridoxal-phosphate dependent enzyme
  misc_feature (1)..(470): Homolog of NCBI NO: 15239755 NR Description: tryptophan synthase, beta subunit 1 (TSB1) thaliana] >gi|136251|sp|P14671|TRP1_ARATH Tryptophan synthase chain 1, chloroplast precursor >gi|99767|pir||A31393 tryptophan
  misc_feature (1)..(470): Homolog of NCBI NO: 81661 NR Description: tryptophan synthase (EC 4.2.1.20) beta-2 chain
  misc_feature (1)..(470): Homolog of NCBI NO: 15236977 NR Description: tryptophan synthase, beta subunit 2 (TSB2) thaliana] >gi|1174779|sp|P25269|TRP2_ARATH Tryptophan synthase
  misc_feature (1)..(470): Homolog of NCBI NO: 7437014 NR Description: probable tryptophan synthase (EC 4.2.1.20) beta - rice >gi|2081609|dbj|BAA19928.1| tryptophan synthase B [Oryza
  misc_feature (6)..(470): Homolog of NCBI NO: 3915165 NR Description: Tryptophan synthase beta chain 2, chloroplast >gi|2792520|gb|AAB97087.1| tryptophan synthase beta subunit acuminata] >gi|2801771|gb|AAB97526.1| tryptophan synthase beta
  misc_feature (4)..(470): Homolog of NCBI NO: 18481702 NR Description: tryptophan synthase beta-subunit [Sorghum bicolor]
  misc_feature (43)..(470): Homolog of NCBI NO: 1174780 NR Description: Tryptophan synthase beta chain 2, chloroplast (Orange pericarp 2) >gi|320135|pir||PQ0450 tryptophan synthase
  misc_feature (74)..(470): Homolog of NCBI NO: 38636821 NR Description: putative tryptophan synthase beta-subunit [Oryza
  misc_feature (82)..(470): Homolog of NCBI NO: 1174778 NR Description: Tryptophan synthase beta chain 1 (Orange pericarp
  misc_feature (67)..(468): Homolog of NCBI NO: 17231286 NR Description: tryptophan synthase beta subunit [Nostoc sp. PCC >gi|24212554|sp|Q8YQM6|TRB2_ANASP Tryptophan synthase beta chain >gi|25291917|pir||AC2280 tryptophan synthase beta chain

SEQ ID NO: 101793 - protein, 408 aa, Arabidopsis thaliana; identical to SEQ ID NO: 22871
  peptide (1)..(408): Ceres Seq. ID no. 13608700
  misc_feature (60)..(394): Pfam Name: Pyridoxal-phosphate dependent enzyme Pfam Description: Pyridoxal-phosphate dependent enzyme
  misc_feature (1)..(408): Homolog of NCBI NO: 15239755 NR Description: tryptophan synthase, beta subunit 1 (TSB1) thaliana] >gi|136251|sp|P14671|TRP1_ARATH Tryptophan synthase chain 1, chloroplast precursor >gi|99767|pir||A31393 tryptophan
  misc_feature (1)..(408): Homolog of NCBI NO: 81661 NR Description: tryptophan synthase (EC 4.2.1.20) beta-2 chain
  misc_feature (1)..(408): Homolog of NCBI NO: 15236977 NR Description: tryptophan synthase, beta subunit 2 (TSB2) thaliana] >gi|1174779|sp|P25269|TRP2_ARATH Tryptophan synthase
  misc_feature (1)..(408): Homolog of NCBI NO: 7437014 NR Description: probable tryptophan synthase (EC 4.2.1.20) beta - rice >gi|2081609|dbj|BAA19928.1| tryptophan synthase B [Oryza
  misc_feature (1)..(408): Homolog of NCBI NO: 3915165 NR Description: Tryptophan synthase beta chain 2, chloroplast >gi|2792520|gb|AAB97087.1| tryptophan synthase beta subunit acuminata] >gi|2801771|gb|AAB97526.1| tryptophan synthase beta
  misc_feature (1)..(408): Homolog of NCBI NO: 18481702 NR Description: tryptophan synthase beta-subunit [Sorghum bicolor]
  misc_feature (1)..(408): Homolog of NCBI NO: 1174780 NR Description: Tryptophan synthase beta chain 2, chloroplast (Orange pericarp 2) >gi|320135|pir||PQ0450 tryptophan synthase
  misc_feature (12)..(408): Homolog of NCBI NO: 38636821 NR Description: putative tryptophan synthase beta-subunit [Oryza
  misc_feature (20)..(408): Homolog of NCBI NO: 1174778 NR Description: Tryptophan synthase beta chain 1 (Orange pericarp
  misc_feature (5)..(406): Homolog of NCBI NO: 17231286 NR Description: tryptophan synthase beta subunit [Nostoc sp. PCC >gi|24212554|sp|Q8YQM6|TRB2_ANASP Tryptophan synthase beta chain >gi|25291917|pir||AC2280 tryptophan synthase beta chain

SEQ ID NO: 101794 - DNA, 1794 bp, Arabidopsis thaliana
  misc_feature (1)..(1794): Ceres Seq. ID no. 13608701
  misc_feature: MA Experiment ID: 20000794 Result: Up-regulated in Transcription
  misc_feature: MA Experiment 20000794 PARAMETER Experiment Name: At_Petals_P Parameter: Age (day) Value: 23-25 days
  misc_feature: MA Experiment 20000794 PARAMETER Experiment Name: At_Petals_P Parameter: Plant Line Value: WS
  misc_feature: MA Experiment 20000794 PARAMETER Experiment Name: At_Petals_P Parameter: Tissue Value: Petals vs. Whole plant
  misc_feature: MA Experiment ID: 20001451 Result: Down-regulated in Transcription
  misc_feature: MA Experiment 20001451 PARAMETER Experiment Name: At_Far-red-induction_P Parameter: Age (day) Value: 7
  misc_feature: MA Experiment 20001451 PARAMETER Experiment Name: At_Far-red-induction_P Parameter: Light Value: Far-red vs. White
  misc_feature: MA Experiment 20001451 PARAMETER Experiment Name: At_Far-red-induction_P Parameter: Organism Value: A. thaliana
  misc_feature: MA Experiment 20001451 PARAMETER Experiment Name: At_Far-red-induction_P Parameter: Plant Line Value: Columbia
  misc_feature: MA Experiment 20001451 PARAMETER Experiment Name: At_Far-red-induction_P Parameter: Timepoint (hr) Value: 24
  misc_feature: MA Experiment 20001451 PARAMETER Experiment Name: At_Far-red-induction_P Parameter: Tissue Value: Whole Plant
aaaggtcatatgcttttctccagttcctctctctgtctatctctctcctccttcaataatttctgcaaaccctaactttctcattcggcgctcaagtttctctccaccccttcgagatttggtgcgatgatgttgcgtgctgtttttaggagagcttccattagaggctcttcttctgcttcgggattgggaaaatcattgcaatcctctcgtgttgcagtgtctgctcaatttcattctgtttcagcaacagagacgttggtgcctcgtggaaaccatgctcatagcttccatcaccgttcttgtccagggtgtccagactgttcaaggactattatcaacggttaccaaggcacagccctgcaaagatgggtcaggcccttttcatctgatagtggggatgtcgtggaagctgttgtgccacacatgggtgaatcaatcactgatggcaccctagccgcctttctgaagaaacctggcgatagagtagaagctgatgaggctattgcacaaattgaaactgacaaggttacaatagatattgctagcccagcaagtggtgtgatccaagagtttctagtcaaggaaggagatactgttgaaccaggaaacaaggttgcaagaatttctacatctgcggatgctgtgtctcatgtggcaccctcagaaaaggcaccagagaaacctgctcccaagccttctcctcctgctgagaagcccaaagttgaaagtaccaaagttgcagagaaacccaaggcaccatcaccgccacctccaccgccatccaaacagtcagctaaagaaccgcagcttccacctaaggatagggaaagacgggttcctatgacaagacttcgcaaacgggtggcaactaggttgaaagactctcagaacacttttgcgttgctgacaactttcaatgaagttgatatgactaatctgatgaagctccgatctcagtacaaggatgcttttcttgaaaagcacggagtgaagttggggcttatgtctggtttcattaaggctgctgttagtgccctccagcaccaacctgtagtaaatgcagttatcgatggagatgatatcatttacagagactacgtggatatcagtatcgctgttggtacctctaagggtcttgtagttccagtcataagagatgctgacaaaatgaactttgctgacatagagaaaacaataaacggtctcgctaagaaggctactgaaggaaccatatcaatcgatgagatggcaggaggatcattcacagtatcaaatggtggtgtctatggaagtcttataagcactcctatcatcaaccctcctcagtctgctattcttggaatgcattcaattgtgcaacgtccaatggttgtgggaggaagcgtagttccgaggccaatgatgtatgtcgcgctgacttacgatcataggctaattgatggaagagaggctgtgtatttcttgcgccgtattaaggatgttgtggaagatcctcagaggcttcttctcgacatatgataaagatccaagacagaagagatcataagtttctgtctttttaccagtttcctttcaggtaaaaccattacggatactgcaatctgcaaatgatgctttgaaaaaagaacgaaactttttttttggagttttcttaatagttttaagagtttttgccgggcgaggaaagcatcggtgtattgagttttcttttattttataatattcatacagtttgaacaaaatgttacaattttgactttcaaaaaataatgccactgataattattggtt

SEQ ID NO: 101795 - protein, 464 aa, Arabidopsis thaliana
  peptide (1)..(464): Ceres Seq. ID no. 13608702
  misc_feature (232)..(462): Pfam Name: 2-oxoacid dehydrogenases acyltransferase Pfam Description: 2-oxoacid dehydrogenases acyltransferase
  misc_feature (1)..(464): Homolog of NCBI NO: 15240454 NR Description: 2-oxoglutarate dehydrogenase E2 subunit
  misc_feature (1)..(464): Homolog of NCBI NO: 4210332 NR Description: 2-oxoglutarate dehydrogenase E2 subunit
  misc_feature (1)..(464): Homolog of NCBI NO: 30687405 NR Description: dihydrolipoamide succinyltransferase -related thaliana] >gi|24030315|gb|AAN41326.1| putative dihydrolipoamide
  misc_feature (2)..(464): Homolog of NCBI NO: 21618217 NR Description: putative dihydrolipoamide succinyltransferase
  misc_feature (1)..(464): Homolog of NCBI NO: 18416889 NR Description: dihydrolipoamide succinyltransferase -related
  misc_feature (101)..(464): Homolog of NCBI NO: 30687411 NR Description: dihydrolipoamide succinyltransferase -related
  misc_feature (27)..(464): Homolog of NCBI NO: 21740743 NR Description: OSJNBa0072K14.8 [Oryza sativa (japonica
  misc_feature (150)..(464): Homolog of NCBI NO: 7484908 NR Description: dihydrolipoamide S-succinyltransferase homolog - Arabidopsis thaliana >gi|4455214|emb|CAB36537.1| putative succinyltransferase [Arabidopsis thaliana]
  misc_feature (211)..(463): Homolog of NCBI NO: 22967670 NR Description: hypothetical protein [Rhodospirillum rubrum]
  misc_feature (95)..(241): Homolog of NCBI NO: 22967670 NR Description: hypothetical protein [Rhodospirillum rubrum]
MMLRAVFRRASIRGSSSASGLGKSLQSSRVAVSAQFHSVSATETLVPRGNHAHSFHHRSCPGCPDCSRTIINGYQGTALQRWVRPFSSDSGDVVEAVVPHMGESITDGTLAAFLKKPGDRVEADEAIAQIETDKVTIDIASPASGVIQEFLVKEGDTVEPGNKVARISTSADAVSHVAPSEKAPEKPAPKPSPPAEKPKVESTKVAEKPKAPSPPPPPPSKQSAKEPQLPPKDRERRVPMTRLRKRVATRLKDSQNTFALLTTFNEVDMTNLMKLRSQYKDAFLEKHGVKLGLMSGFIKAAVSALQHQPVVNAVIDGDDIIYRDYVDISIAVGTSKGLVVPVIRDADKMNFADIEKTINGLAKKATEGTISIDEMAGGSFTVSNGGVYGSLISTPIINPPQSAILGMHSIVQRPMVVGGSVVPRPMMYVALTYDHRLIDGREAVYFLRRIKDVVEDPQRLLLDI

SEQ ID NO: 101796 - protein, 463 aa, Arabidopsis thaliana
  peptide (1)..(463): Ceres Seq. ID no. 13608703
  misc_feature (231)..(461): Pfam Name: 2-oxoacid dehydrogenases acyltransferase Pfam Description: 2-oxoacid dehydrogenases acyltransferase
  misc_feature (1)..(463): Homolog of NCBI NO: 15240454 NR Description: 2-oxoglutarate dehydrogenase E2 subunit
  misc_feature (1)..(463): Homolog of NCBI NO: 4210332 NR Description: 2-oxoglutarate dehydrogenase E2 subunit
  misc_feature (1)..(463): Homolog of NCBI NO: 30687405 NR Description: dihydrolipoamide succinyltransferase -related thaliana] >gi|24030315|gb|AAN41326.1| putative dihydrolipoamide
  misc_feature (1)..(463): Homolog of NCBI NO: 21618217 NR Description: putative dihydrolipoamide succinyltransferase
  misc_feature (1)..(463): Homolog of NCBI NO: 18416889 NR Description: dihydrolipoamide succinyltransferase -related
  misc_feature (100)..(463): Homolog of NCBI NO: 30687411 NR Description: dihydrolipoamide succinyltransferase -related
  misc_feature (26)..(463): Homolog of NCBI NO: 21740743 NR Description: OSJNBa0072K14.8 [Oryza sativa (japonica
  misc_feature (149)..(463): Homolog of NCBI NO: 7484908 NR Description: dihydrolipoamide S-succinyltransferase homolog - Arabidopsis thaliana >gi|4455214|emb|CAB36537.1| putative succinyltransferase [Arabidopsis thaliana]
  misc_feature (210)..(462): Homolog of NCBI NO: 22967670 NR Description: hypothetical protein [Rhodospirillum rubrum]
  misc_feature (94)..(240): Homolog of NCBI NO: 22967670 NR Description: hypothetical protein [Rhodospirillum rubrum]
MLRAVFRRASIRGSSSASGLGKSLQSSRVAVSAQFHSVSATETLVPRGNHAHSFHHRSCPGCPDCSRTIINGYQGTALQRWVRPFSSDSGDVVEAVVPHMGESITDGTLAAFLKKPGDRVEADEAIAQIETDKVTIDIASPASGVIQEFLVKEGDTVEPGNKVARISTSADAVSHVAPSEKAPEKPAPKPSPPAEKPKVESTKVAEKPKAPSPPPPPPSKQSAKEPQLPPKDRERRVPMTRLRKRVATRLKDSQNTFALLTTFNEVDMTNLMKLRSQYKDAFLEKHGVKLGLMSGFIKAAVSALQHQPVVNAVIDGDDIIYRDYVDISIAVGTSKGLVVPVIRDADKMNFADIEKTINGLAKKATEGTISIDEMAGGSFTVSNGGVYGSLISTPIINPPQSAILGMHSIVQRPMVVGGSVVPRPMMYVALTYDHRLIDGREAVYFLRRIKDVVEDPQRLLLDI

SEQ ID NO: 101797 - protein, 364 aa, Arabidopsis thaliana
  peptide (1)..(364): Ceres Seq. ID no. 13608704
  misc_feature (132)..(362): Pfam Name: 2-oxoacid dehydrogenases acyltransferase Pfam Description: 2-oxoacid dehydrogenases acyltransferase
  misc_feature (1)..(364): Homolog of NCBI NO: 15240454 NR Description: 2-oxoglutarate dehydrogenase E2 subunit
  misc_feature (1)..(364): Homolog of NCBI NO: 4210332 NR Description: 2-oxoglutarate dehydrogenase E2 subunit
  misc_feature (1)..(364): Homolog of NCBI NO: 30687405 NR Description: dihydrolipoamide succinyltransferase -related thaliana] >gi|24030315|gb|AAN41326.1| putative dihydrolipoamide
  misc_feature (1)..(364): Homolog of NCBI NO: 21618217 NR Description: putative dihydrolipoamide succinyltransferase
  misc_feature (1)..(364): Homolog of NCBI NO: 18416889 NR Description: dihydrolipoamide succinyltransferase -related
  misc_feature (1)..(364): Homolog of NCBI NO: 30687411 NR Description: dihydrolipoamide succinyltransferase -related
  misc_feature (1)..(364): Homolog of NCBI NO: 21740743 NR Description: OSJNBa0072K14.8 [Oryza sativa (japonica
  misc_feature (50)..(364): Homolog of NCBI NO: 7484908 NR Description: dihydrolipoamide S-succinyltransferase homolog - Arabidopsis thaliana >gi|4455214|emb|CAB36537.1| putative succinyltransferase [Arabidopsis thaliana]
  misc_feature (111)..(363): Homolog of NCBI NO: 22967670 NR Description: hypothetical protein [Rhodospirillum rubrum]
  misc_feature (1)..(141): Homolog of NCBI NO: 22967670 NR Description: hypothetical protein [Rhodospirillum rubrum]
MGESITDGTLAAFLKKPGDRVEADEAIAQIETDKVTIDIASPASGVIQEFLVKEGDTVEPGNKVARISTSADAVSHVAPSEKAPEKPAPKPSPPAEKPKVESTKVAEKPKAPSPPPPPPSKQSAKEPQLPPKDRERRVPMTRLRKRVATRLKDSQNTFALLTTFNEVDMTNLMKLRSQYKDAFLEKHGVKLGLMSGFIKAAVSALQHQPVVNAVIDGDDIIYRDYVDISIAVGTSKGLVVPVIRDADKMNFADIEKTINGLAKKATEGTISIDEMAGGSFTVSNGGVYGSLISTPIINPPQSAILGMHSIVQRPMVVGGSVVPRPMMYVALTYDHRLIDGREAVYFLRRIKDVVEDPQRLLLDI

SEQ ID NO: 101798 - DNA, 2342 bp, Arabidopsis thaliana
  misc_feature (1)..(2342): Ceres Seq. ID no. 13608705
  misc_feature: MA Experiment ID: 108434 Result: Up-regulated in Transcription
  misc_feature: MA Experiment 108434 PARAMETER Experiment Name: At_Root_Tips_cDNA_P Parameter: Tissue Value: Root Tips
  misc_feature: MA Experiment ID: 108461 Result: Down-regulated in Transcription
  misc_feature: MA Experiment 108461 PARAMETER Experiment Name: At_Germinating_Seeds_cDNA_P Parameter: Age (day) Value: 1 vs. 0
  misc_feature: MA Experiment 108461 PARAMETER Experiment Name: At_Germinating_Seeds_cDNA_P Parameter: Tissue Value: Germinating Seeds
  misc_feature: MA Experiment ID: 108462 Result: Down-regulated in Transcription
  misc_feature: MA Experiment 108462 PARAMETER Experiment Name: At_Germinating_Seeds_cDNA_P Parameter: Age (day) Value: 2 vs. 0
  misc_feature: MA Experiment 108462 PARAMETER Experiment Name: At_Germinating_Seeds_cDNA_P Parameter: Tissue Value: Germinating Seeds
  misc_feature: MA Experiment ID: 108463 Result: Down-regulated in Transcription
  misc_feature: MA Experiment 108463 PARAMETER Experiment Name: At_Germinating_Seeds_cDNA_P Parameter: Age (day) Value: 3 vs. 0
  misc_feature: MA Experiment 108463 PARAMETER Experiment Name: At_Germinating_Seeds_cDNA_P Parameter: Tissue Value: Germinating Seeds
  misc_feature: MA Experiment ID: 108464 Result: Down-regulated in Transcription
  misc_feature: MA Experiment 108464 PARAMETER Experiment Name: At_Germinating_Seeds_cDNA_P Parameter: Age (day) Value: 4 vs. 0
  misc_feature: MA Experiment 108464 PARAMETER Experiment Name: At_Germinating_Seeds_cDNA_P Parameter: Tissue Value: Germinating Seeds
  misc_feature: MA Experiment ID: 108561 Result: Down-regulated in Transcription
  misc_feature: MA Experiment 108561 PARAMETER Experiment Name: At_100uM_ABA_cDNA_P Parameter: Timepoint (hr) Value: 6
  misc_feature: MA Experiment 108561 PARAMETER Experiment Name: At_100uM_ABA_cDNA_P Parameter: Tissue Value: Aerial
  misc_feature: MA Experiment 108561 PARAMETER Experiment Name: At_100uM_ABA_cDNA_P Parameter: Treatment Value: 100uM ABA vs. No Treatment
  misc_feature: MA Experiment ID: 20000089 Result: Up-regulated in Transcription
  misc_feature: MA Experiment ID: 20000180 Result: Down-regulated in Transcription
  misc_feature: MA Experiment 20000180 PARAMETER Experiment Name: At_Germinating_Seeds_P Parameter: Age (hr) Value: 24 vs. 0
  misc_feature: MA Experiment 20000180 PARAMETER Experiment Name: At_Germinating_Seeds_P Parameter: Tissue Value: Germinating Seeds
  misc_feature: MA Experiment ID: 20000184 Result: Down-regulated in Transcription
  misc_feature: MA Experiment 20000184 PARAMETER Experiment Name: At_Shoots__P Parameter: Age (day) Value: 7
  misc_feature: MA Experiment 20000184 PARAMETER Experiment Name: At_Shoots__P Parameter: Tissue Value: Shoots vs. Whole Plant
  misc_feature: MA Experiment ID: 20000227 Result: Up-regulated in Transcription
  misc_feature: MA Experiment 20000227 PARAMETER Experiment Name: At_Root-Tips-vs-Tops_P Parameter: Tissue Value: Root Tips vs. Root Tops
  misc_feature: MA Experiment ID: 20000264 Result: Up-regulated in Transcription
  misc_feature: MA Experiment 20000264 PARAMETER Experiment Name: At_Open_Flower_P Parameter: Age (day) Value: 21
  misc_feature: MA Experiment 20000264 PARAMETER Experiment Name: At_Open_Flower_P Parameter: Plant Line Value: WS
  misc_feature: MA Experiment 20000264 PARAMETER Experiment Name: At_Open_Flower_P Parameter: Tissue Value: Open Flower vs. Whole Plant
  misc_feature: MA Experiment ID: 20000265 Result: Up-regulated in Transcription
  misc_feature: MA Experiment 20000265 PARAMETER Experiment Name: At_Open_Flower_P Parameter: Age (day) Value: 21
  misc_feature: MA Experiment 20000265 PARAMETER Experiment Name: At_Open_Flower_P Parameter: Plant Line Value: WS
  misc_feature: MA Experiment 20000265 PARAMETER Experiment Name: At_Open_Flower_P Parameter: Tissue Value: Closed Flower vs. Whole Plant
  misc_feature: MA Experiment ID: 20001557 Result: Up-regulated in Transcription
  misc_feature: MA Experiment 20001557 PARAMETER Experiment Name: At_Drought_Soil_Dry_P Parameter: Age (day) Value: 27
  misc_feature: MA Experiment 20001557 PARAMETER Experiment Name: At_Drought_Soil_Dry_P Parameter: Organism Value: A. thaliana
  misc_feature: MA Experiment 20001557 PARAMETER Experiment Name: At_Drought_Soil_Dry_P Parameter: Plant Line Value: WS
  misc_feature: MA Experiment 20001557 PARAMETER Experiment Name: At_Drought_Soil_Dry_P Parameter: Post Timepoint (hr) Value: 3
  misc_feature: MA Experiment 20001557 PARAMETER Experiment Name: At_Drought_Soil_Dry_P Parameter: Post-Treatment Value: Re-Water vs. No Drought
  misc_feature: MA Experiment 20001557 PARAMETER Experiment Name: At_Drought_Soil_Dry_P Parameter: Timepoint (day) Value: 13
  misc_feature: MA Experiment 20001557 PARAMETER Experiment Name: At_Drought_Soil_Dry_P Parameter: Treatment Value: Drought vs. No Drought
  misc_feature: MA Experiment ID: 20001558 Result: Up-regulated in Transcription
  misc_feature: MA Experiment 20001558 PARAMETER Experiment Name: At_Drought_Soil_Dry_P Parameter: Age (day) Value: 27
  misc_feature: MA Experiment 20001558 PARAMETER Experiment Name: At_Drought_Soil_Dry_P Parameter: Organism Value: A. thaliana
  misc_feature: MA Experiment 20001558 PARAMETER Experiment Name: At_Drought_Soil_Dry_P Parameter: Plant Line Value: WS
  misc_feature: MA Experiment 20001558 PARAMETER Experiment Name: At_Drought_Soil_Dry_P Parameter: Post Timepoint (hr) Value: 6
  misc_feature: MA Experiment 20001558 PARAMETER Experiment Name: At_Drought_Soil_Dry_P Parameter: Post-Treatment Value: Re-Water vs. No Drought
  misc_feature: MA Experiment 20001558 PARAMETER Experiment Name: At_Drought_Soil_Dry_P Parameter: Timepoint (day) Value: 13
  misc_feature: MA Experiment 20001558 PARAMETER Experiment Name: At_Drought_Soil_Dry_P Parameter: Treatment Value: Drought vs. No Drought
  misc_feature: MA Experiment ID: 20001560 Result: Up-regulated in Transcription
  misc_feature: MA Experiment 20001560 PARAMETER Experiment Name: At_Drought_Soil_Dry_P Parameter: Age (day) Value: 28
  misc_feature: MA Experiment 20001560 PARAMETER Experiment Name: At_Drought_Soil_Dry_P Parameter: Organism Value: A. thaliana
  misc_feature: MA Experiment 20001560 PARAMETER Experiment Name: At_Drought_Soil_Dry_P Parameter: Plant Line Value: WS
  misc_feature: MA Experiment 20001560 PARAMETER Experiment Name: At_Drought_Soil_Dry_P Parameter: Post Timepoint (hr) Value: None
  misc_feature: MA Experiment 20001560 PARAMETER Experiment Name: At_Drought_Soil_Dry_P Parameter: Post-Treatment Value: None
  misc_feature: MA Experiment 20001560 PARAMETER Experiment Name: At_Drought_Soil_Dry_P Parameter: Timepoint (day) Value: 14
  misc_feature: MA Experiment 20001560 PARAMETER Experiment Name: At_Drought_Soil_Dry_P Parameter: Treatment Value: Drought vs. No Drought
  misc_feature: MA Experiment ID: 20001911 Result: Up-regulated in Transcription
  misc_feature: MA Experiment 20001911 PARAMETER Experiment Name: At_Drought_Reproduction_P Parameter: Age (day) Value: 40
  misc_feature: MA Experiment 20001911 PARAMETER Experiment Name: At_Drought_Reproduction_P Parameter: Organism Value: A. thaliana
  misc_feature: MA Experiment 20001911 PARAMETER Experiment Name: At_Drought_Reproduction_P Parameter: Plant Line Value: WS
  misc_feature: MA Experiment 20001911 PARAMETER Experiment Name: At_Drought_Reproduction_P Parameter: Timepoint (day) Value: 10
  misc_feature: MA Experiment 20001911 PARAMETER Experiment Name: At_Drought_Reproduction_P Parameter: Tissue Value: Flowers
  misc_feature: MA Experiment 20001911 PARAMETER Experiment Name: At_Drought_Reproduction_P Parameter: Treatment Value: Drought vs. No Drought
atggtaaaaattaagaagactaagggaatgaggaagcagattcgtctcaacgaagtcgaagaaataaatcttctgaagcagtggatcgaatcacagaaaccggattcaggattcaatccactttcattgcgtcctcttcctaaagattcgaagatcggaaagtccgaagacggcaaaaacggcaccgttttctctcggtatgcaggtgtgaggaagtttgctcagttacctatatcggataaaacgaaaagaggattgaaagatgcgaaatacgttgatatgactgatgttcagagtgctgctattcctcatgctttatgtggaagagatattcttggtgctgctagaactgggtctggcaaaactctggcttttgttattccgattctggagaagttacatagggagagatggagtcctgaagatggtgtgggatgtataattatatctccaacaagggaattggcagcccagacattcggtgttttgaataaagtaggaaagtttcataagtttagtgcggggctcttaattggtggtcgtgaaggagttgatgttgagaaggagagagttcatgagatgaatattttggtgtgtgctcctggtaggcttcttcagcacatggatgagactccaaacttcgaatgtccacagcttcagattctgattttagatgaggccgaccgtgtccttgattctgcgttcaaggggcagttggatcctataatctcacagttgcctaagcacagacaaactttgcttttctctgcaactcaaactaagaaagtcaaggatctagcaagactcagtttgagagatcctgagtacattagtgtacatgcagaggcggttacagctactccaacttccttgatgcagactgtgatgattgtcccagttgaaaagaaattagacatgttatggagtttcatcaaaactcaccttaattccaggattcttgttttcctctccaccaagaaacaggtcaaatttgtgcatgaagcattcaacaagctccggcctggaatacctttgaagagtcttcatggaaaaatgagtcaggaaaaaaggatgggagtgtactctcagttcattgagagacaatcagttctgttctgtactgatgttcttgctagaggtcttgattttgataaggctgtggactgggttgttcaggtggattgtcctgaagatgtagcttcttatattcaccgggttgggcgtacagctcgtttctatactcaagggaagtcgctcctctttctgacaccttcagaggaaaaaatgattgagaaattacaagaagctaaagtgcctataaaactcatcaaggcaaacaaccaaaagttgcaggaggtttctaggctcttggctgctttgttagtcaagtatccagatcttcaaggtgttgctcagagagccttcatcacatatttgaggtccatccacaaaagaagggacaaagagatttttgatgtgtcaaagctgtcgattgaaaacttttctgcttcacttggtctgccaatgactcccagaatccgattcacaaaccttaaaacgaagaaaaagggggtatatgagagttctatcgctatggagattgagaatgcacaggaatatgaagcacctctggttgtcaaaaaagatcttcttggtgaagatttagaagaagaggattttgctctcaagccacgtaaagagggcaaagtagtagaaaaatcaaccaaggaagaagaagttctcataccaggaaatcgtgttttgaaaaacaagaagctgaagatcaatctacacagaccatttgggtcgagggttgtgcttgatgaggaaggcaattctttggctcccttagcaagtgtagctgctgaagcagggactgaagtagcccttgatgaagagagaatgaatgattactataagaaagtgggagcggaaatgaggaaagctgatatagaggacaagaaagtagacaaggaaaggaggagggaaaagagaatgaaacagaagattaagaggaagagaggagccatggaggatgaagaagaagaagaagaagaagaccatgatggttctggatcatcagatgatgaaactggaagaaacagcaaaagagcaaagaaaatcgtctctgacaatgaagaaaatggaggaaaaatcaatacagattctctttccgtagctgatcttgaagaaatggctctcaaattcataacgcaatgataagatcttaattcgtgtagttaatttacatcagttctgtggaaaattttgtgatttgtttccacctaacgattgcacgtttgttaccgtcttactatgaggaaaagaaggatttgcatttt

SEQ ID NO: 101799 - protein, 739 aa, Arabidopsis thaliana
  peptide (1)..(739): Ceres Seq. ID no. 13608706
  misc_feature (84)..(294): Pfam Name: DEAD/DEAH box helicase Pfam Description: DEAD/DEAH box helicase
  misc_feature (6)..(707): Homolog of NCBI NO: 34901886 NR Description: putative RNA helicase [Oryza sativa (japonica
  misc_feature (6)..(707): Homolog of NCBI NO: 34395216 NR Description: putative RNA helicase [Oryza sativa (japonica
  misc_feature (70)..(550): Homolog of NCBI NO: 19115564 NR Description: probable ATP-dependent RNA helicase
  misc_feature (517)..(737): Homolog of NCBI NO: 19115564 NR Description: probable ATP-dependent RNA helicase
  misc_feature (71)..(697): Homolog of NCBI NO: 21627812 NR Description: probable ATP-dependent RNA helicase [Aspergillus
  misc_feature (68)..(707): Homolog of NCBI NO: 40747532 NR Description: hypothetical protein AN0589.2 [Aspergillus
  misc_feature (70)..(720): Homolog of NCBI NO: 13514831 NR Description: DEAD/H (Asp-Glu-Ala-Asp/His) box polypeptide 10;
  misc_feature (70)..(720): Homolog of NCBI NO: 29351661 NR Description: DDX10 protein [Homo sapiens]
  misc_feature (72)..(696): Homolog of NCBI NO: 17509811 NR Description: DEAD box (82.6 kD) [Caenorhabditis elegans]
  misc_feature (70)..(722): Homolog of NCBI NO: 34863395 NR Description: similar to Ddx10 protein [Rattus norvegicus]
MVKIKKTKGMRKQIRLNEVEEINLLKQWIESQKPDSGFNPLSLRPLPKDSKIGKSEDGKNGTVFSRYAGVRKFAQLPISDKTKRGLKDAKYVDMTDVQSAAIPHALCGRDILGAARTGSGKTLAFVIPILEKLHRERWSPEDGVGCIIISPTRELAAQTFGVLNKVGKFHKFSAGLLIGGREGVDVEKERVHEMNILVCAPGRLLQHMDETPNFECPQLQILILDEADRVLDSAFKGQLDPIISQLPKHRQTLLFSATQTKKVKDLARLSLRDPEYISVHAEAVTATPTSLMQTVMIVPVEKKLDMLWSFIKTHLNSRILVFLSTKKQVKFVHEAFNKLRPGIPLKSLHGKMSQEKRMGVYSQFIERQSVLFCTDVLARGLDFDKAVDWVVQVDCPEDVASYIHRVGRTARFYTQGKSLLFLTPSEEKMIEKLQEAKVPIKLIKANNQKLQEVSRLLAALLVKYPDLQGVAQRAFITYLRSIHKRRDKEIFDVSKLSIENFSASLGLPMTPRIRFTNLKTKKKGVYESSIAMEIENAQEYEAPLVVKKDLLGEDLEEEDFALKPRKEGKVVEKSTKEEEVLIPGNRVLKNKKLKINLHRPFGSRVVLDEEGNSLAPLASVAAEAGTEVALDEERMNDYYKKVGAEMRKADIEDKKVDKERRREKRMKQKIKRKRGAMEDEEEEEEEDHDGSGSSDDETGRNSKRAKKIVSDNEENGGKINTDSLSVADLEEMALKFITQ

SEQ ID NO: 101800 - protein, 730 aa, Arabidopsis thaliana
  peptide (1)..(730): Ceres Seq. ID no. 13608707
  misc_feature (75)..(285): Pfam Name: DEAD/DEAH box helicase Pfam Description: DEAD/DEAH box helicase
  misc_feature (1)..(698): Homolog of NCBI NO: 34901886 NR Description: putative RNA helicase [Oryza sativa (japonica
  misc_feature (1)..(698): Homolog of NCBI NO: 34395216 NR Description: putative RNA helicase [Oryza sativa (japonica
  misc_feature (61)..(541): Homolog of NCBI NO: 19115564 NR Description: probable ATP-dependent RNA helicase
  misc_feature (508)..(728): Homolog of NCBI NO: 19115564 NR Description: probable ATP-dependent RNA helicase
  misc_feature (62)..(688): Homolog of NCBI NO: 21627812 NR Description: probable ATP-dependent RNA helicase [Aspergillus
  misc_feature (59)..(698): Homolog of NCBI NO: 40747532 NR Description: hypothetical protein AN0589.2 [Aspergillus
  misc_feature (61)..(711): Homolog of NCBI NO: 13514831 NR Description: DEAD/H (Asp-Glu-Ala-Asp/His) box polypeptide 10;
  misc_feature (61)..(711): Homolog of NCBI NO: 29351661 NR Description: DDX10 protein [Homo sapiens]
  misc_feature (63)..(687): Homolog of NCBI NO: 17509811 NR Description: DEAD box (82.6 kD) [Caenorhabditis elegans]
  misc_feature (61)..(713): Homolog of NCBI NO: 34863395 NR Description: similar to Ddx10 protein [Rattus norvegicus]
MRKQIRLNEVEEINLLKQWIESQKPDSGFNPLSLRPLPKDSKIGKSEDGKNGTVFSRYAGVRKFAQLPISDKTKRGLKDAKYVDMTDVQSAAIPHALCGRDILGAARTGSGKTLAFVIPILEKLHRERWSPEDGVGCIIISPTRELAAQTFGVLNKVGKFHKFSAGLLIGGREGVDVEKERVHEMNILVCAPGRLLQHMDETPNFECPQLQILILDEADRVLDSAFKGQLDPIISQLPKHRQTLLFSATQTKKVKDLARLSLRDPEYISVHAEAVTATPTSLMQTVMIVPVEKKLDMLWSFIKTHLNSRILVFLSTKKQVKFVHEAFNKLRPGIPLKSLHGKMSQEKRMGVYSQFIERQSVLFCTDVLARGLDFDKAVDWVVQVDCPEDVASYIHRVGRTARFYTQGKSLLFLTPSEEKMIEKLQEAKVPIKLIKANNQKLQEVSRLLAALLVKYPDLQGVAQRAFITYLRSIHKRRDKEIFDVSKLSIENFSASLGLPMTPRIRFTNLKTKKKGVYESSIAMEIENAQEYEAPLVVKKDLLGEDLEEEDFALKPRKEGKVVEKSTKEEEVLIPGNRVLKNKKLKINLHRPFGSRVVLDEEGNSLAPLASVAAEAGTEVALDEERMNDYYKKVGAEMRKADIEDKKVDKERRREKRMKQKIKRKRGAMEDEEEEEEEDHDGSGSSDDETGRNSKRAKKIVSDNEENGGKINTDSLSVADLEEMALKFITQ

SEQ ID NO: 101801 - protein, 646 aa, Arabidopsis thaliana
  peptide (1)..(646): Ceres Seq. ID no. 13608708
  misc_feature (1)..(201): Pfam Name: DEAD/DEAH box helicase Pfam Description: DEAD/DEAH box helicase
  misc_feature (1)..(614): Homolog of NCBI NO: 34901886 NR Description: putative RNA helicase [Oryza sativa (japonica
  misc_feature (1)..(614): Homolog of NCBI NO: 34395216 NR Description: putative RNA helicase [Oryza sativa (japonica
  misc_feature (1)..(457): Homolog of NCBI NO: 19115564 NR Description: probable ATP-dependent RNA helicase
  misc_feature (424)..(644): Homolog of NCBI NO: 19115564 NR Description: probable ATP-dependent RNA helicase
  misc_feature (1)..(604): Homolog of NCBI NO: 21627812 NR Description: probable ATP-dependent RNA helicase [Aspergillus
  misc_feature (1)..(614): Homolog of NCBI NO: 40747532 NR Description: hypothetical protein AN0589.2 [Aspergillus
  misc_feature (1)..(627): Homolog of NCBI NO: 13514831 NR Description: DEAD/H (Asp-Glu-Ala-Asp/His) box polypeptide 10;
  misc_feature (1)..(627): Homolog of NCBI NO: 29351661 NR Description: DDX10 protein [Homo sapiens]
  misc_feature (1)..(603): Homolog of NCBI NO: 17509811 NR Description: DEAD box (82.6 kD) [Caenorhabditis elegans]
  misc_feature (1)..(629): Homolog of NCBI NO: 34863395 NR Description: similar to Ddx10 protein [Rattus norvegicus]
MTDVQSAAIPHALCGRDILGAARTGSGKTLAFVIPILEKLHRERWSPEDGVGCIIISPTRELAAQTFGVLNKVGKFHKFSAGLLIGGREGVDVEKERVHEMNILVCAPGRLLQHMDETPNFECPQLQILILDEADRVLDSAFKGQLDPIISQLPKHRQTLLFSATQTKKVKDLARLSLRDPEYISVHAEAVTATPTSLMQTVMIVPVEKKLDMLWSFIKTHLNSRILVFLSTKKQVKFVHEAFNKLRPGIPLKSLHGKMSQEKRMGVYSQFIERQSVLFCTDVLARGLDFDKAVDWVVQVDCPEDVASYIHRVGRTARFYTQGKSLLFLTPSEEKMIEKLQEAKVPIKLIKANNQKLQEVSRLLAALLVKYPDLQGVAQRAFITYLRSIHKRRDKEIFDVSKLSIENFSASLGLPMTPRIRFTNLKTKKKGVYESSIAMEIENAQEYEAPLVVKKDLLGEDLEEEDFALKPRKEGKVVEKSTKEEEVLIPGNRVLKNKKLKINLHRPFGSRVVLDEEGNSLAPLASVAAEAGTEVALDEERMNDYYKKVGAEMRKADIEDKKVDKERRREKRMKQKIKRKRGAMEDEEEEEEEDHDGSGSSDDETGRNSKRAKKIVSDNEENGGKINTDSLSVADLEEMALKFITQ

SEQ ID NO: 101802 - DNA, 1479 bp, Arabidopsis thaliana
  misc_feature (1)..(1479): Ceres Seq. ID no. 13608728
  misc_feature: MA Experiment ID: 108434 Result: Up-regulated in Transcription
  misc_feature: MA Experiment 108434 PARAMETER Experiment Name: At_Root_Tips_cDNA_P Parameter: Tissue Value: Root Tips
  misc_feature: MA Experiment ID: 108462 Result: Down-regulated in Transcription
  misc_feature: MA Experiment 108462 PARAMETER Experiment Name: At_Germinating_Seeds_cDNA_P Parameter: Age (day) Value: 2 vs. 0
  misc_feature: MA Experiment 108462 PARAMETER Experiment Name: At_Germinating_Seeds_cDNA_P Parameter: Tissue Value: Germinating Seeds
  misc_feature: MA Experiment ID: 108464 Result: Down-regulated in Transcription
  misc_feature: MA Experiment 108464 PARAMETER Experiment Name: At_Germinating_Seeds_cDNA_P Parameter: Age (day) Value: 4 vs. 0
  misc_feature: MA Experiment 108464 PARAMETER Experiment Name: At_Germinating_Seeds_cDNA_P Parameter: Tissue Value: Germinating Seeds
  misc_feature: MA Experiment ID: 108488 Result: Up-regulated in Transcription
  misc_feature: MA Experiment ID: 108569 Result: Up-regulated in Transcription
  misc_feature: MA Experiment 108569 PARAMETER Experiment Name: At_0.001%_MeJA__cDNA_P Parameter: Timepoint (hr) Value: 6
  misc_feature: MA Experiment 108569 PARAMETER Experiment Name: At_0.001%_MeJA__cDNA_P Parameter: Tissue Value: Aerial
  misc_feature: MA Experiment 108569 PARAMETER Experiment Name: At_0.001%_MeJA__cDNA_P Parameter: Treatment Value: 0.001% MeJA vs. No Treatment
  misc_feature: MA Experiment ID: 108595 Result: Down-regulated in Transcription
  misc_feature: MA Experiment 108595 PARAMETER Experiment Name: At_Ler-pi_Ovule_cDNA_P Parameter: Plant Line Value: null
  misc_feature: MA Experiment ID: 20000093 Result: Up-regulated in Transcription
  misc_feature: MA Experiment 20000093 PARAMETER Experiment Name: At_42deg_Heat_cDNA_P Parameter: Temperature (deg C) Value: 42 vs. 22
  misc_feature: MA Experiment 20000093 PARAMETER Experiment Name: At_42deg_Heat_cDNA_P Parameter: Timepoint (hr) Value: 0.5
  misc_feature: MA Experiment 20000093 PARAMETER Experiment Name: At_42deg_Heat_cDNA_P Parameter: Tissue Value: Aerial
tacaggcgtgctctctctcctctctccatctatctccctctcttcgccggagatcgcccttcaccaattccactatagtagcaaaaacaagtgaagcacaatggggatcatcgaaaggattaaagaaatcgaggccgagatggctcggactcagaagaataaagctacagagtatcatcttggtcagctcaaggcaaagattgcaaaactcaggacacaactgttggagcctccaaaaggtgctagtggaggcggggaaggttttgaagttaccaagtatggtcatggacgtgttgcacttataggatttcctagtgtcggaaagtccacgcttttgactatgttaactggaacacattctgaagcagcctcatatgaatttacaacacttacatgcatccctggtgtaattcactacaacgacacaaagattcagcttctcgatcttcctgggattattgaaggtgcttcggaaggaaaggggcgaggaaggcaggttattgctgttgcaaagtcttccgaccttgtattgatggttcttgatgcctcaaaaagcgaaggccacaggcaaatattgactaaggaacttgaggcagtgggcttgcgactaaacaaaactcctccgcagatatactttaaaaagaaaaagactggtggaatctctttcaacactacagcacccttgactcacattgatgagaagctctgttatcaaatcctgcatgaatacaagattcacaatgctgaggtgctatttcgtgagaatgccacagtggatgactttattgatgtcattgaaggcaaccgcaagtatattaagtgtgtttatgtctacaacaaaatagatgttgttggaattgatgatgtggatagactatcccggcagccaaattccattgttattagctgcaatcttaagcttaacttagacagactacttgcaaggatgtgggacgaaatgggccttgtgagagtttactcgaagccgcaaggccagcaaccagatttcgatgagccttttgtcctctcatctgatcgaggtggctgcacagtggaagacttctgtaaccacgtccacaggactctggtgaaggatatgaagtatgcactcgtttggggcacaagcacaaggcacaatccacagaattgtggtctttctcaacatcttgaagacgaagatgttgttcagatcgtcaagaaaaaggagagagacgaaggaggaagaggccggttcaagtcacactcaaacgcccctgctagaattgcagacagagagaaaaaagctcctcttaagcaataagcttttagctgataagtcatctccatacatccatctccaccatcatagtcgtggatggtttcacctgagtaagatttactatgttgtatctgaatccgttttgttgttttctctcacaatataagttttggaacaattttacttttttgagatacaaatggaagtacgagttcctattt

SEQ ID NO: 101803 - protein, 399 aa, Arabidopsis thaliana
  peptide (1)..(399): Ceres Seq. ID no. 13608729
  misc_feature (1)..(267): Pfam Name: GTP1/OBG family Pfam Description: GTP1/OBG family
  misc_feature (1)..(399): Homolog of NCBI NO: 15220113 NR Description: developmentally regulated GTP-binding protein thaliana] >gi|9665129|gb|AAF97313.1|AC007843_16 GTP binding
  misc_feature (1)..(399): Homolog of NCBI NO: 2058456 NR Description: GTP-binding protein [Arabidopsis thaliana] developmentally regulated GTP binding protein [Arabidopsis
  misc_feature (1)..(399): Homolog of NCBI NO: 13877991 NR Description: putative developmentally regulated GTP-binding
  misc_feature (1)..(399): Homolog of NCBI NO: 8778457 NR Description: F1L3.17 [Arabidopsis thaliana]
  misc_feature (1)..(399): Homolog of NCBI NO: 15218561 NR Description: GTP-binding protein -related [Arabidopsis
  misc_feature (1)..(399): Homolog of NCBI NO: 7441590 NR Description: GTP binding protein - garden pea
  misc_feature (1)..(367): Homolog of NCBI NO: 34221970 NR Description: developmentally regulated GTP-binding protein
  misc_feature (1)..(367): Homolog of NCBI NO: 4557537 NR Description: developmentally regulated GTP binding protein 2
  misc_feature (1)..(367): Homolog of NCBI NO: 12653443 NR Description: developmentally regulated GTP-binding protein 2 sapiens] >gi|30582791|gb|AAP35622.1| developmentally regulated
  misc_feature (1)..(367): Homolog of NCBI NO: 30584259 NR Description: Homo sapiens developmentally regulated GTP
MGIIERIKEIEAEMARTQKNKATEYHLGQLKAKIAKLRTQLLEPPKGASGGGEGFEVTKYGHGRVALIGFPSVGKSTLLTMLTGTHSEAASYEFTTLTCIPGVIHYNDTKIQLLDLPGIIEGASEGKGRGRQVIAVAKSSDLVLMVLDASKSEGHRQILTKELEAVGLRLNKTPPQIYFKKKKTGGISFNTTAPLTHIDEKLCYQILHEYKIHNAEVLFRENATVDDFIDVIEGNRKYIKCVYVYNKIDVVGIDDVDRLSRQPNSIVISCNLKLNLDRLLARMWDEMGLVRVYSKPQGQQPDFDEPFVLSSDRGGCTVEDFCNHVHRTLVKDMKYALVWGTSTRHNPQNCGLSQHLEDEDVVQIVKKKERDEGGRGRFKSHSNAPARIADREKKAPLKQ

SEQ ID NO: 101804 - protein, 386 aa, Arabidopsis thaliana
  peptide (1)..(386): Ceres Seq. ID no. 13608730
  misc_feature (1)..(254): Pfam Name: GTP1/OBG family Pfam Description: GTP1/OBG family
  misc_feature (1)..(386): Homolog of NCBI NO: 15220113 NR Description: developmentally regulated GTP-binding protein thaliana] >gi|9665129|gb|AAF97313.1|AC007843_16 GTP binding
  misc_feature (1)..(386): Homolog of NCBI NO: 2058456 NR Description: GTP-binding protein [Arabidopsis thaliana] developmentally regulated GTP binding protein [Arabidopsis
  misc_feature (1)..(386): Homolog of NCBI NO: 13877991 NR Description: putative developmentally regulated GTP-binding
  misc_feature (1)..(386): Homolog of NCBI NO: 8778457 NR Description: F1L3.17 [Arabidopsis thaliana]
  misc_feature (1)..(386): Homolog of NCBI NO: 15218561 NR Description: GTP-binding protein -related [Arabidopsis
  misc_feature (1)..(386): Homolog of NCBI NO: 7441590 NR Description: GTP binding protein - garden pea
  misc_feature (1)..(354): Homolog of NCBI NO: 34221970 NR Description: developmentally regulated GTP-binding protein
  misc_feature (1)..(354): Homolog of NCBI NO: 4557537 NR Description: developmentally regulated GTP binding protein 2
  misc_feature (1)..(354): Homolog of NCBI NO: 12653443 NR Description: developmentally regulated GTP-binding protein 2 sapiens] >gi|30582791|gb|AAP35622.1| developmentally regulated
  misc_feature (1)..(354): Homolog of NCBI NO: 30584259 NR Description: Homo sapiens developmentally regulated GTP
MARTQKNKATEYHLGQLKAKIAKLRTQLLEPPKGASGGGEGFEVTKYGHGRVALIGFPSVGKSTLLTMLTGTHSEAASYEFTTLTCIPGVIHYNDTKIQLLDLPGIIEGASEGKGRGRQVIAVAKSSDLVLMVLDASKSEGHRQILTKELEAVGLRLNKTPPQIYFKKKKTGGISFNTTAPLTHIDEKLCYQILHEYKIHNAEVLFRENATVDDFIDVIEGNRKYIKCVYVYNKIDVVGIDDVDRLSRQPNSIVISCNLKLNLDRLLARMWDEMGLVRVYSKPQGQQPDFDEPFVLSSDRGGCTVEDFCNHVHRTLVKDMKYALVWGTSTRHNPQNCGLSQHLEDEDVVQIVKKKERDEGGRGRFKSHSNAPARIADREKKAPLKQ

SEQ ID NO: 101805 - protein, 319 aa, Arabidopsis thaliana
  peptide (1)..(319): Ceres Seq. ID no. 13608731
  misc_feature (1)..(187): Pfam Name: GTP1/OBG family Pfam Description: GTP1/OBG family
  misc_feature (1)..(319): Homolog of NCBI NO: 15220113 NR Description: developmentally regulated GTP-binding protein thaliana] >gi|9665129|gb|AAF97313.1|AC007843_16 GTP binding
  misc_feature (1)..(319): Homolog of NCBI NO: 2058456 NR Description: GTP-binding protein [Arabidopsis thaliana] developmentally regulated GTP binding protein [Arabidopsis
  misc_feature (1)..(319): Homolog of NCBI NO: 13877991 NR Description: putative developmentally regulated GTP-binding
  misc_feature (1)..(319): Homolog of NCBI NO: 8778457 NR Description: F1L3.17 [Arabidopsis thaliana]
  misc_feature (1)..(319): Homolog of NCBI NO: 15218561 NR Description: GTP-binding protein -related [Arabidopsis
  misc_feature (1)..(319): Homolog of NCBI NO: 7441590 NR Description: GTP binding protein - garden pea
  misc_feature (1)..(287): Homolog of NCBI NO: 34221970 NR Description: developmentally regulated GTP-binding protein
  misc_feature (1)..(287): Homolog of NCBI NO: 4557537 NR Description: developmentally regulated GTP binding protein 2
  misc_feature (1)..(287): Homolog of NCBI NO: 12653443 NR Description: developmentally regulated GTP-binding protein 2 sapiens] >gi|30582791|gb|AAP35622.1| developmentally regulated
  misc_feature (1)..(287): Homolog of NCBI NO: 30584259 NR Description: Homo sapiens developmentally regulated GTP
MLTGTHSEAASYEFTTLTCIPGVIHYNDTKIQLLDLPGIIEGASEGKGRGRQVIAVAKSSDLVLMVLDASKSEGHRQILTKELEAVGLRLNKTPPQIYFKKKKTGGISFNTTAPLTHIDEKLCYQILHEYKIHNAEVLFRENATVDDFIDVIEGNRKYIKCVYVYNKIDVVGIDDVDRLSRQPNSIVISCNLKLNLDRLLARMWDEMGLVRVYSKPQGQQPDFDEPFVLSSDRGGCTVEDFCNHVHRTLVKDMKYALVWGTSTRHNPQNCGLSQHLEDEDVVQIVKKKERDEGGRGRFKSHSNAPARIADREKKAPLKQ

SEQ ID NO: 101806 - DNA, 1297 bp, Arabidopsis thaliana
  misc_feature (1)..(1297): Ceres Seq. ID no. 13608739
  misc_feature: MA Experiment ID: 108434 Result: Up-regulated in Transcription
  misc_feature: MA Experiment 108434 PARAMETER Experiment Name: At_Root_Tips_cDNA_P Parameter: Tissue Value: Root Tips
  misc_feature: MA Experiment ID: 108462 Result: Down-regulated in Transcription
  misc_feature: MA Experiment 108462 PARAMETER Experiment Name: At_Germinating_Seeds_cDNA_P Parameter: Age (day) Value: 2 vs. 0
  misc_feature: MA Experiment 108462 PARAMETER Experiment Name: At_Germinating_Seeds_cDNA_P Parameter: Tissue Value: Germinating Seeds
  misc_feature: MA Experiment ID: 108463 Result: Down-regulated in Transcription
  misc_feature: MA Experiment 108463 PARAMETER Experiment Name: At_Germinating_Seeds_cDNA_P Parameter: Age (day) Value: 3 vs. 0
  misc_feature: MA Experiment 108463 PARAMETER Experiment Name: At_Germinating_Seeds_cDNA_P Parameter: Tissue Value: Germinating Seeds
  misc_feature: MA Experiment ID: 108464 Result: Down-regulated in Transcription
  misc_feature: MA Experiment 108464 PARAMETER Experiment Name: At_Germinating_Seeds_cDNA_P Parameter: Age (day) Value: 4 vs. 0
  misc_feature: MA Experiment 108464 PARAMETER Experiment Name: At_Germinating_Seeds_cDNA_P Parameter: Tissue Value: Germinating Seeds
  misc_feature: MA Experiment ID: 108573 Result: Up-regulated in Transcription
  misc_feature: MA Experiment 108573 PARAMETER Experiment Name: At_Drought_cDNA_P Parameter: Timepoint (hr) Value: 6
  misc_feature: MA Experiment 108573 PARAMETER Experiment Name: At_Drought_cDNA_P Parameter: Tissue Value: Aerial
  misc_feature: MA Experiment 108573 PARAMETER Experiment Name: At_Drought_cDNA_P Parameter: Treatment Value: Drought vs. No Drought
  misc_feature: MA Experiment ID: 108585 Result: Up-regulated in Transcription
  misc_feature: MA Experiment 108585 PARAMETER Experiment Name: At_5mM_NaNP_cDNA_P Parameter: Timepoint (hr) Value: 6
  misc_feature: MA Experiment 108585 PARAMETER Experiment Name: At_5mM_NaNP_cDNA_P Parameter: Tissue Value: Aerial
  misc_feature: MA Experiment 108585 PARAMETER Experiment Name: At_5mM_NaNP_cDNA_P Parameter: Treatment Value: null
  misc_feature: MA Experiment ID: 108595 Result: Down-regulated in Transcription
  misc_feature: MA Experiment 108595 PARAMETER Experiment Name: At_Ler-pi_Ovule_cDNA_P Parameter: Plant Line Value: null
  misc_feature: MA Experiment ID: 20000069 Result: Down-regulated in Transcription
  misc_feature: MA Experiment 20000069 PARAMETER Experiment Name: At_100uM_ABA_Mutants_cDNA_P Parameter: Plant Line Value: CS23
  misc_feature: MA Experiment 20000069 PARAMETER Experiment Name: At_100uM_ABA_Mutants_cDNA_P Parameter: Timepoint (hr) Value: 6
  misc_feature: MA Experiment 20000069 PARAMETER Experiment Name: At_100uM_ABA_Mutants_cDNA_P Parameter: Tissue Value: Aerial
  misc_feature: MA Experiment 20000069 PARAMETER Experiment Name: At_100uM_ABA_Mutants_cDNA_P Parameter: Treatment Value: 100uM ABA vs. No Treatment
  misc_feature: MA Experiment ID: 20000087 Result: Down-regulated in Transcription
  misc_feature: MA Experiment 20000087 PARAMETER Experiment Name: At_100uM_ABA_Mutants_cDNA_P Parameter: Plant Line Value: WS
  misc_feature: MA Experiment 20000087 PARAMETER Experiment Name: At_100uM_ABA_Mutants_cDNA_P Parameter: Timepoint (hr) Value: 6
  misc_feature: MA Experiment 20000087 PARAMETER Experiment Name: At_100uM_ABA_Mutants_cDNA_P Parameter: Tissue Value: Aerial
  misc_feature: MA Experiment 20000087 PARAMETER Experiment Name: At_100uM_ABA_Mutants_cDNA_P Parameter: Treatment Value: 100uM ABA vs. No Treatment
  misc_feature: MA Experiment ID: 20000184 Result: Up-regulated in Transcription
  misc_feature: MA Experiment 20000184 PARAMETER Experiment Name: At_Shoots__P Parameter: Age (day) Value: 7
  misc_feature: MA Experiment 20000184 PARAMETER Experiment Name: At_Shoots__P Parameter: Tissue Value: Shoots vs. Whole Plant
  misc_feature: MA Experiment ID: 20000437 Result: Down-regulated in Transcription
  misc_feature: MA Experiment 20000437 PARAMETER Experiment Name: At_Drought_P Parameter: Age (day) Value: 8
  misc_feature: MA Experiment 20000437 PARAMETER Experiment Name: At_Drought_P Parameter: Organism Value: A. thaliana
  misc_feature: MA Experiment 20000437 PARAMETER Experiment Name: At_Drought_P Parameter: Plant Line Value: WS
  misc_feature: MA Experiment 20000437 PARAMETER Experiment Name: At_Drought_P Parameter: Timepoint (hr) Value: 24
  misc_feature: MA Experiment 20000437 PARAMETER Experiment Name: At_Drought_P Parameter: Tissue Value: Whole Plant
  misc_feature: MA Experiment 20000437 PARAMETER Experiment Name: At_Drought_P Parameter: Treatment Value: Drought vs. No Drought
  misc_feature: MA Experiment ID: 20000794 Result: Down-regulated in Transcription
  misc_feature: MA Experiment 20000794 PARAMETER Experiment Name: At_Petals_P Parameter: Age (day) Value: 23-25 days
  misc_feature: MA Experiment 20000794 PARAMETER Experiment Name: At_Petals_P Parameter: Plant Line Value: WS
  misc_feature: MA Experiment 20000794 PARAMETER Experiment Name: At_Petals_P Parameter: Tissue Value: Petals vs. Whole plant
  misc_feature: MA Experiment ID: 20001558 Result: Up-regulated in Transcription
  misc_feature: MA Experiment 20001558 PARAMETER Experiment Name: At_Drought_Soil_Dry_P Parameter: Age (day) Value: 27
  misc_feature: MA Experiment 20001558 PARAMETER Experiment Name: At_Drought_Soil_Dry_P Parameter: Organism Value: A. thaliana
  misc_feature: MA Experiment 20001558 PARAMETER Experiment Name: At_Drought_Soil_Dry_P Parameter: Plant Line Value: WS
  misc_feature: MA Experiment 20001558 PARAMETER Experiment Name: At_Drought_Soil_Dry_P Parameter: Post Timepoint (hr) Value: 6
  misc_feature: MA Experiment 20001558 PARAMETER Experiment Name: At_Drought_Soil_Dry_P Parameter: Post-Treatment Value: Re-Water vs. No Drought
  misc_feature: MA Experiment 20001558 PARAMETER Experiment Name: At_Drought_Soil_Dry_P Parameter: Timepoint (day) Value: 13
  misc_feature: MA Experiment 20001558 PARAMETER Experiment Name: At_Drought_Soil_Dry_P Parameter: Treatment Value: Drought vs. No Drought
  misc_feature: MA Experiment ID: 20001757 Result: Up-regulated in Transcription
  misc_feature: MA Experiment 20001757 PARAMETER Experiment Name: At_50mM_NH4NO3_L-to-H_P Parameter: Timepoint (hr) Value: 6
  misc_feature: MA Experiment 20001757 PARAMETER Experiment Name: At_50mM_NH4NO3_L-to-H_P Parameter: Tissue Value: Leaf
  misc_feature: MA Experiment 20001757 PARAMETER Experiment Name: At_50mM_NH4NO3_L-to-H_P Parameter: Treatment Value: 50mM NH4NO3 vs 100mM Mannitol
aatccatttttagtttctatcatataaatagcttcttgtgtttttcacgcccttcttctttgtatttccgcctcccccgagaaaacgaaaaccctagtttcagaggcatctccagacaccgaaaatggcggaaggactcgttttgaagggcaccatgcgtgcacacactgacatggtgacggcaatcgccaccccaatcgataacgcagacatcatcgtctcagcttcccgcgacaaatccatcattttgtggaaactcaccaaggacgacaaagcctacggtgtagctcagaggcgtctcactggtcactctcacttcgttgaggatgttgttctctcctccgatggacaattcgcgctttccggcagctgggacggcgagctccgtctttgggatcttgctgctggtgtctccactcgtagattcgttggacacaccaaggacgtgctctccgtcgccttctcactcgacaaccgtcagatcgtctctgcatctcgtgaccgtacgatcaagctgtggaacactcttggtgagtgcaagtacaccatttcagaaggtggtgagggacaccgtgattgggttagctgcgtcagattcagccctaacacgcttcagccgacgattgtatctgcttcgtgggacaagaccgtgaaagtgtggaacctttcgaactgcaagctcagatcgactcttgctggtcacaccggttacgtgagcactgtggctgtatcacctgatggttctctttgtgcaagtggaggcaaagacggtgttgttttgctgtgggatttggctgaggggaagaagctttactctcttgaagctaactctgtgatccatgctctttgcttcagtcccaacaggtactggctctgtgctgcaactgaacatggtattaagatttgggaccttgagagcaagagcattgttgaggatttgaaggttgatctcaaggctgaggctgaaaaggctgacaacagtggtcctgctgccaccaagaggaaggttatttactgcacaagccttaactggagcgctgatggaagcaccctcttcagtggttacaccgatggagtcattagagtttggggtattggtcgttactagtaatctcatcacttgtgctgtcgttgctctctgctatctgcttgttggttttatctatcacttatgtttttatcgacaactcatgaagtaccttgaggtttttggaaggatgtttgttttcttgtcaatctaggtttttgcttctttatcttatcgttcgagatcttggtttttagagttacttctccc

SEQ ID NO: 101807 - protein, 327 aa, Arabidopsis thaliana; identical to SEQ ID NO: 27691
  peptide (1)..(327): Ceres Seq. ID no. 13608740
  misc_feature (1)..(327): Homolog of NCBI NO: 15220941 NR Description: WD-40 repeat auxin-dependent protein ARCA
  misc_feature (1)..(327): Homolog of NCBI NO: 2289095 NR Description: WD-40 repeat protein [Arabidopsis thaliana]
  misc_feature (1)..(327): Homolog of NCBI NO: 3023857 NR Description: GUANINE NUCLEOTIDE-BINDING PROTEIN BETA
  misc_feature (1)..(327): Homolog of NCBI NO: 15221916 NR Description: WD-40 repeat auxin-dependent protein ARCA,
  misc_feature (1)..(327): Homolog of NCBI NO: 15229589 NR Description: guanine nucleotide-binding protein / activated kinase C receptor RACK1 [Arabidopsis thaliana]
  misc_feature (1)..(327): Homolog of NCBI NO: 21593440 NR Description: guanine nucleotide-binding protein, putative
  misc_feature (1)..(327): Homolog of NCBI NO: 3023847 NR Description: GUANINE NUCLEOTIDE-BINDING PROTEIN BETA

SEQ ID NO: 101808 - protein, 317 aa, Arabidopsis thaliana; identical to SEQ ID NO: 27692
  peptide (1)..(317): Ceres Seq. ID no. 13608741
  misc_feature (1)..(317): Homolog of NCBI NO: 15220941 NR Description: WD-40 repeat auxin-dependent protein ARCA
  misc_feature (1)..(317): Homolog of NCBI NO: 2289095 NR Description: WD-40 repeat protein [Arabidopsis thaliana]
  misc_feature (1)..(317): Homolog of NCBI NO: 3023857 NR Description: GUANINE NUCLEOTIDE-BINDING PROTEIN BETA
  misc_feature (1)..(317): Homolog of NCBI NO: 15221916 NR Description: WD-40 repeat auxin-dependent protein ARCA,
  misc_feature (1)..(317): Homolog of NCBI NO: 15229589 NR Description: guanine nucleotide-binding protein / activated kinase C receptor RACK1 [Arabidopsis thaliana]
  misc_feature (1)..(317): Homolog of NCBI NO: 21593440 NR Description: guanine nucleotide-binding protein, putative
  misc_feature (1)..(317): Homolog of NCBI NO: 3023847 NR Description: GUANINE NUCLEOTIDE-BINDING PROTEIN BETA

SEQ ID NO: 101809 - protein, 311 aa, Arabidopsis thaliana; identical to SEQ ID NO: 27693
  peptide (1)..(311): Ceres Seq. ID no. 13608742
  misc_feature (1)..(311): Homolog of NCBI NO: 15220941 NR Description: WD-40 repeat auxin-dependent protein ARCA
  misc_feature (1)..(311): Homolog of NCBI NO: 2289095 NR Description: WD-40 repeat protein [Arabidopsis thaliana]
  misc_feature (1)..(311): Homolog of NCBI NO: 3023857 NR Description: GUANINE NUCLEOTIDE-BINDING PROTEIN BETA
  misc_feature (1)..(311): Homolog of NCBI NO: 15221916 NR Description: WD-40 repeat auxin-dependent protein ARCA,
  misc_feature (1)..(311): Homolog of NCBI NO: 15229589 NR Description: guanine nucleotide-binding protein / activated kinase C receptor RACK1 [Arabidopsis thaliana]
  misc_feature (1)..(311): Homolog of NCBI NO: 21593440 NR Description: guanine nucleotide-binding protein, putative
  misc_feature (1)..(311): Homolog of NCBI NO: 3023847 NR Description: GUANINE NUCLEOTIDE-BINDING PROTEIN BETA

SEQ ID NO: 101810 - DNA, 833 bp, Arabidopsis thaliana
  misc_feature (1)..(833): Ceres Seq. ID no. 13608743
  misc_feature: MA Experiment ID: 108434 Result: Down-regulated in Transcription
  misc_feature: MA Experiment 108434 PARAMETER Experiment Name: At_Root_Tips_cDNA_P Parameter: Tissue Value: Root Tips
  misc_feature: MA Experiment ID: 108488 Result: Down-regulated in Transcription
  misc_feature: MA Experiment ID: 108573 Result: Up-regulated in Transcription
  misc_feature: MA Experiment 108573 PARAMETER Experiment Name: At_Drought_cDNA_P Parameter: Timepoint (hr) Value: 6
  misc_feature: MA Experiment 108573 PARAMETER Experiment Name: At_Drought_cDNA_P Parameter: Tissue Value: Aerial
  misc_feature: MA Experiment 108573 PARAMETER Experiment Name: At_Drought_cDNA_P Parameter: Treatment Value: Drought vs. No Drought
  misc_feature: MA Experiment ID: 108579 Result: Up-regulated in Transcription
  misc_feature: MA Experiment 108579 PARAMETER Experiment Name: At_4deg_Cold_cDNA_P Parameter: Temperature (deg C) Value: 4 vs. 22
  misc_feature: MA Experiment 108579 PARAMETER Experiment Name: At_4deg_Cold_cDNA_P Parameter: Timepoint (hr) Value: 6
  misc_feature: MA Experiment 108579 PARAMETER Experiment Name: At_4deg_Cold_cDNA_P Parameter: Tissue Value: Aerial
  misc_feature: MA Experiment ID: 108585 Result: Up-regulated in Transcription
  misc_feature: MA Experiment 108585 PARAMETER Experiment Name: At_5mM_NaNP_cDNA_P Parameter: Timepoint (hr) Value: 6
  misc_feature: MA Experiment 108585 PARAMETER Experiment Name: At_5mM_NaNP_cDNA_P Parameter: Tissue Value: Aerial
  misc_feature: MA Experiment 108585 PARAMETER Experiment Name: At_5mM_NaNP_cDNA_P Parameter: Treatment Value: null
  misc_feature: MA Experiment ID: 108595 Result: Up-regulated in Transcription
  misc_feature: MA Experiment 108595 PARAMETER Experiment Name: At_Ler-pi_Ovule_cDNA_P Parameter: Plant Line Value: null
  misc_feature: MA Experiment ID: 20000111 Result: Down-regulated in Transcription
  misc_feature: MA Experiment 20000111 PARAMETER Experiment Name: At_42deg_Heat_cDNA_P Parameter: Temperature (deg C) Value: 42 vs. 22
  misc_feature: MA Experiment 20000111 PARAMETER Experiment Name: At_42deg_Heat_cDNA_P Parameter: Timepoint (hr) Value: 6
  misc_feature: MA Experiment 20000111 PARAMETER Experiment Name: At_42deg_Heat_cDNA_P Parameter: Tissue Value: Aerial
  misc_feature: MA Experiment ID: 20000113 Result: Down-regulated in Transcription
  misc_feature: MA Experiment 20000113 PARAMETER Experiment Name: At_42deg_Heat_cDNA_P Parameter: Temperature (deg C) Value: 42 vs. 22
  misc_feature: MA Experiment 20000113 PARAMETER Experiment Name: At_42deg_Heat_cDNA_P Parameter: Timepoint (hr) Value: 8
  misc_feature: MA Experiment 20000113 PARAMETER Experiment Name: At_42deg_Heat_cDNA_P Parameter: Tissue Value: Aerial
  misc_feature: MA Experiment ID: 20000144 Result: Down-regulated in Transcription
  misc_feature: MA Experiment 20000144 PARAMETER Experiment Name: At_42deg_Heat_cDNA_P Parameter: Temperature (deg C) Value: 42 vs. 22
  misc_feature: MA Experiment 20000144 PARAMETER Experiment Name: At_42deg_Heat_cDNA_P Parameter: Timepoint (hr) Value: 1
  misc_feature: MA Experiment 20000144 PARAMETER Experiment Name: At_42deg_Heat_cDNA_P Parameter: Tissue Value: Aerial
  misc_feature: MA Experiment ID: 20000171 Result: Down-regulated in Transcription
  misc_feature: MA Experiment 20000171 PARAMETER Experiment Name: At_42deg_Heat_P Parameter: Age (day) Value: 14
  misc_feature: MA Experiment 20000171 PARAMETER Experiment Name: At_42deg_Heat_P Parameter: Organism Value: A. thaliana
  misc_feature: MA Experiment 20000171 PARAMETER Experiment Name: At_42deg_Heat_P Parameter: Plant Line Value: WS
  misc_feature: MA Experiment 20000171 PARAMETER Experiment Name: At_42deg_Heat_P Parameter: Temperature (deg C) Value: 42 vs. 22
  misc_feature: MA Experiment 20000171 PARAMETER Experiment Name: At_42deg_Heat_P Parameter: Timepoint (hr) Value: 1
  misc_feature: MA Experiment 20000171 PARAMETER Experiment Name: At_42deg_Heat_P Parameter: Tissue Value: Aerial
  misc_feature: MA Experiment ID: 20000173 Result: Down-regulated in Transcription
  misc_feature: MA Experiment 20000173 PARAMETER Experiment Name: At_42deg_Heat_P Parameter: Age (day) Value: 14
  misc_feature: MA Experiment 20000173 PARAMETER Experiment Name: At_42deg_Heat_P Parameter: Organism Value: A. thaliana
  misc_feature: MA Experiment 20000173 PARAMETER Experiment Name: At_42deg_Heat_P Parameter: Plant Line Value: WS
  misc_feature: MA Experiment 20000173 PARAMETER Experiment Name: At_42deg_Heat_P Parameter: Temperature (deg C) Value: 42 vs. 22
  misc_feature: MA Experiment 20000173 PARAMETER Experiment Name: At_42deg_Heat_P Parameter: Timepoint (hr) Value: 6
  misc_feature: MA Experiment 20000173 PARAMETER Experiment Name: At_42deg_Heat_P Parameter: Tissue Value: Aerial
  misc_feature: MA Experiment ID: 20000184 Result: Down-regulated in Transcription
  misc_feature: MA Experiment 20000184 PARAMETER Experiment Name: At_Shoots__P Parameter: Age (day) Value: 7
  misc_feature: MA Experiment 20000184 PARAMETER Experiment Name: At_Shoots__P Parameter: Tissue Value: Shoots vs. Whole Plant
  misc_feature: MA Experiment ID: 20000213 Result: Up-regulated in Transcription
  misc_feature: MA Experiment 20000213 PARAMETER Experiment Name: At_4deg_Cold_P Parameter: Timepoint (hr) Value: 2
  misc_feature: MA Experiment ID: 20000227 Result: Down-regulated in Transcription
  misc_feature: MA Experiment 20000227 PARAMETER Experiment Name: At_Root-Tips-vs-Tops_P Parameter: Tissue Value: Root Tips vs. Root Tops
  misc_feature: MA Experiment ID: 20000438 Result: Down-regulated in Transcription
  misc_feature: MA Experiment 20000438 PARAMETER Experiment Name: At_Shoots__P Parameter: Age (day) Value: 14
  misc_feature: MA Experiment 20000438 PARAMETER Experiment Name: At_Shoots__P Parameter: Tissue Value: Shoots vs. Whole Plant
  misc_feature: MA Experiment ID: 20000495 Result: Down-regulated in Transcription
  misc_feature: MA Experiment 20000495 PARAMETER Experiment Name: At_Guard_Cells_P Parameter: Harvest Date Value: 8/2/2002
  misc_feature: MA Experiment 20000495 PARAMETER Experiment Name: At_Guard_Cells_P Parameter: Organism Value: A. thaliana
  misc_feature: MA Experiment 20000495 PARAMETER Experiment Name: At_Guard_Cells_P Parameter: Tissue Value: Guard Cells vs. Leaves
  misc_feature: MA Experiment ID: 20000794 Result: Up-regulated in Transcription
  misc_feature: MA Experiment 20000794 PARAMETER Experiment Name: At_Petals_P Parameter: Age (day) Value: 23-25 days
  misc_feature: MA Experiment 20000794 PARAMETER Experiment Name: At_Petals_P Parameter: Plant Line Value: WS
  misc_feature: MA Experiment 20000794 PARAMETER Experiment Name: At_Petals_P Parameter: Tissue Value: Petals vs. Whole plant
  misc_feature: MA Experiment ID: 20001557 Result: Up-regulated in Transcription
  misc_feature: MA Experiment 20001557 PARAMETER Experiment Name: At_Drought_Soil_Dry_P Parameter: Age (day) Value: 27
  misc_feature: MA Experiment 20001557 PARAMETER Experiment Name: At_Drought_Soil_Dry_P Parameter: Organism Value: A. thaliana
  misc_feature: MA Experiment 20001557 PARAMETER Experiment Name: At_Drought_Soil_Dry_P Parameter: Plant Line Value: WS
  misc_feature: MA Experiment 20001557 PARAMETER Experiment Name: At_Drought_Soil_Dry_P Parameter: Post Timepoint (hr) Value: 3
  misc_feature: MA Experiment 20001557 PARAMETER Experiment Name: At_Drought_Soil_Dry_P Parameter: Post-Treatment Value: Re-Water vs. No Drought
  misc_feature: MA Experiment 20001557 PARAMETER Experiment Name: At_Drought_Soil_Dry_P Parameter: Timepoint (day) Value: 13
  misc_feature: MA Experiment 20001557 PARAMETER Experiment Name: At_Drought_Soil_Dry_P Parameter: Treatment Value: Drought vs. No Drought
gctctttatctctctctccaactttacctttaacaaaaaaaaaatggcaagcgcgaatccagaaaccgccaaacccacgcctgcaacggtggacatggctaatccagaggagcttaagaaagttttcgaccagtttgactccaacggcgacggcaagatctcagtcctcgaactcggcggtgtgtttaaggctatggggacttcctacacagagacggaactcaaccgcgtgctcgaagaagtcgatacagatcgcgacggttacatcaacctcgacgaattctcaactctctgtcgctcgtcttcctccgccgcagagatccgtgacgctttcgatctctacgatcaggacaaaaacggactgatctccgcctctgagcttcaccaggtgcttaaccgtctcgggatgtcttgctctgttgaagactgtactcgtatgatcggacctgtggatgctgacggcgatgggaatgttaatttcgaagagtttcagaagatgatgacgtcgtcttctctcctcaacagcaatggatccgccgctcctccttcgacctagggagttttccagatttcagatctggatttcgggaataagaataactatggaaattaggtactcttttcttcttaaatgtgatcaatcatcatcagtctaacttcaatcggatctcttttcattcatacatggttgagatttagatctgaatatggatatatatcgtttgctctccttgttcaaaacaaatttggtttctaatttcttattctgcattctcgagttatgtatcagtttcgaactatatttgcatagaaacaaaaaccagattctctgc

SEQ ID NO: 101811 - protein, 184 aa, Arabidopsis thaliana; identical to SEQ ID NO: 30875
  peptide (1)..(184): Ceres Seq. ID no. 13608744
  misc_feature (142)..(170): Pfam Name: EF hand Pfam Description: EF hand
  misc_feature (15)..(184): Homolog of NCBI NO: 15221030 NR Description: calcium-binding protein, putative [Arabidopsis
  misc_feature (15)..(173): Homolog of NCBI NO: 15219514 NR Description: calcium-binding protein, putative [Arabidopsis
  misc_feature (37)..(173): Homolog of NCBI NO: 21618025 NR Description: putative calmodulin [Arabidopsis thaliana]
  misc_feature (6)..(171): Homolog of NCBI NO: 14589311 NR Description: calcium binding protein [Sesbania rostrata]
  misc_feature (15)..(182): Homolog of NCBI NO: 14423648 NR Description: Calcium-binding allergen Ole e 8 (PCA18/PCA23)
  misc_feature (15)..(182): Homolog of NCBI NO: 6901654 NR Description: calcium-binding protein [Olea europaea]
  misc_feature (36)..(174): Homolog of NCBI NO: 13397927 NR Description: putative calmodulin-related protein [Medicago
  misc_feature (32)..(167): Homolog of NCBI NO: 18408502 NR Description: calmodulin-related protein, putative [Arabidopsis
  misc_feature (32)..(167): Homolog of NCBI NO: 21618074 NR Description: calmodulin-related protein [Arabidopsis thaliana]
  misc_feature (37)..(171): Homolog of NCBI NO: 15221781 NR Description: polcalcin (calcium-binding pollen allergen),

SEQ ID NO: 101812 - protein, 170 aa, Arabidopsis thaliana; identical to SEQ ID NO: 30876
  peptide (1)..(170): Ceres Seq. ID no. 13608745
  misc_feature (128)..(156): Pfam Name: EF hand Pfam Description: EF hand
  misc_feature (1)..(170): Homolog of NCBI NO: 15221030 NR Description: calcium-binding protein, putative [Arabidopsis
  misc_feature (1)..(159): Homolog of NCBI NO: 15219514 NR Description: calcium-binding protein, putative [Arabidopsis
  misc_feature (23)..(159): Homolog of NCBI NO: 21618025 NR Description: putative calmodulin [Arabidopsis thaliana]
  misc_feature (1)..(157): Homolog of NCBI NO: 14589311 NR Description: calcium binding protein [Sesbania rostrata]
  misc_feature (1)..(168): Homolog of NCBI NO: 14423648 NR Description: Calcium-binding allergen Ole e 8 (PCA18/PCA23)
  misc_feature (1)..(168): Homolog of NCBI NO: 6901654 NR Description: calcium-binding protein [Olea europaea]
  misc_feature (22)..(160): Homolog of NCBI NO: 13397927 NR Description: putative calmodulin-related protein [Medicago
  misc_feature (18)..(153): Homolog of NCBI NO: 18408502 NR Description: calmodulin-related protein, putative [Arabidopsis
  misc_feature (18)..(153): Homolog of NCBI NO: 21618074 NR Description: calmodulin-related protein [Arabidopsis thaliana]
  misc_feature (23)..(157): Homolog of NCBI NO: 15221781 NR Description: polcalcin (calcium-binding pollen allergen),

SEQ ID NO: 101813 - protein, 153 aa, Arabidopsis thaliana; identical to SEQ ID NO: 30877
  peptide (1)..(153): Ceres Seq. ID no. 13608746
  misc_feature (111)..(139): Pfam Name: EF hand Pfam Description: EF hand
  misc_feature (1)..(153): Homolog of NCBI NO: 15221030 NR Description: calcium-binding protein, putative [Arabidopsis
  misc_feature (1)..(142): Homolog of NCBI NO: 15219514 NR Description: calcium-binding protein, putative [Arabidopsis
  misc_feature (6)..(142): Homolog of NCBI NO: 21618025 NR Description: putative calmodulin [Arabidopsis thaliana]
  misc_feature (1)..(140): Homolog of NCBI NO: 14589311 NR Description: calcium binding protein [Sesbania rostrata]
  misc_feature (1)..(151): Homolog of NCBI NO: 14423648 NR Description: Calcium-binding allergen Ole e 8 (PCA18/PCA23)
  misc_feature (1)..(151): Homolog of NCBI NO: 6901654 NR Description: calcium-binding protein [Olea europaea]
  misc_feature (5)..(143): Homolog of NCBI NO: 13397927 NR Description: putative calmodulin-related protein [Medicago
  misc_feature (1)..(136): Homolog of NCBI NO: 18408502 NR Description: calmodulin-related protein, putative [Arabidopsis
  misc_feature (1)..(136): Homolog of NCBI NO: 21618074 NR Description: calmodulin-related protein [Arabidopsis thaliana]
  misc_feature (6)..(140): Homolog of NCBI NO: 15221781 NR Description: polcalcin (calcium-binding pollen allergen),

SEQ ID NO: 101814 - DNA, 1503 bp, Arabidopsis thaliana
  misc_feature (1)..(1503): Ceres Seq. ID no. 13608747
  misc_feature: MA Experiment ID: 108461 Result: Up-regulated in Transcription
  misc_feature: MA Experiment 108461 PARAMETER Experiment Name: At_Germinating_Seeds_cDNA_P Parameter: Age (day) Value: 1 vs. 0
  misc_feature: MA Experiment 108461 PARAMETER Experiment Name: At_Germinating_Seeds_cDNA_P Parameter: Tissue Value: Germinating Seeds
  misc_feature: MA Experiment ID: 108464 Result: Up-regulated in Transcription
  misc_feature: MA Experiment 108464 PARAMETER Experiment Name: At_Germinating_Seeds_cDNA_P Parameter: Age (day) Value: 4 vs. 0
  misc_feature: MA Experiment 108464 PARAMETER Experiment Name: At_Germinating_Seeds_cDNA_P Parameter: Tissue Value: Germinating Seeds
  misc_feature: MA Experiment ID: 108573 Result: Up-regulated in Transcription
  misc_feature: MA Experiment 108573 PARAMETER Experiment Name: At_Drought_cDNA_P Parameter: Timepoint (hr) Value: 6
  misc_feature: MA Experiment 108573 PARAMETER Experiment Name: At_Drought_cDNA_P Parameter: Tissue Value: Aerial
  misc_feature: MA Experiment 108573 PARAMETER Experiment Name: At_Drought_cDNA_P Parameter: Treatment Value: Drought vs. No Drought
  misc_feature: MA Experiment ID: 108595 Result: Down-regulated in Transcription
  misc_feature: MA Experiment 108595 PARAMETER Experiment Name: At_Ler-pi_Ovule_cDNA_P Parameter: Plant Line Value: null
  misc_feature: MA Experiment ID: 20000069 Result: Up-regulated in Transcription
  misc_feature: MA Experiment 20000069 PARAMETER Experiment Name: At_100uM_ABA_Mutants_cDNA_P Parameter: Plant Line Value: CS23
  misc_feature: MA Experiment 20000069 PARAMETER Experiment Name: At_100uM_ABA_Mutants_cDNA_P Parameter: Timepoint (hr) Value: 6
  misc_feature: MA Experiment 20000069 PARAMETER Experiment Name: At_100uM_ABA_Mutants_cDNA_P Parameter: Tissue Value: Aerial
  misc_feature: MA Experiment 20000069 PARAMETER Experiment Name: At_100uM_ABA_Mutants_cDNA_P Parameter: Treatment Value: 100uM ABA vs. No Treatment
  misc_feature: MA Experiment ID: 20000070 Result: Up-regulated in Transcription
  misc_feature: MA Experiment 20000070 PARAMETER Experiment Name: At_100uM_ABA_Mutants_cDNA_P Parameter: Plant Line Value: CS24
  misc_feature: MA Experiment 20000070 PARAMETER Experiment Name: At_100uM_ABA_Mutants_cDNA_P Parameter: Timepoint (hr) Value: 6
  misc_feature: MA Experiment 20000070 PARAMETER Experiment Name: At_100uM_ABA_Mutants_cDNA_P Parameter: Tissue Value: Aerial
  misc_feature: MA Experiment 20000070 PARAMETER Experiment Name: At_100uM_ABA_Mutants_cDNA_P Parameter: Treatment Value: 100uM ABA vs. No Treatment
  misc_feature: MA Experiment ID: 20000071 Result: Up-regulated in Transcription
  misc_feature: MA Experiment 20000071 PARAMETER Experiment Name: At_100uM_ABA_Mutants_cDNA_P Parameter: Plant Line Value: CS8104
  misc_feature: MA Experiment 20000071 PARAMETER Experiment Name: At_100uM_ABA_Mutants_cDNA_P Parameter: Timepoint (hr) Value: 6
  misc_feature: MA Experiment 20000071 PARAMETER Experiment Name: At_100uM_ABA_Mutants_cDNA_P Parameter: Tissue Value: Aerial
  misc_feature: MA Experiment 20000071 PARAMETER Experiment Name: At_100uM_ABA_Mutants_cDNA_P Parameter: Treatment Value: 100uM ABA vs. No Treatment
  misc_feature: MA Experiment ID: 20000072 Result: Up-regulated in Transcription
  misc_feature: MA Experiment 20000072 PARAMETER Experiment Name: At_100uM_ABA_Mutants_cDNA_P Parameter: Plant Line Value: CS8105
  misc_feature: MA Experiment 20000072 PARAMETER Experiment Name: At_100uM_ABA_Mutants_cDNA_P Parameter: Timepoint (hr) Value: 6
  misc_feature: MA Experiment 20000072 PARAMETER Experiment Name: At_100uM_ABA_Mutants_cDNA_P Parameter: Tissue Value: Aerial
  misc_feature: MA Experiment 20000072 PARAMETER Experiment Name: At_100uM_ABA_Mutants_cDNA_P Parameter: Treatment Value: 100uM ABA vs. No Treatment
  misc_feature: MA Experiment ID: 20000087 Result: Up-regulated in Transcription
  misc_feature: MA Experiment 20000087 PARAMETER Experiment Name: At_100uM_ABA_Mutants_cDNA_P Parameter: Plant Line Value: WS
  misc_feature: MA Experiment 20000087 PARAMETER Experiment Name: At_100uM_ABA_Mutants_cDNA_P Parameter: Timepoint (hr) Value: 6
  misc_feature: MA Experiment 20000087 PARAMETER Experiment Name: At_100uM_ABA_Mutants_cDNA_P Parameter: Tissue Value: Aerial
  misc_feature: MA Experiment 20000087 PARAMETER Experiment Name: At_100uM_ABA_Mutants_cDNA_P Parameter: Treatment Value: 100uM ABA vs. No Treatment
  misc_feature: MA Experiment ID: 20000088 Result: Up-regulated in Transcription
  misc_feature: MA Experiment 20000088 PARAMETER Experiment Name: At_100uM_ABA_Mutants_cDNA_P Parameter: Plant Line Value: Landsberg
  misc_feature: MA Experiment 20000088 PARAMETER Experiment Name: At_100uM_ABA_Mutants_cDNA_P Parameter: Timepoint (hr) Value: 6
  misc_feature: MA Experiment 20000088 PARAMETER Experiment Name: At_100uM_ABA_Mutants_cDNA_P Parameter: Tissue Value: Aerial
  misc_feature: MA Experiment 20000088 PARAMETER Experiment Name: At_100uM_ABA_Mutants_cDNA_P Parameter: Treatment Value: 100uM ABA vs. No Treatment
  misc_feature: MA Experiment ID: 20000111 Result: Down-regulated in Transcription
  misc_feature: MA Experiment 20000111 PARAMETER Experiment Name: At_42deg_Heat_cDNA_P Parameter: Temperature (deg C) Value: 42 vs. 22
  misc_feature: MA Experiment 20000111 PARAMETER Experiment Name: At_42deg_Heat_cDNA_P Parameter: Timepoint (hr) Value: 6
  misc_feature: MA Experiment 20000111 PARAMETER Experiment Name: At_42deg_Heat_cDNA_P Parameter: Tissue Value: Aerial
  misc_feature: MA Experiment ID: 20000112 Result: Down-regulated in Transcription
  misc_feature: MA Experiment 20000112 PARAMETER Experiment Name: At_42deg_Heat_cDNA_P Parameter: Temperature (deg C) Value: 42 vs. 22
  misc_feature: MA Experiment 20000112 PARAMETER Experiment Name: At_42deg_Heat_cDNA_P Parameter: Timepoint (hr) Value: 2
  misc_feature: MA Experiment 20000112 PARAMETER Experiment Name: At_42deg_Heat_cDNA_P Parameter: Tissue Value: Aerial
  misc_feature: MA Experiment ID: 20000117 Result: Up-regulated in Transcription
  misc_feature: MA Experiment 20000117 PARAMETER Experiment Name: At_100uM_ABA_Mutants_cDNA_P Parameter: Plant Line Value: Columbia
  misc_feature: MA Experiment 20000117 PARAMETER Experiment Name: At_100uM_ABA_Mutants_cDNA_P Parameter: Timepoint (hr) Value: 6
  misc_feature: MA Experiment 20000117 PARAMETER Experiment Name: At_100uM_ABA_Mutants_cDNA_P Parameter: Tissue Value: Aerial
  misc_feature: MA Experiment 20000117 PARAMETER Experiment Name: At_100uM_ABA_Mutants_cDNA_P Parameter: Treatment Value: 100uM ABA vs. No Treatment
  misc_feature: MA Experiment ID: 20000144 Result: Down-regulated in Transcription
  misc_feature: MA Experiment 20000144 PARAMETER Experiment Name: At_42deg_Heat_cDNA_P Parameter: Temperature (deg C) Value: 42 vs. 22
  misc_feature: MA Experiment 20000144 PARAMETER Experiment Name: At_42deg_Heat_cDNA_P Parameter: Timepoint (hr) Value: 1
  misc_feature: MA Experiment 20000144 PARAMETER Experiment Name: At_42deg_Heat_cDNA_P Parameter: Tissue Value: Aerial
  misc_feature: MA Experiment ID: 20000265 Result: Down-regulated in Transcription
  misc_feature: MA Experiment 20000265 PARAMETER Experiment Name: At_Open_Flower_P Parameter: Age (day) Value: 21
  misc_feature: MA Experiment 20000265 PARAMETER Experiment Name: At_Open_Flower_P Parameter: Plant Line Value: WS
  misc_feature: MA Experiment 20000265 PARAMETER Experiment Name: At_Open_Flower_P Parameter: Tissue Value: Closed Flower vs. Whole Plant
  misc_feature: MA Experiment ID: 20000794 Result: Down-regulated in Transcription
  misc_feature: MA Experiment 20000794 PARAMETER Experiment Name: At_Petals_P Parameter: Age (day) Value: 23-25 days
  misc_feature: MA Experiment 20000794 PARAMETER Experiment Name: At_Petals_P Parameter: Plant Line Value: WS
  misc_feature: MA Experiment 20000794 PARAMETER Experiment Name: At_Petals_P Parameter: Tissue Value: Petals vs. Whole plant
  misc_feature: MA Experiment ID: 20001247 Result: Up-regulated in Transcription
  misc_feature: MA Experiment 20001247 PARAMETER Experiment Name: At_Far-red-induction_P Parameter: Age (day) Value: 7
  misc_feature: MA Experiment 20001247 PARAMETER Experiment Name: At_Far-red-induction_P Parameter: Light Value: Far-red vs. White
  misc_feature: MA Experiment 20001247 PARAMETER Experiment Name: At_Far-red-induction_P Parameter: Organism Value: A. thaliana
  misc_feature: MA Experiment 20001247 PARAMETER Experiment Name: At_Far-red-induction_P Parameter: Plant Line Value: Columbia
  misc_feature: MA Experiment 20001247 PARAMETER Experiment Name: At_Far-red-induction_P Parameter: Timepoint (hr) Value: 1
  misc_feature: MA Experiment 20001247 PARAMETER Experiment Name: At_Far-red-induction_P Parameter: Tissue Value: Whole Plant
  misc_feature: MA Experiment ID: 20001557 Result: Down-regulated in Transcription
  misc_feature: MA Experiment 20001557 PARAMETER Experiment Name: At_Drought_Soil_Dry_P Parameter: Age (day) Value: 27
  misc_feature: MA Experiment 20001557 PARAMETER Experiment Name: At_Drought_Soil_Dry_P Parameter: Organism Value: A. thaliana
  misc_feature: MA Experiment 20001557 PARAMETER Experiment Name: At_Drought_Soil_Dry_P Parameter: Plant Line Value: WS
  misc_feature: MA Experiment 20001557 PARAMETER Experiment Name: At_Drought_Soil_Dry_P Parameter: Post Timepoint (hr) Value: 3
  misc_feature: MA Experiment 20001557 PARAMETER Experiment Name: At_Drought_Soil_Dry_P Parameter: Post-Treatment Value: Re-Water vs. No Drought
  misc_feature: MA Experiment 20001557 PARAMETER Experiment Name: At_Drought_Soil_Dry_P Parameter: Timepoint (day) Value: 13
  misc_feature: MA Experiment 20001557 PARAMETER Experiment Name: At_Drought_Soil_Dry_P Parameter: Treatment Value: Drought vs. No Drought
  misc_feature: MA Experiment ID: 20001559 Result: Down-regulated in Transcription
  misc_feature: MA Experiment 20001559 PARAMETER Experiment Name: At_Drought_Soil_Dry_P Parameter: Age (day) Value: 28
  misc_feature: MA Experiment 20001559 PARAMETER Experiment Name: At_Drought_Soil_Dry_P Parameter: Organism Value: A. thaliana
  misc_feature: MA Experiment 20001559 PARAMETER Experiment Name: At_Drought_Soil_Dry_P Parameter: Plant Line Value: WS
  misc_feature: MA Experiment 20001559 PARAMETER Experiment Name: At_Drought_Soil_Dry_P Parameter: Post Timepoint (hr) Value: 29
  misc_feature: MA Experiment 20001559 PARAMETER Experiment Name: At_Drought_Soil_Dry_P Parameter: Post-Treatment Value: Re-Water vs. No Drought
  misc_feature: MA Experiment 20001559 PARAMETER Experiment Name: At_Drought_Soil_Dry_P Parameter: Timepoint (day) Value: 14
  misc_feature: MA Experiment 20001559 PARAMETER Experiment Name: At_Drought_Soil_Dry_P Parameter: Treatment Value: Drought vs. No Drought
  misc_feature: MA Experiment ID: 20001905 Result: Down-regulated in Transcription
  misc_feature: MA Experiment 20001905 PARAMETER Experiment Name: At_Drought_Reproduction_P Parameter: Age (day) Value: 40
  misc_feature: MA Experiment 20001905 PARAMETER Experiment Name: At_Drought_Reproduction_P Parameter: Organism Value: A. thaliana
  misc_feature: MA Experiment 20001905 PARAMETER Experiment Name: At_Drought_Reproduction_P Parameter: Plant Line Value: WS
  misc_feature: MA Experiment 20001905 PARAMETER Experiment Name: At_Drought_Reproduction_P Parameter: Timepoint (day) Value: 10
  misc_feature: MA Experiment 20001905 PARAMETER Experiment Name: At_Drought_Reproduction_P Parameter: Tissue Value: Rosettes
  misc_feature: MA Experiment 20001905 PARAMETER Experiment Name: At_Drought_Reproduction_P Parameter: Treatment Value: Drought vs. No Drought
attatacaaaaactgtatcatcatcatcatcaagcttgaaatcactctctttcatccttccccgcgcactgtgtctcgctctctctctcccacatttccattatctcctttactttctttctttgagaatgtcttctacaacaatcggcgagcacatcagactccgacgagctagaaaccaaacaatccgtcatctccacgccgccgacgatgatccgccgctaagccacgtcgttcttccgatttcacaacctaatcgcttctgtaactccgcaatgtcttccttctttcccctcccgacttcctcctccaacgaaagcacgaggaagaaaccgtaccaaacgtcgtcgtttcgagggatgggttgctatgccgcagcagcagcagcagctcaagaggtttctgttccctccgtcattcgctactccgcggatttggatgccagaattagaaaagataagaagaagaagaagcataagcataagaaaaagaaaaagaagaataaaggaagctacgaagatggttcgattaggattttaagcgaagaagctagagacgttattgatgtttggtgcagacctggattaggcttctccacggatgctgtaattggtcgatcggttgatcctcctcggggaaggaatattccgtcgtctcgtcgcaaaattgatgtggataacaacaattataatcacacactgggttcttctgttcttcccattcggtttctcaatcaagaaactcattctcatgatatcttcaactctgattctacttttgtgacatcatcacgcgctgaaccaacgatgttgtcaagtagatgtcgtggccatcttccacgctcttaccctgatgatcttaccgagatgaggatgctccagaatggttttgtaatgggaagaataacagattcccgtgataactaccacgaattgaggctcgatgttgatagcatgtcatacgagcaacttcttgagcttggtgatagaattggttatgtgaatactggactaaaagaaagcgagatacatcgttgtcttgggaaaatcaaaccatccgtatcacatactcttgttgatagaaaatgtagcatctgtcaggatgagtatgagagagaggatgaggttggggaattgaactgtggacacagctttcatgtccattgcgtgaaacaatggctttcgaggaagaatgcttgtccggtctgtaagaaggcagcatatggcaagccttaaaagacttttgtatctcgtcgggtttctgatagctcaagatctttcaagccaccttgctgtatagagatctgtatcatctgatacttgattcatatttgttgtttttgcatttagcaatcacaattttttttttttaagatcttatattctttgttgggtctatttatgtgattgaaatcaagagtttgaaatctatgttttctgttgcctaggtagatttaagacaggtagagagtaatttagcatatagcatacacgcacgtaacta

SEQ ID NO: 101815 - protein, 410 aa, Arabidopsis thaliana; identical to SEQ ID NO: 36979
  peptide (1)..(410): Ceres Seq. ID no. 13608748
  misc_feature (362)..(402): Pfam Name: Zinc finger, C3HC4 type (RING finger) Pfam Description: Zinc finger, C3HC4 type (RING finger)
  misc_feature (43)..(410): Homolog of NCBI NO: 15220912 NR Description: zinc-finger protein (C-terminal) -related thaliana] >gi|16226279|gb|AAL16122.1|AF428290_1 [Arabidopsis thaliana] >gi|21436039|gb|AAM51597.1|
  misc_feature (43)..(410): Homolog of NCBI NO: 21554695 NR Description: zinc-finger protein (C-terminal), putative
  misc_feature (43)..(410): Homolog of NCBI NO: 25511721 NR Description: F2H15.19 protein - Arabidopsis thaliana
  misc_feature (44)..(409): Homolog of NCBI NO: 15219544 NR Description: RING zinc finger protein -related [Arabidopsis
  misc_feature (93)..(348): Homolog of NCBI NO: 34911396 NR Description: RING zinc finger protein-like [Oryza sativa
  misc_feature (366)..(405): Homolog of NCBI NO: 34911396 NR Description: RING zinc finger protein-like [Oryza sativa
  misc_feature (284)..(407): Homolog of NCBI NO: 15221230 NR Description: zinc finger protein -related [Arabidopsis
  misc_feature (306)..(406): Homolog of NCBI NO: 38344153 NR Description: OSJNBa0041A02.20 [Oryza sativa (japonica
  misc_feature (225)..(403): Homolog of NCBI NO: 15220067 NR Description: zinc finger (C3HC4-type RING finger) protein [Arabidopsis thaliana] >gi|7767667|gb|AAF69164.1|AC007915_16
  misc_feature (306)..(406): Homolog of NCBI NO: 30687050 NR Description: zinc finger (C3HC4-type RING finger) protein

SEQ ID NO: 101816 - protein, 368 aa, Arabidopsis thaliana; identical to SEQ ID NO: 36980
  peptide (1)..(368): Ceres Seq. ID no. 13608749
  misc_feature (320)..(360): Pfam Name: Zinc finger, C3HC4 type (RING finger) Pfam Description: Zinc finger, C3HC4 type (RING finger)
  misc_feature (1)..(368): Homolog of NCBI NO: 15220912 NR Description: zinc-finger protein (C-terminal) -related thaliana] >gi|16226279|gb|AAL16122.1|AF428290_1 [Arabidopsis thaliana] >gi|21436039|gb|AAM51597.1|
  misc_feature (1)..(368): Homolog of NCBI NO: 21554695 NR Description: zinc-finger protein (C-terminal), putative
  misc_feature (1)..(368): Homolog of NCBI NO: 25511721 NR Description: F2H15.19 protein - Arabidopsis thaliana
  misc_feature (2)..(367): Homolog of NCBI NO: 15219544 NR Description: RING zinc finger protein -related [Arabidopsis
  misc_feature (51)..(306): Homolog of NCBI NO: 34911396 NR Description: RING zinc finger protein-like [Oryza sativa
  misc_feature (324)..(363): Homolog of NCBI NO: 34911396 NR Description: RING zinc finger protein-like [Oryza sativa
  misc_feature (242)..(365): Homolog of NCBI NO: 15221230 NR Description: zinc finger protein -related [Arabidopsis
  misc_feature (264)..(364): Homolog of NCBI NO: 38344153 NR Description: OSJNBa0041A02.20 [Oryza sativa (japonica
  misc_feature (183)..(361): Homolog of NCBI NO: 15220067 NR Description: zinc finger (C3HC4-type RING finger) protein [Arabidopsis thaliana] >gi|7767667|gb|AAF69164.1|AC007915_16
  misc_feature (264)..(364): Homolog of NCBI NO: 30687050 NR Description: zinc finger (C3HC4-type RING finger) protein

SEQ ID NO: 101817 - protein, 319 aa, Arabidopsis thaliana; identical to SEQ ID NO: 36981
  peptide (1)..(319): Ceres Seq. ID no. 13608750
  misc_feature (271)..(311): Pfam Name: Zinc finger, C3HC4 type (RING finger) Pfam Description: Zinc finger, C3HC4 type (RING finger)
  misc_feature (1)..(319): Homolog of NCBI NO: 15220912 NR Description: zinc-finger protein (C-terminal) -related thaliana] >gi|16226279|gb|AAL16122.1|AF428290_1 [Arabidopsis thaliana] >gi|21436039|gb|AAM51597.1|
  misc_feature (1)..(319): Homolog of NCBI NO: 21554695 NR Description: zinc-finger protein (C-terminal), putative
  misc_feature (1)..(319): Homolog of NCBI NO: 25511721 NR Description: F2H15.19 protein - Arabidopsis thaliana
  misc_feature (1)..(318): Homolog of NCBI NO: 15219544 NR Description: RING zinc finger protein -related [Arabidopsis
  misc_feature (2)..(257): Homolog of NCBI NO: 34911396 NR Description: RING zinc finger protein-like [Oryza sativa
  misc_feature (275)..(314): Homolog of NCBI NO: 34911396 NR Description: RING zinc finger protein-like [Oryza sativa
  misc_feature (193)..(316): Homolog of NCBI NO: 15221230 NR Description: zinc finger protein -related [Arabidopsis
  misc_feature (215)..(315): Homolog of NCBI NO: 38344153 NR Description: OSJNBa0041A02.20 [Oryza sativa (japonica
  misc_feature (134)..(312): Homolog of NCBI NO: 15220067 NR Description: zinc finger (C3HC4-type RING finger) protein [Arabidopsis thaliana] >gi|7767667|gb|AAF69164.1|AC007915_16
  misc_feature (215)..(315): Homolog of NCBI NO: 30687050 NR Description: zinc finger (C3HC4-type RING finger) protein

SEQ ID NO: 101818 - DNA, 1587 bp, Arabidopsis thaliana
  misc_feature (1)..(1587): Ceres Seq. ID no. 13608763
  misc_feature: MA Experiment ID: 20000185 Result: Up-regulated in Transcription
  misc_feature: MA Experiment 20000185 PARAMETER Experiment Name: At_Roots__P Parameter: Age (day) Value: 7 vs. 21
  misc_feature: MA Experiment 20000185 PARAMETER Experiment Name: At_Roots__P Parameter: Organism Value: A. thaliana
  misc_feature: MA Experiment 20000185 PARAMETER Experiment Name: At_Roots__P Parameter: Tissue Value: Roots vs. Whole Plant
  misc_feature: MA Experiment ID: 20000227 Result: Down-regulated in Transcription
  misc_feature: MA Experiment 20000227 PARAMETER Experiment Name: At_Root-Tips-vs-Tops_P Parameter: Tissue Value: Root Tips vs. Root Tops
  misc_feature: MA Experiment ID: 20000439 Result: Up-regulated in Transcription
  misc_feature: MA Experiment 20000439 PARAMETER Experiment Name: At_Roots__P Parameter: Age (day) Value: 14 vs. 21
  misc_feature: MA Experiment 20000439 PARAMETER Experiment Name: At_Roots__P Parameter: Organism Value: A. thaliana
  misc_feature: MA Experiment 20000439 PARAMETER Experiment Name: At_Roots__P Parameter: Tissue Value: Roots vs. Whole Plant
  misc_feature: MA Experiment ID: 20000496 Result: Up-regulated in Transcription
  misc_feature: MA Experiment 20000496 PARAMETER Experiment Name: At_Guard_Cells_P Parameter: Harvest Date Value: 7/19/2002
  misc_feature: MA Experiment 20000496 PARAMETER Experiment Name: At_Guard_Cells_P Parameter: Organism Value: Canola
  misc_feature: MA Experiment 20000496 PARAMETER Experiment Name: At_Guard_Cells_P Parameter: Tissue Value: Guard Cells vs. Leaves
  misc_feature: MA Experiment ID: 20000527 Result: Down-regulated in Transcription
  misc_feature: MA Experiment 20000527 PARAMETER Experiment Name: At_10percent_PEG_P Parameter: Age (day) Value: 20
  misc_feature: MA Experiment 20000527 PARAMETER Experiment Name: At_10percent_PEG_P Parameter: Organism Value: A. thaliana
  misc_feature: MA Experiment 20000527 PARAMETER Experiment Name: At_10percent_PEG_P Parameter: Plant Line Value: WS
  misc_feature: MA Experiment 20000527 PARAMETER Experiment Name: At_10percent_PEG_P Parameter: Timepoint (day) Value: 20
  misc_feature: MA Experiment 20000527 PARAMETER Experiment Name: At_10percent_PEG_P Parameter: Tissue Value: Whole Plant
  misc_feature: MA Experiment 20000527 PARAMETER Experiment Name: At_10percent_PEG_P Parameter: Treatment Value: 10percent PEG vs. No Treatment
  misc_feature: MA Experiment ID: 20000794 Result: Down-regulated in Transcription
  misc_feature: MA Experiment 20000794 PARAMETER Experiment Name: At_Petals_P Parameter: Age (day) Value: 23-25 days
  misc_feature: MA Experiment 20000794 PARAMETER Experiment Name: At_Petals_P Parameter: Plant Line Value: WS
  misc_feature: MA Experiment 20000794 PARAMETER Experiment Name: At_Petals_P Parameter: Tissue Value: Petals vs. Whole plant
atggagaaggacgatttcttgaggagtggtcatggaagagaagaaagccatgatgagatgagaaaacttgattcatctcacgatgattctcatcaagaacacgaccatattataagatccaagttggactcaactaaagtcgaaatggatgaggctaaagaggaaaatcgaagactaaagtcatcattgagtaaaatcaagaaagattttgacatccttcaaacacaatacaaccaattaatggccaaacataacgaaccaaccaagttccaatcaaaagggcatcatcaagacaaaggcgaagatgaagacagagaaaaagttaacgaacgtgaagaacttgtctcgttgagcctaggcagacggttaaattcagaggttccaagtggttcgaataaagaagaaaaaaataaagatgttgaagaagcggaaggtgacagaaattatgatgataatgaaaaaagcagtattcaagggttgagtatggggattgaatacaaggctttgagtaatcctaatgagaagttagagattgatcataatcaagaaaccatgtcgttggagattagtaacaataataagatcagatcacaaaatagttttgggtttaagaatgatggagatgatcatgaagatgaagatgagattttgcctcaaaaccttgttaagaaaactagggtttcggtgagatcaagatgtgagacaccaacgatgaacgacggatgtcaatggaggaaatatggccagaaaatagctaaaggcaatccatgtccccgagcttactatcgttgcaccattgcagcttcttgtccagtaagaaaacaggtgcaaagatgttcagaagatatgtctatacttatctcaacgtacgaaggaacacataaccatccacttcccatgtcagcaactgccatggcctctgccacttccgctgccgcctccatgcttctctccggcgcctcctcctcctcatccgccgcagctgatcttcatggccttaacttctctctttccggcaacaacatcactccaaaacctaaaactcatttcctccaatccccttcttcttctggccatccgaccgtcactctcgacctcacaacctcctcctcgtcgcagcaaccgttcttatcaatgctcaatagattcagctctcctccaagtaatgtctcacgatctaatagttatccttcaaccaatctcaacttttcaaacaacaccaacacattgatgaattggggtggtggtggtaatcccagtgatcaataccgtgcagcttacggcaacattaacacccatcagcaatcaccttaccacaaaatcattcaaacccgaaccgccgggtcatctttcgatccgtttggaagatcatcttcatcacattctccacaaataaatcttgatcatatcggaatcaagaacatcatcagtcaccaagtgccatctttaccggctgaaacaatcaaggcaatcacgacagatccaagtttccaatcggctttggcgacagctctatcttccatcatgggcggcgatttaaagattgatcacaatgtgactagaaatgaagctgagaagagcccttaa

SEQ ID NO: 101819 - protein, 528 aa, Arabidopsis thaliana
  peptide (1)..(528): Ceres Seq. ID no. 13608764
  misc_feature (238)..(298): Pfam Name: WRKY DNA -binding domain Pfam Description: WRKY DNA -binding domain
  misc_feature (49)..(528): Homolog of NCBI NO: 30686070 NR Description: WRKY family transcription factor [Arabidopsis >gi|20978774|sp|Q8VWV6|WR61_ARATH Probable WRKY transcription
  misc_feature (49)..(528): Homolog of NCBI NO: 25518561 NR Description: hypothetical protein F6A14.5 - Arabidopsis >gi|6730700|gb|AAF27095.1|AC011809_4 Hypothetical protein
  misc_feature (27)..(441): Homolog of NCBI NO: 15242221 NR Description: WRKY family transcription factor [Arabidopsis >gi|29839650|sp|Q9LXG8|WR72_ARATH Probable WRKY transcription
  misc_feature (204)..(426): Homolog of NCBI NO: 15234284 NR Description: WRKY family transcription factor [Arabidopsis >gi|20978798|sp|Q9ZSI7|WR47_ARATH Probable WRKY transcription
  misc_feature (12)..(176): Homolog of NCBI NO: 15234284 NR Description: WRKY family transcription factor [Arabidopsis >gi|20978798|sp|Q9ZSI7|WR47_ARATH Probable WRKY transcription
  misc_feature (215)..(464): Homolog of NCBI NO: 30013667 NR Description: Avr9/Cf-9 rapidly elicited protein 126 [Nicotiana
  misc_feature (24)..(381): Homolog of NCBI NO: 18415833 NR Description: WRKY family transcription factor [Arabidopsis >gi|20978775|sp|Q93WT0|WR31_ARATH Probable WRKY transcription
  misc_feature (238)..(426): Homolog of NCBI NO: 7488096 NR Description: probable DNA-binding protein T15B16.12 -
  misc_feature (12)..(100): Homolog of NCBI NO: 7488096 NR Description: probable DNA-binding protein T15B16.12 -
  misc_feature (43)..(395): Homolog of NCBI NO: 15233516 NR Description: WRKY family transcription factor [Arabidopsis >gi|20978795|sp|Q9XEC3|WR42_ARATH Probable WRKY transcription
MEKDDFLRSGHGREESHDEMRKLDSSHDDSHQEHDHIIRSKLDSTKVEMDEAKEENRRLKSSLSKIKKDFDILQTQYNQLMAKHNEPTKFQSKGHHQDKGEDEDREKVNEREELVSLSLGRRLNSEVPSGSNKEEKNKDVEEAEGDRNYDDNEKSSIQGLSMGIEYKALSNPNEKLEIDHNQETMSLEISNNNKIRSQNSFGFKNDGDDHEDEDEILPQNLVKKTRVSVRSRCETPTMNDGCQWRKYGQKIAKGNPCPRAYYRCTIAASCPVRKQVQRCSEDMSILISTYEGTHNHPLPMSATAMASATSAAASMLLSGASSSSSAAADLHGLNFSLSGNNITPKPKTHFLQSPSSSGHPTVTLDLTTSSSSQQPFLSMLNRFSSPPSNVSRSNSYPSTNLNFSNNTNTLMNWGGGGNPSDQYRAAYGNINTHQQSPYHKIIQTRTAGSSFDPFGRSSSSHSPQINLDHIGIKNIISHQVPSLPAETIKAITTDPSFQSALATALSSIMGGDLKIDHNVTRNEAEKSP

SEQ ID NO: 101820 - protein, 509 aa, Arabidopsis thaliana
  peptide (1)..(509): Ceres Seq. ID no. 13608765
  misc_feature (219)..(279): Pfam Name: WRKY DNA -binding domain Pfam Description: WRKY DNA -binding domain
  misc_feature (30)..(509): Homolog of NCBI NO: 30686070 NR Description: WRKY family transcription factor [Arabidopsis >gi|20978774|sp|Q8VWV6|WR61_ARATH Probable WRKY transcription
  misc_feature (30)..(509): Homolog of NCBI NO: 25518561 NR Description: hypothetical protein F6A14.5 - Arabidopsis >gi|6730700|gb|AAF27095.1|AC011809_4 Hypothetical protein
  misc_feature (8)..(422): Homolog of NCBI NO: 15242221 NR Description: WRKY family transcription factor [Arabidopsis >gi|29839650|sp|Q9LXG8|WR72_ARATH Probable WRKY transcription
  misc_feature (185)..(407): Homolog of NCBI NO: 15234284 NR Description: WRKY family transcription factor [Arabidopsis >gi|20978798|sp|Q9ZSI7|WR47_ARATH Probable WRKY transcription
  misc_feature (1)..(157): Homolog of NCBI NO: 15234284 NR Description: WRKY family transcription factor [Arabidopsis >gi|20978798|sp|Q9ZSI7|WR47_ARATH Probable WRKY transcription
  misc_feature (196)..(445): Homolog of NCBI NO: 30013667 NR Description: Avr9/Cf-9 rapidly elicited protein 126 [Nicotiana
  misc_feature (5)..(362): Homolog of NCBI NO: 18415833 NR Description: WRKY family transcription factor [Arabidopsis >gi|20978775|sp|Q93WT0|WR31_ARATH Probable WRKY transcription
  misc_feature (219)..(407): Homolog of NCBI NO: 7488096 NR Description: probable DNA-binding protein T15B16.12 -
  misc_feature (1)..(81): Homolog of NCBI NO: 7488096 NR Description: probable DNA-binding protein T15B16.12 -
  misc_feature (24)..(376): Homolog of NCBI NO: 15233516 NR Description: WRKY family transcription factor [Arabidopsis >gi|20978795|sp|Q9XEC3|WR42_ARATH Probable WRKY transcription
MRKLDSSHDDSHQEHDHIIRSKLDSTKVEMDEAKEENRRLKSSLSKIKKDFDILQTQYNQLMAKHNEPTKFQSKGHHQDKGEDEDREKVNEREELVSLSLGRRLNSEVPSGSNKEEKNKDVEEAEGDRNYDDNEKSSIQGLSMGIEYKALSNPNEKLEIDHNQETMSLEISNNNKIRSQNSFGFKNDGDDHEDEDEILPQNLVKKTRVSVRSRCETPTMNDGCQWRKYGQKIAKGNPCPRAYYRCTIAASCPVRKQVQRCSEDMSILISTYEGTHNHPLPMSATAMASATSAAASMLLSGASSSSSAAADLHGLNFSLSGNNITPKPKTHFLQSPSSSGHPTVTLDLTTSSSSQQPFLSMLNRFSSPPSNVSRSNSYPSTNLNFSNNTNTLMNWGGGGNPSDQYRAAYGNINTHQQSPYHKIIQTRTAGSSFDPFGRSSSSHSPQINLDHIGIKNIISHQVPSLPAETIKAITTDPSFQSALATALSSIMGGDLKIDHNVTRNEAEKSP

SEQ ID NO: 101821 - protein, 480 aa, Arabidopsis thaliana
  peptide (1)..(480): Ceres Seq. ID no. 13608766
  misc_feature (190)..(250): Pfam Name: WRKY DNA -binding domain Pfam Description: WRKY DNA -binding domain
  misc_feature (1)..(480): Homolog of NCBI NO: 30686070 NR Description: WRKY family transcription factor [Arabidopsis >gi|20978774|sp|Q8VWV6|WR61_ARATH Probable WRKY transcription
  misc_feature (1)..(480): Homolog of NCBI NO: 25518561 NR Description: hypothetical protein F6A14.5 - Arabidopsis >gi|6730700|gb|AAF27095.1|AC011809_4 Hypothetical protein
  misc_feature (1)..(393): Homolog of NCBI NO: 15242221 NR Description: WRKY family transcription factor [Arabidopsis >gi|29839650|sp|Q9LXG8|WR72_ARATH Probable WRKY transcription
  misc_feature (156)..(378): Homolog of NCBI NO: 15234284 NR Description: WRKY family transcription factor [Arabidopsis >gi|20978798|sp|Q9ZSI7|WR47_ARATH Probable WRKY transcription
  misc_feature (1)..(128): Homolog of NCBI NO: 15234284 NR Description: WRKY family transcription factor [Arabidopsis >gi|20978798|sp|Q9ZSI7|WR47_ARATH Probable WRKY transcription
  misc_feature (167)..(416): Homolog of NCBI NO: 30013667 NR Description: Avr9/Cf-9 rapidly elicited protein 126 [Nicotiana
  misc_feature (1)..(333): Homolog of NCBI NO: 18415833 NR Description: WRKY family transcription factor [Arabidopsis >gi|20978775|sp|Q93WT0|WR31_ARATH Probable WRKY transcription
  misc_feature (190)..(378): Homolog of NCBI NO: 7488096 NR Description: probable DNA-binding protein T15B16.12 -
  misc_feature (1)..(52): Homolog of NCBI NO: 7488096 NR Description: probable DNA-binding protein T15B16.12 -
  misc_feature (1)..(347): Homolog of NCBI NO: 15233516 NR Description: WRKY family transcription factor [Arabidopsis >gi|20978795|sp|Q9XEC3|WR42_ARATH Probable WRKY transcription
MDEAKEENRRLKSSLSKIKKDFDILQTQYNQLMAKHNEPTKFQSKGHHQDKGEDEDREKVNEREELVSLSLGRRLNSEVPSGSNKEEKNKDVEEAEGDRNYDDNEKSSIQGLSMGIEYKALSNPNEKLEIDHNQETMSLEISNNNKIRSQNSFGFKNDGDDHEDEDEILPQNLVKKTRVSVRSRCETPTMNDGCQWRKYGQKIAKGNPCPRAYYRCTIAASCPVRKQVQRCSEDMSILISTYEGTHNHPLPMSATAMASATSAAASMLLSGASSSSSAAADLHGLNFSLSGNNITPKPKTHFLQSPSSSGHPTVTLDLTTSSSSQQPFLSMLNRFSSPPSNVSRSNSYPSTNLNFSNNTNTLMNWGGGGNPSDQYRAAYGNINTHQQSPYHKIIQTRTAGSSFDPFGRSSSSHSPQINLDHIGIKNIISHQVPSLPAETIKAITTDPSFQSALATALSSIMGGDLKIDHNVTRNEAEKSP

SEQ ID NO: 101822 - DNA, 1868 bp, Arabidopsis thaliana
  misc_feature (1)..(1868): Ceres Seq. ID no. 13608767
  misc_feature: MA Experiment ID: 20000264 Result: Down-regulated in Transcription
  misc_feature: MA Experiment 20000264 PARAMETER Experiment Name: At_Open_Flower_P Parameter: Age (day) Value: 21
  misc_feature: MA Experiment 20000264 PARAMETER Experiment Name: At_Open_Flower_P Parameter: Plant Line Value: WS
  misc_feature: MA Experiment 20000264 PARAMETER Experiment Name: At_Open_Flower_P Parameter: Tissue Value: Open Flower vs. Whole Plant
  misc_feature: MA Experiment ID: 20000265 Result: Down-regulated in Transcription
  misc_feature: MA Experiment 20000265 PARAMETER Experiment Name: At_Open_Flower_P Parameter: Age (day) Value: 21
  misc_feature: MA Experiment 20000265 PARAMETER Experiment Name: At_Open_Flower_P Parameter: Plant Line Value: WS
  misc_feature: MA Experiment 20000265 PARAMETER Experiment Name: At_Open_Flower_P Parameter: Tissue Value: Closed Flower vs. Whole Plant
  misc_feature: MA Experiment ID: 20000286 Result: Down-regulated in Transcription
  misc_feature: MA Experiment 20000286 PARAMETER Experiment Name: At_Open_Flower_P Parameter: Age (day) Value: 21
  misc_feature: MA Experiment 20000286 PARAMETER Experiment Name: At_Open_Flower_P Parameter: Plant Line Value: WS
  misc_feature: MA Experiment 20000286 PARAMETER Experiment Name: At_Open_Flower_P Parameter: Tissue Value: Half Open vs. Whole Plant
atgggtaactgtaacgcctgtgtaaggccagactcaaaagaatcaaaaccatcttcaaagccgaaaaaacccaatcgagatcggaaattaaacccattcgccggagatttcaccagatccccagctccaatacgtgttctcaaagatgtaatccctatgagcaatcaaactcagatcagcgacaaatacatcttaggtcgtgaattaggtcgaggcgaattcggaatcacttacctctgtactgatcgtgaaacccacgaagctttagcttgcaaatcgatttcaaagcgaaagcttcgaacagctgtcgatatcgaagacgttcgtcgtgaggtagcgattatgtctactttacctgagcatccaaacgtagttaagcttaaggctagttatgaggataacgagaacgtgcatctggttatggagctttgtgaaggaggtgagctttttgatcggattgttgctagaggacattacacggagcgtgctgctgcagctgttgcgagaacgattgctgaggttgtgatgatgtgtcactctaatggagttatgcatcgagatttgaaacctgagaatttcttgtttgctaataaaaaggagaattctccactaaaggctattgattttggcttgtctgtgttcttcaaacctggagataagtttacagagattgtaggaagtccgtattatatggctccagaagtgttgaagagagattatggaccaggggttgatgtgtggagtgccggagttattatctatatcttgctctgtggtgttcctccgttttgggctgagactgaacaaggtgttgctcttgcgatcttgcggggagttcttgattttaagagagacccttggcctcagatatcagagagtgccaagagccttgtgaagcagatgttggatcctgatccgactaagcggttaactgctcagcaagtgttagctcacccatggatacagaatgcaaagaaagctcccaatgttcctttaggagatatagtcagatctaggttgaagcagttctctatgatgaacagattcaaaaagaaagttcttcgtgtaattgcggagcacttgtctattcaagaggttgaagtgataaagaacatgttctcactgatggatgatgacaaggatggtaaaataacttacccggaactcaaagctgggcttcagaaggtcggttcacaacttggtgaaccagagatcaaaatgttgatggaagtggcggatgtcgatggaaatgggtttctggattatggagagtttgtagctgtgataattcacttgcagaagatagagaatgatgaacttttcaaactagcttttatgtttttcgacaaagatggaagtacatacattgaacttgatgagctacgggaagctttagcggatgagttaggcgagccagacgccagtgttctaagcgacatcatgcgtgaagttgacactgacaaggacggacgtataaactatgatgagtttgtgacgatgatgaaagctggaactgactggagaaaggcatcgagacaatattcaagagagaggttcaaaagcttaagcattaacttgatgaaagatgggtcattgcatctccatgacgctctcactggacaaactgttcctgtttaaatttattcgttatcaccaaaaacagagcaatgctccgttttttccccatttcataaattgggaattttccgggcttgttctttgagggatgggaattttacggaagctatggttctttacatatataaacattttacattgtattttgtatgtaatgttttgttcaaaggttgtatttttattgtctcaaagcccctaaaccaaagagtcaaaggaaagatctttattac

SEQ ID NO: 101823 - protein, 545 aa, Arabidopsis thaliana
  peptide (1)..(545): Ceres Seq. ID no. 13608768
  misc_feature (63)..(321): Pfam Name: Protein kinase domain Pfam Description: Protein kinase domain
  misc_feature (1)..(545): Homolog of NCBI NO: 25287677 NR Description: calcium-dependent protein kinase 1 [imported] -
  misc_feature (1)..(545): Homolog of NCBI NO: 28416563 NR Description: At1g18890 [Arabidopsis thaliana]
  misc_feature (53)..(545): Homolog of NCBI NO: 18394667 NR Description: calcium-dependent protein kinase (CDPK1)
  misc_feature (53)..(545): Homolog of NCBI NO: 1084334 NR Description: calcium-dependent protein kinase (EC 2.7.1.-) 1 -
  misc_feature (1)..(545): Homolog of NCBI NO: 30699042 NR Description: calcium-dependent protein kinase, putative (CDPK)
  misc_feature (1)..(534): Homolog of NCBI NO: 22331739 NR Description: calcium-dependent protein kinase, putative (CDPK)
  misc_feature (1)..(534): Homolog of NCBI NO: 17064926 NR Description: calcium-dependent protein kinase [Arabidopsis
  misc_feature (1)..(534): Homolog of NCBI NO: 18416872 NR Description: calcium-dependent protein kinase 7 (CDPK)(CPK7)
  misc_feature (19)..(533): Homolog of NCBI NO: 14484895 NR Description: calcium-dependent protein kinase [Funaria
  misc_feature (1)..(535): Homolog of NCBI NO: 30694663 NR Description: calcium-dependent protein kinase, putative (CDPK)
MGNCNACVRPDSKESKPSSKPKKPNRDRKLNPFAGDFTRSPAPIRVLKDVIPMSNQTQISDKYILGRELGRGEFGITYLCTDRETHEALACKSISKRKLRTAVDIEDVRREVAIMSTLPEHPNVVKLKASYEDNENVHLVMELCEGGELFDRIVARGHYTERAAAAVARTIAEVVMMCHSNGVMHRDLKPENFLFANKKENSPLKAIDFGLSVFFKPGDKFTEIVGSPYYMAPEVLKRDYGPGVDVWSAGVIIYILLCGVPPFWAETEQGVALAILRGVLDFKRDPWPQISESAKSLVKQMLDPDPTKRLTAQQVLAHPWIQNAKKAPNVPLGDIVRSRLKQFSMMNRFKKKVLRVIAEHLSIQEVEVIKNMFSLMDDDKDGKITYPELKAGLQKVGSQLGEPEIKMLMEVADVDGNGFLDYGEFVAVIIHLQKIENDELFKLAFMFFDKDGSTYIELDELREALADELGEPDASVLSDIMREVDTDKDGRINYDEFVTMMKAGTDWRKASRQYSRERFKSLSINLMKDGSLHLHDALTGQTVPV

SEQ ID NO: 101824 - protein, 493 aa, Arabidopsis thaliana
  peptide (1)..(493): Ceres Seq. ID no. 13608769
  misc_feature (11)..(269): Pfam Name: Protein kinase domain Pfam Description: Protein kinase domain
  misc_feature (1)..(493): Homolog of NCBI NO: 25287677 NR Description: calcium-dependent protein kinase 1 [imported] -
  misc_feature (1)..(493): Homolog of NCBI NO: 28416563 NR Description: At1g18890 [Arabidopsis thaliana]
  misc_feature (1)..(493): Homolog of NCBI NO: 18394667 NR Description: calcium-dependent protein kinase (CDPK1)
  misc_feature (1)..(493): Homolog of NCBI NO: 1084334 NR Description: calcium-dependent protein kinase (EC 2.7.1.-) 1 -
  misc_feature (1)..(493): Homolog of NCBI NO: 30699042 NR Description: calcium-dependent protein kinase, putative (CDPK)
  misc_feature (1)..(482): Homolog of NCBI NO: 22331739 NR Description: calcium-dependent protein kinase, putative (CDPK)
  misc_feature (1)..(482): Homolog of NCBI NO: 17064926 NR Description: calcium-dependent protein kinase [Arabidopsis
  misc_feature (1)..(482): Homolog of NCBI NO: 18416872 NR Description: calcium-dependent protein kinase 7 (CDPK)(CPK7)
  misc_feature (1)..(481): Homolog of NCBI NO: 14484895 NR Description: calcium-dependent protein kinase [Funaria
  misc_feature (1)..(483): Homolog of NCBI NO: 30694663 NR Description: calcium-dependent protein kinase, putative (CDPK)
MSNQTQISDKYILGRELGRGEFGITYLCTDRETHEALACKSISKRKLRTAVDIEDVRREVAIMSTLPEHPNVVKLKASYEDNENVHLVMELCEGGELFDRIVARGHYTERAAAAVARTIAEVVMMCHSNGVMHRDLKPENFLFANKKENSPLKAIDFGLSVFFKPGDKFTEIVGSPYYMAPEVLKRDYGPGVDVWSAGVIIYILLCGVPPFWAETEQGVALAILRGVLDFKRDPWPQISESAKSLVKQMLDPDPTKRLTAQQVLAHPWIQNAKKAPNVPLGDIVRSRLKQFSMMNRFKKKVLRVIAEHLSIQEVEVIKNMFSLMDDDKDGKITYPELKAGLQKVGSQLGEPEIKMLMEVADVDGNGFLDYGEFVAVIIHLQKIENDELFKLAFMFFDKDGSTYIELDELREALADELGEPDASVLSDIMREVDTDKDGRINYDEFVTMMKAGTDWRKASRQYSRERFKSLSINLMKDGSLHLHDALTGQTVPV

SEQ ID NO: 101825 - protein, 431 aa, Arabidopsis thaliana
  peptide (1)..(431): Ceres Seq. ID no. 13608770
  misc_feature (1)..(207): Pfam Name: Protein kinase domain Pfam Description: Protein kinase domain
  misc_feature (1)..(431): Homolog of NCBI NO: 25287677 NR Description: calcium-dependent protein kinase 1 [imported] -
  misc_feature (1)..(431): Homolog of NCBI NO: 28416563 NR Description: At1g18890 [Arabidopsis thaliana]
  misc_feature (1)..(431): Homolog of NCBI NO: 18394667 NR Description: calcium-dependent protein kinase (CDPK1)
  misc_feature (1)..(431): Homolog of NCBI NO: 1084334 NR Description: calcium-dependent protein kinase (EC 2.7.1.-) 1 -
  misc_feature (1)..(431): Homolog of NCBI NO: 30699042 NR Description: calcium-dependent protein kinase, putative (CDPK)
  misc_feature (1)..(420): Homolog of NCBI NO: 22331739 NR Description: calcium-dependent protein kinase, putative (CDPK)
  misc_feature (1)..(420): Homolog of NCBI NO: 17064926 NR Description: calcium-dependent protein kinase [Arabidopsis
  misc_feature (1)..(420): Homolog of NCBI NO: 18416872 NR Description: calcium-dependent protein kinase 7 (CDPK)(CPK7)
  misc_feature (1)..(419): Homolog of NCBI NO: 14484895 NR Description: calcium-dependent protein kinase [Funaria
  misc_feature (1)..(421): Homolog of NCBI NO: 30694663 NR Description: calcium-dependent protein kinase, putative (CDPK)
MSTLPEHPNVVKLKASYEDNENVHLVMELCEGGELFDRIVARGHYTERAAAAVARTIAEVVMMCHSNGVMHRDLKPENFLFANKKENSPLKAIDFGLSVFFKPGDKFTEIVGSPYYMAPEVLKRDYGPGVDVWSAGVIIYILLCGVPPFWAETEQGVALAILRGVLDFKRDPWPQISESAKSLVKQMLDPDPTKRLTAQQVLAHPWIQNAKKAPNVPLGDIVRSRLKQFSMMNRFKKKVLRVIAEHLSIQEVEVIKNMFSLMDDDKDGKITYPELKAGLQKVGSQLGEPEIKMLMEVADVDGNGFLDYGEFVAVIIHLQKIENDELFKLAFMFFDKDGSTYIELDELREALADELGEPDASVLSDIMREVDTDKDGRINYDEFVTMMKAGTDWRKASRQYSRERFKSLSINLMKDGSLHLHDALTGQTVPV

SEQ ID NO: 101826 - DNA, 999 bp, Arabidopsis thaliana
  misc_feature (1)..(999): Ceres Seq. ID no. 13608771
  misc_feature: MA Experiment ID: 108488 Result: Down-regulated in Transcription
  misc_feature: MA Experiment ID: 108573 Result: Up-regulated in Transcription
  misc_feature: MA Experiment 108573 PARAMETER Experiment Name: At_Drought_cDNA_P Parameter: Timepoint (hr) Value: 6
  misc_feature: MA Experiment 108573 PARAMETER Experiment Name: At_Drought_cDNA_P Parameter: Tissue Value: Aerial
  misc_feature: MA Experiment 108573 PARAMETER Experiment Name: At_Drought_cDNA_P Parameter: Treatment Value: Drought vs. No Drought
  misc_feature: MA Experiment ID: 108579 Result: Down-regulated in Transcription
  misc_feature: MA Experiment 108579 PARAMETER Experiment Name: At_4deg_Cold_cDNA_P Parameter: Temperature (deg C) Value: 4 vs. 22
  misc_feature: MA Experiment 108579 PARAMETER Experiment Name: At_4deg_Cold_cDNA_P Parameter: Timepoint (hr) Value: 6
  misc_feature: MA Experiment 108579 PARAMETER Experiment Name: At_4deg_Cold_cDNA_P Parameter: Tissue Value: Aerial
  misc_feature: MA Experiment ID: 108585 Result: Up-regulated in Transcription
  misc_feature: MA Experiment 108585 PARAMETER Experiment Name: At_5mM_NaNP_cDNA_P Parameter: Timepoint (hr) Value: 6
  misc_feature: MA Experiment 108585 PARAMETER Experiment Name: At_5mM_NaNP_cDNA_P Parameter: Tissue Value: Aerial
  misc_feature: MA Experiment 108585 PARAMETER Experiment Name: At_5mM_NaNP_cDNA_P Parameter: Treatment Value: null
  misc_feature: MA Experiment ID: 20000070 Result: Up-regulated in Transcription
  misc_feature: MA Experiment 20000070 PARAMETER Experiment Name: At_100uM_ABA_Mutants_cDNA_P Parameter: Plant Line Value: CS24
  misc_feature: MA Experiment 20000070 PARAMETER Experiment Name: At_100uM_ABA_Mutants_cDNA_P Parameter: Timepoint (hr) Value: 6
  misc_feature: MA Experiment 20000070 PARAMETER Experiment Name: At_100uM_ABA_Mutants_cDNA_P Parameter: Tissue Value: Aerial
  misc_feature: MA Experiment 20000070 PARAMETER Experiment Name: At_100uM_ABA_Mutants_cDNA_P Parameter: Treatment Value: 100uM ABA vs. No Treatment
  misc_feature: MA Experiment ID: 20000071 Result: Up-regulated in Transcription
  misc_feature: MA Experiment 20000071 PARAMETER Experiment Name: At_100uM_ABA_Mutants_cDNA_P Parameter: Plant Line Value: CS8104
  misc_feature: MA Experiment 20000071 PARAMETER Experiment Name: At_100uM_ABA_Mutants_cDNA_P Parameter: Timepoint (hr) Value: 6
  misc_feature: MA Experiment 20000071 PARAMETER Experiment Name: At_100uM_ABA_Mutants_cDNA_P Parameter: Tissue Value: Aerial
  misc_feature: MA Experiment 20000071 PARAMETER Experiment Name: At_100uM_ABA_Mutants_cDNA_P Parameter: Treatment Value: 100uM ABA vs. No Treatment
  misc_feature: MA Experiment ID: 20000072 Result: Up-regulated in Transcription
  misc_feature: MA Experiment 20000072 PARAMETER Experiment Name: At_100uM_ABA_Mutants_cDNA_P Parameter: Plant Line Value: CS8105
  misc_feature: MA Experiment 20000072 PARAMETER Experiment Name: At_100uM_ABA_Mutants_cDNA_P Parameter: Timepoint (hr) Value: 6
  misc_feature: MA Experiment 20000072 PARAMETER Experiment Name: At_100uM_ABA_Mutants_cDNA_P Parameter: Tissue Value: Aerial
  misc_feature: MA Experiment 20000072 PARAMETER Experiment Name: At_100uM_ABA_Mutants_cDNA_P Parameter: Treatment Value: 100uM ABA vs. No Treatment
  misc_feature: MA Experiment ID: 20000086 Result: Up-regulated in Transcription
  misc_feature: MA Experiment 20000086 PARAMETER Experiment Name: At_100uM_ABA_Mutants_cDNA_P Parameter: Plant Line Value: CS22
  misc_feature: MA Experiment 20000086 PARAMETER Experiment Name: At_100uM_ABA_Mutants_cDNA_P Parameter: Timepoint (hr) Value: 6
  misc_feature: MA Experiment 20000086 PARAMETER Experiment Name: At_100uM_ABA_Mutants_cDNA_P Parameter: Tissue Value: Aerial
  misc_feature: MA Experiment 20000086 PARAMETER Experiment Name: At_100uM_ABA_Mutants_cDNA_P Parameter: Treatment Value: 100uM ABA vs. No Treatment
  misc_feature: MA Experiment ID: 20000088 Result: Up-regulated in Transcription
  misc_feature: MA Experiment 20000088 PARAMETER Experiment Name: At_100uM_ABA_Mutants_cDNA_P Parameter: Plant Line Value: Landsberg
  misc_feature: MA Experiment 20000088 PARAMETER Experiment Name: At_100uM_ABA_Mutants_cDNA_P Parameter: Timepoint (hr) Value: 6
  misc_feature: MA Experiment 20000088 PARAMETER Experiment Name: At_100uM_ABA_Mutants_cDNA_P Parameter: Tissue Value: Aerial
  misc_feature: MA Experiment 20000088 PARAMETER Experiment Name: At_100uM_ABA_Mutants_cDNA_P Parameter: Treatment Value: 100uM ABA vs. No Treatment
  misc_feature: MA Experiment ID: 20000090 Result: Up-regulated in Transcription
  misc_feature: MA Experiment ID: 20000111 Result: Down-regulated in Transcription
  misc_feature: MA Experiment 20000111 PARAMETER Experiment Name: At_42deg_Heat_cDNA_P Parameter: Temperature (deg C) Value: 42 vs. 22
  misc_feature: MA Experiment 20000111 PARAMETER Experiment Name: At_42deg_Heat_cDNA_P Parameter: Timepoint (hr) Value: 6
  misc_feature: MA Experiment 20000111 PARAMETER Experiment Name: At_42deg_Heat_cDNA_P Parameter: Tissue Value: Aerial
  misc_feature: MA Experiment ID: 20000113 Result: Down-regulated in Transcription
  misc_feature: MA Experiment 20000113 PARAMETER Experiment Name: At_42deg_Heat_cDNA_P Parameter: Temperature (deg C) Value: 42 vs. 22
  misc_feature: MA Experiment 20000113 PARAMETER Experiment Name: At_42deg_Heat_cDNA_P Parameter: Timepoint (hr) Value: 8
  misc_feature: MA Experiment 20000113 PARAMETER Experiment Name: At_42deg_Heat_cDNA_P Parameter: Tissue Value: Aerial
  misc_feature: MA Experiment ID: 20000224 Result: Down-regulated in Transcription
  misc_feature: MA Experiment ID: 20000227 Result: Down-regulated in Transcription
  misc_feature: MA Experiment 20000227 PARAMETER Experiment Name: At_Root-Tips-vs-Tops_P Parameter: Tissue Value: Root Tips vs. Root Tops
  misc_feature: MA Experiment ID: 20000234 Result: Down-regulated in Transcription
  misc_feature: MA Experiment 20000234 PARAMETER Experiment Name: At_Siliques_P Parameter: Age (day) Value: 21
  misc_feature: MA Experiment 20000234 PARAMETER Experiment Name: At_Siliques_P Parameter: Organism Value: A. thaliana
  misc_feature: MA Experiment 20000234 PARAMETER Experiment Name: At_Siliques_P Parameter: Plant Line Value: WS
  misc_feature: MA Experiment 20000234 PARAMETER Experiment Name: At_Siliques_P Parameter: Tissue Value: Less Than 5mm Siliques vs. Whole Plant
  misc_feature: MA Experiment ID: 20000286 Result: Down-regulated in Transcription
  misc_feature: MA Experiment 20000286 PARAMETER Experiment Name: At_Open_Flower_P Parameter: Age (day) Value: 21
  misc_feature: MA Experiment 20000286 PARAMETER Experiment Name: At_Open_Flower_P Parameter: Plant Line Value: WS
  misc_feature: MA Experiment 20000286 PARAMETER Experiment Name: At_Open_Flower_P Parameter: Tissue Value: Half Open vs. Whole Plant
  misc_feature: MA Experiment ID: 20000437 Result: Up-regulated in Transcription
  misc_feature: MA Experiment 20000437 PARAMETER Experiment Name: At_Drought_P Parameter: Age (day) Value: 8
  misc_feature: MA Experiment 20000437 PARAMETER Experiment Name: At_Drought_P Parameter: Organism Value: A. thaliana
  misc_feature: MA Experiment 20000437 PARAMETER Experiment Name: At_Drought_P Parameter: Plant Line Value: WS
  misc_feature: MA Experiment 20000437 PARAMETER Experiment Name: At_Drought_P Parameter: Timepoint (hr) Value: 24
  misc_feature: MA Experiment 20000437 PARAMETER Experiment Name: At_Drought_P Parameter: Tissue Value: Whole Plant
  misc_feature: MA Experiment 20000437 PARAMETER Experiment Name: At_Drought_P Parameter: Treatment Value: Drought vs. No Drought
  misc_feature: MA Experiment ID: 20001905 Result: Up-regulated in Transcription
  misc_feature: MA Experiment 20001905 PARAMETER Experiment Name: At_Drought_Reproduction_P Parameter: Age (day) Value: 40
  misc_feature: MA Experiment 20001905 PARAMETER Experiment Name: At_Drought_Reproduction_P Parameter: Organism Value: A. thaliana
  misc_feature: MA Experiment 20001905 PARAMETER Experiment Name: At_Drought_Reproduction_P Parameter: Plant Line Value: WS
  misc_feature: MA Experiment 20001905 PARAMETER Experiment Name: At_Drought_Reproduction_P Parameter: Timepoint (day) Value: 10
  misc_feature: MA Experiment 20001905 PARAMETER Experiment Name: At_Drought_Reproduction_P Parameter: Tissue Value: Rosettes
  misc_feature: MA Experiment 20001905 PARAMETER Experiment Name: At_Drought_Reproduction_P Parameter: Treatment Value: Drought vs. No Drought
aatattctgaaaatatctttctctcgatgaaacttgtctcctccggccaaccttaacccttaagcgaacggtgttcctttgcggattgcgatcgttccgtcgatcccttcatcgcccgatctaaatctctaatcgtgtcggagattaaaagcagaggttttgtggtgaatcatgtctgatgtcccttcttgttctagcggtaatgatacaaacaacaatgattcgagtaacttcgaatgtaacatctgcttagacttggctcaagatcctattgtcactctctgtggtcacttgttctgttggccttgtttatacaaatggctccatctccattctcaatctaaggactgtcctgtttgcaaagccgtgatcgaagaagacagattggttcctttgtacggtagaggtaaatcgtctgctgaccctcggtccaagtccattccgggtctcgaagtgcctaaccgtccatcgggacagagacccgaaactgcacaacctcctgatcctaaccatggttttgctcatcatcatgggtttggagggttcatgggaggttttgctgctccgatggcgagtgcgcggttcgggaatgttacattgtctgcagcgtttggcggtttgattccttctttgttcaacctccatttccatggtttccctgatgcagccatgtatggagctgctgcttctggcggcttccctcacggtttctcgaatccgtttcatggaggacactcgcatatgcatagttaccagcggcacacgggtcgacaaggacaacaagaccatcacttgaggatattgttactcattgttttcgtcgttgttgtgttttctctcttcttgagctagtgaggaaatcgatttagctaactgtatttcgctttttattctagattttattgcataaaaacatgggaaaatatgtgctgtgagttggcttgtaaactgctactttagcaaattgttcatatattaataaaacctgtcggattctct

SEQ ID NO: 101827 - protein, 226 aa, Arabidopsis thaliana; identical to SEQ ID NO: 26013
  peptide (1)..(226): Ceres Seq. ID no. 13608772
  misc_feature (23)..(63): Pfam Name: Zinc finger, C3HC4 type (RING finger) Pfam Description: Zinc finger, C3HC4 type (RING finger)
  misc_feature (1)..(226): Homolog of NCBI NO: 18394721 NR Description: zinc finger (C3HC4-type RING finger) protein
  misc_feature (17)..(225): Homolog of NCBI NO: 34909840 NR Description: P0403C05.28 [Oryza sativa (japonica
  misc_feature (6)..(223): Homolog of NCBI NO: 21553849 NR Description: putative RING zinc finger protein [Arabidopsis
  misc_feature (9)..(223): Homolog of NCBI NO: 15224062 NR Description: zinc finger (C3HC4-type RING finger) protein [Arabidopsis thaliana] >gi|7486265|pir||T02413 probable RING zinc
  misc_feature (6)..(223): Homolog of NCBI NO: 29150403 NR Description: unknown protein [Oryza sativa (japonica
  misc_feature (13)..(143): Homolog of NCBI NO: 15222064 NR Description: zinc finger (C3HC4-type RING finger) protein [Arabidopsis thaliana] >gi|25406402|pir||G96779 probable RING
  misc_feature (5)..(225): Homolog of NCBI NO: 17554742 NR Description: Ring finger protein RNF-5 (24.9 kD) (rnf-5) elegans] >gi|2501735|sp|Q09463|YQ57_CAEEL Hypothetical RING protein C16C10.7 in chromosome III >gi|7496097|pir||T19328
  misc_feature (13)..(225): Homolog of NCBI NO: 39581891 NR Description: Hypothetical protein CBG20152 [Caenorhabditis
  misc_feature (17)..(156): Homolog of NCBI NO: 18859961 NR Description: CG8974-PC [Drosophila melanogaster]
  misc_feature (5)..(161): Homolog of NCBI NO: 29841097 NR Description: similar to GenBank Accession Number AJ428489

SEQ ID NO: 101828 - DNA, 1205 bp, Arabidopsis thaliana
  misc_feature (1)..(1205): Ceres Seq. ID no. 13608777
  misc_feature: MA Experiment ID: 20000173 Result: Down-regulated in Transcription
  misc_feature: MA Experiment 20000173 PARAMETER Experiment Name: At_42deg_Heat_P Parameter: Age (day) Value: 14
  misc_feature: MA Experiment 20000173 PARAMETER Experiment Name: At_42deg_Heat_P Parameter: Organism Value: A. thaliana
  misc_feature: MA Experiment 20000173 PARAMETER Experiment Name: At_42deg_Heat_P Parameter: Plant Line Value: WS
  misc_feature: MA Experiment 20000173 PARAMETER Experiment Name: At_42deg_Heat_P Parameter: Temperature (deg C) Value: 42 vs. 22
  misc_feature: MA Experiment 20000173 PARAMETER Experiment Name: At_42deg_Heat_P Parameter: Timepoint (hr) Value: 6
  misc_feature: MA Experiment 20000173 PARAMETER Experiment Name: At_42deg_Heat_P Parameter: Tissue Value: Aerial
  misc_feature: MA Experiment ID: 20000185 Result: Down-regulated in Transcription
  misc_feature: MA Experiment 20000185 PARAMETER Experiment Name: At_Roots__P Parameter: Age (day) Value: 7 vs. 21
  misc_feature: MA Experiment 20000185 PARAMETER Experiment Name: At_Roots__P Parameter: Organism Value: A. thaliana
  misc_feature: MA Experiment 20000185 PARAMETER Experiment Name: At_Roots__P Parameter: Tissue Value: Roots vs. Whole Plant
  misc_feature: MA Experiment ID: 20000227 Result: Down-regulated in Transcription
  misc_feature: MA Experiment 20000227 PARAMETER Experiment Name: At_Root-Tips-vs-Tops_P Parameter: Tissue Value: Root Tips vs. Root Tops
  misc_feature: MA Experiment ID: 20000573 Result: Down-regulated in Transcription
  misc_feature: MA Experiment 20000573 PARAMETER Experiment Name: At_100uM_ABA_Mutants__P Parameter: Organism Value: A. thaliana
  misc_feature: MA Experiment 20000573 PARAMETER Experiment Name: At_100uM_ABA_Mutants__P Parameter: Plant Line Value: CS22 vs. Ler wt
  misc_feature: MA Experiment 20000573 PARAMETER Experiment Name: At_100uM_ABA_Mutants__P Parameter: Timepoint (hr) Value: N/A
  misc_feature: MA Experiment 20000573 PARAMETER Experiment Name: At_100uM_ABA_Mutants__P Parameter: Tissue Value: Whole Plant
  misc_feature: MA Experiment 20000573 PARAMETER Experiment Name: At_100uM_ABA_Mutants__P Parameter: Treatment Value: None
  misc_feature: MA Experiment ID: 20000574 Result: Down-regulated in Transcription
  misc_feature: MA Experiment 20000574 PARAMETER Experiment Name: At_100uM_ABA_Mutants__P Parameter: Organism Value: A. thaliana
  misc_feature: MA Experiment 20000574 PARAMETER Experiment Name: At_100uM_ABA_Mutants__P Parameter: Plant Line Value: CS23 vs. Ler wt
  misc_feature: MA Experiment 20000574 PARAMETER Experiment Name: At_100uM_ABA_Mutants__P Parameter: Timepoint (hr) Value: N/A
  misc_feature: MA Experiment 20000574 PARAMETER Experiment Name: At_100uM_ABA_Mutants__P Parameter: Tissue Value: Whole Plant
  misc_feature: MA Experiment 20000574 PARAMETER Experiment Name: At_100uM_ABA_Mutants__P Parameter: Treatment Value: None
  misc_feature: MA Experiment ID: 20000709 Result: Down-regulated in Transcription
  misc_feature: MA Experiment 20000709 PARAMETER Experiment Name: At_15mM_NH4NO3_L-to-H_P Parameter: Age (hr) Value: 14
  misc_feature: MA Experiment 20000709 PARAMETER Experiment Name: At_15mM_NH4NO3_L-to-H_P Parameter: Organism Value: A. thaliana
  misc_feature: MA Experiment 20000709 PARAMETER Experiment Name: At_15mM_NH4NO3_L-to-H_P Parameter: Plant Line Value: WS
  misc_feature: MA Experiment 20000709 PARAMETER Experiment Name: At_15mM_NH4NO3_L-to-H_P Parameter: Timepoint (hr) Value: 4
  misc_feature: MA Experiment 20000709 PARAMETER Experiment Name: At_15mM_NH4NO3_L-to-H_P Parameter: Tissue Value: Aerial
  misc_feature: MA Experiment 20000709 PARAMETER Experiment Name: At_15mM_NH4NO3_L-to-H_P Parameter: Treatment Value: 15mM NH4NO3 vs. 30mM Mannitol
  misc_feature: MA Experiment ID: 20000794 Result: Down-regulated in Transcription
  misc_feature: MA Experiment 20000794 PARAMETER Experiment Name: At_Petals_P Parameter: Age (day) Value: 23-25 days
  misc_feature: MA Experiment 20000794 PARAMETER Experiment Name: At_Petals_P Parameter: Plant Line Value: WS
  misc_feature: MA Experiment 20000794 PARAMETER Experiment Name: At_Petals_P Parameter: Tissue Value: Petals vs. Whole plant
  misc_feature: MA Experiment ID: 20001557 Result: Down-regulated in Transcription
  misc_feature: MA Experiment 20001557 PARAMETER Experiment Name: At_Drought_Soil_Dry_P Parameter: Age (day) Value: 27
  misc_feature: MA Experiment 20001557 PARAMETER Experiment Name: At_Drought_Soil_Dry_P Parameter: Organism Value: A. thaliana
  misc_feature: MA Experiment 20001557 PARAMETER Experiment Name: At_Drought_Soil_Dry_P Parameter: Plant Line Value: WS
  misc_feature: MA Experiment 20001557 PARAMETER Experiment Name: At_Drought_Soil_Dry_P Parameter: Post Timepoint (hr) Value: 3
  misc_feature: MA Experiment 20001557 PARAMETER Experiment Name: At_Drought_Soil_Dry_P Parameter: Post-Treatment Value: Re-Water vs. No Drought
  misc_feature: MA Experiment 20001557 PARAMETER Experiment Name: At_Drought_Soil_Dry_P Parameter: Timepoint (day) Value: 13
  misc_feature: MA Experiment 20001557 PARAMETER Experiment Name: At_Drought_Soil_Dry_P Parameter: Treatment Value: Drought vs. No Drought
  misc_feature: MA Experiment ID: 20001558 Result: Down-regulated in Transcription
  misc_feature: MA Experiment 20001558 PARAMETER Experiment Name: At_Drought_Soil_Dry_P Parameter: Age (day) Value: 27
  misc_feature: MA Experiment 20001558 PARAMETER Experiment Name: At_Drought_Soil_Dry_P Parameter: Organism Value: A. thaliana
  misc_feature: MA Experiment 20001558 PARAMETER Experiment Name: At_Drought_Soil_Dry_P Parameter: Plant Line Value: WS
  misc_feature: MA Experiment 20001558 PARAMETER Experiment Name: At_Drought_Soil_Dry_P Parameter: Post Timepoint (hr) Value: 6
  misc_feature: MA Experiment 20001558 PARAMETER Experiment Name: At_Drought_Soil_Dry_P Parameter: Post-Treatment Value: Re-Water vs. No Drought
  misc_feature: MA Experiment 20001558 PARAMETER Experiment Name: At_Drought_Soil_Dry_P Parameter: Timepoint (day) Value: 13
  misc_feature: MA Experiment 20001558 PARAMETER Experiment Name: At_Drought_Soil_Dry_P Parameter: Treatment Value: Drought vs. No Drought
  misc_feature: MA Experiment ID: 20001560 Result: Down-regulated in Transcription
  misc_feature: MA Experiment 20001560 PARAMETER Experiment Name: At_Drought_Soil_Dry_P Parameter: Age (day) Value: 28
  misc_feature: MA Experiment 20001560 PARAMETER Experiment Name: At_Drought_Soil_Dry_P Parameter: Organism Value: A. thaliana
  misc_feature: MA Experiment 20001560 PARAMETER Experiment Name: At_Drought_Soil_Dry_P Parameter: Plant Line Value: WS
  misc_feature: MA Experiment 20001560 PARAMETER Experiment Name: At_Drought_Soil_Dry_P Parameter: Post Timepoint (hr) Value: None
  misc_feature: MA Experiment 20001560 PARAMETER Experiment Name: At_Drought_Soil_Dry_P Parameter: Post-Treatment Value: None
  misc_feature: MA Experiment 20001560 PARAMETER Experiment Name: At_Drought_Soil_Dry_P Parameter: Timepoint (day) Value: 14
  misc_feature: MA Experiment 20001560 PARAMETER Experiment Name: At_Drought_Soil_Dry_P Parameter: Treatment Value: Drought vs. No Drought
  misc_feature: MA Experiment ID: 20001904 Result: Down-regulated in Transcription
  misc_feature: MA Experiment 20001904 PARAMETER Experiment Name: At_Drought_Reproduction_P Parameter: Age (day) Value: 37
  misc_feature: MA Experiment 20001904 PARAMETER Experiment Name: At_Drought_Reproduction_P Parameter: Organism Value: A. thaliana
  misc_feature: MA Experiment 20001904 PARAMETER Experiment Name: At_Drought_Reproduction_P Parameter: Plant Line Value: WS
  misc_feature: MA Experiment 20001904 PARAMETER Experiment Name: At_Drought_Reproduction_P Parameter: Timepoint (day) Value: 7
  misc_feature: MA Experiment 20001904 PARAMETER Experiment Name: At_Drought_Reproduction_P Parameter: Tissue Value: Rosettes
  misc_feature: MA Experiment 20001904 PARAMETER Experiment Name: At_Drought_Reproduction_P Parameter: Treatment Value: Drought vs. No Drought
  misc_feature: MA Experiment ID: 20001905 Result: Down-regulated in Transcription
  misc_feature: MA Experiment 20001905 PARAMETER Experiment Name: At_Drought_Reproduction_P Parameter: Age (day) Value: 40
  misc_feature: MA Experiment 20001905 PARAMETER Experiment Name: At_Drought_Reproduction_P Parameter: Organism Value: A. thaliana
  misc_feature: MA Experiment 20001905 PARAMETER Experiment Name: At_Drought_Reproduction_P Parameter: Plant Line Value: WS
  misc_feature: MA Experiment 20001905 PARAMETER Experiment Name: At_Drought_Reproduction_P Parameter: Timepoint (day) Value: 10
  misc_feature: MA Experiment 20001905 PARAMETER Experiment Name: At_Drought_Reproduction_P Parameter: Tissue Value: Rosettes
  misc_feature: MA Experiment 20001905 PARAMETER Experiment Name: At_Drought_Reproduction_P Parameter: Treatment Value: Drought vs. No Drought
atctctcttcttctctctctgcttcttcttgtgggacaaaccctaattattttacttcgatatctctccacttttcccgctcaatcatctgatctttccctctctcagcaatgcatgatcttcgattttctatcagtgttcaaagctgaaaaaaatcgaactgggtctgttgatttcttcaggtctaaaatcagattagattagagaagaagaagaagaatgctggaagctgtagatagctcaggagtggtgaatggaggattcccgcagattcagagcttttacggcgattgcagtagtgaagaagagttatcggtattgccacgtcatacaaaagtggtggtcaccggaaacaaccggacgaaatcggtgcttgttggtcttcaaggtgttgtcaaaaaagctgtcggtctcggtggttggcattggctggttttgacaaatggaatagaagtaaagttgcagaggaatgcgcttagtgtccttgaacctcctactggaaacgaagaagacgatgatcttgatttcgaaaacacacagaggaatggctctgatatgacatctgaggacacactgaagcctcataagtcgaagctaagagggcagagatcatctcggtcatctcacaagacgatgagcaggtctctatcatctgactcgcaatcaaaaagttcgggttttactcctcctgaaaacatgaaggttgatcttagcaaattggaaatgcctgctttactgaattattggcgacattttaaccttgtggatgcaattccaaatccatcaaaggagcaactaattgacattgttcaaaggcacttcatgtctcagcaaatggatgagcttcaggttattgtggggtttgtccaagctgcaaagagaatgaagaaggcttgcaagtttcaatccaaagaatccagaaacactgatcttaactgcatcagctaaagaaaagccctgactcttaacaaatcctgtatgtacggtacatcaacttgtttaaccatttgtggcttgctaagtttagttcttctagtgatgtttggctaaagggtagatgttgtttcttctttgcttctgttgtttagccaatgtaagtaccatcaaaaaaaccaaataactctctaaagctccctattggaaactatcttgtctgatacgatctggagtgaccggtatgttgttagaatgtaaatatgtttggt

SEQ ID NO: 101829 - protein, 242 aa, Arabidopsis thaliana; identical to SEQ ID NO: 24833
  peptide (1)..(242): Ceres Seq. ID no. 13608778
  misc_feature (1)..(242): Homolog of NCBI NO: 25372870 NR Description: protein F18O14.5 [imported] - Arabidopsis >gi|8778446|gb|AAF79454.1|AC025808_36 F18O14.5 [Arabidopsis
  misc_feature (1)..(242): Homolog of NCBI NO: 18394724 NR Description: expressed protein [Arabidopsis thaliana]
  misc_feature (1)..(234): Homolog of NCBI NO: 15222092 NR Description: hypothetical protein [Arabidopsis thaliana]
  misc_feature (1)..(213): Homolog of NCBI NO: 37533376 NR Description: hypothetical protein [Oryza sativa (japonica group)] >gi|18057114|gb|AAL58137.1| hypothetical protein [Oryza
  misc_feature (2)..(213): Homolog of NCBI NO: 18767383 NR Description: Hypothetical protein [Oryza sativa]
  misc_feature (26)..(223): Homolog of NCBI NO: 38346468 NR Description: OSJNBa0019G23.16 [Oryza sativa (japonica
  misc_feature (26)..(98): Homolog of NCBI NO: 38567956 NR Description: OSJNBb0115I21.12 [Oryza sativa (japonica
  misc_feature (204)..(223): Homolog of NCBI NO: 38567956 NR Description: OSJNBb0115I21.12 [Oryza sativa (japonica

SEQ ID NO: 101830 - protein, 130 aa, Arabidopsis thaliana; identical to SEQ ID NO: 24834
  peptide (1)..(130): Ceres Seq. ID no. 13608779
  misc_feature (1)..(130): Homolog of NCBI NO: 25372870 NR Description: protein F18O14.5 [imported] - Arabidopsis >gi|8778446|gb|AAF79454.1|AC025808_36 F18O14.5 [Arabidopsis
  misc_feature (1)..(130): Homolog of NCBI NO: 18394724 NR Description: expressed protein [Arabidopsis thaliana]
  misc_feature (1)..(122): Homolog of NCBI NO: 15222092 NR Description: hypothetical protein [Arabidopsis thaliana]
  misc_feature (1)..(101): Homolog of NCBI NO: 37533376 NR Description: hypothetical protein [Oryza sativa (japonica group)] >gi|18057114|gb|AAL58137.1| hypothetical protein [Oryza
  misc_feature (1)..(101): Homolog of NCBI NO: 18767383 NR Description: Hypothetical protein [Oryza sativa]
  misc_feature (1)..(111): Homolog of NCBI NO: 38346468 NR Description: OSJNBa0019G23.16 [Oryza sativa (japonica
  misc_feature (92)..(111): Homolog of NCBI NO: 38567956 NR Description: OSJNBb0115I21.12 [Oryza sativa (japonica

SEQ ID NO: 101831 - DNA, 777 bp, Arabidopsis thaliana
  misc_feature (1)..(777): Ceres Seq. ID no. 13608780
  misc_feature: MA Experiment ID: 108434 Result: Up-regulated in Transcription
  misc_feature: MA Experiment 108434 PARAMETER Experiment Name: At_Root_Tips_cDNA_P Parameter: Tissue Value: Root Tips
  misc_feature: MA Experiment ID: 108461 Result: Down-regulated in Transcription
  misc_feature: MA Experiment 108461 PARAMETER Experiment Name: At_Germinating_Seeds_cDNA_P Parameter: Age (day) Value: 1 vs. 0
  misc_feature: MA Experiment 108461 PARAMETER Experiment Name: At_Germinating_Seeds_cDNA_P Parameter: Tissue Value: Germinating Seeds
  misc_feature: MA Experiment ID: 108462 Result: Down-regulated in Transcription
  misc_feature: MA Experiment 108462 PARAMETER Experiment Name: At_Germinating_Seeds_cDNA_P Parameter: Age (day) Value: 2 vs. 0
  misc_feature: MA Experiment 108462 PARAMETER Experiment Name: At_Germinating_Seeds_cDNA_P Parameter: Tissue Value: Germinating Seeds
  misc_feature: MA Experiment ID: 108463 Result: Down-regulated in Transcription
  misc_feature: MA Experiment 108463 PARAMETER Experiment Name: At_Germinating_Seeds_cDNA_P Parameter: Age (day) Value: 3 vs. 0
  misc_feature: MA Experiment 108463 PARAMETER Experiment Name: At_Germinating_Seeds_cDNA_P Parameter: Tissue Value: Germinating Seeds
  misc_feature: MA Experiment ID: 108464 Result: Down-regulated in Transcription
  misc_feature: MA Experiment 108464 PARAMETER Experiment Name: At_Germinating_Seeds_cDNA_P Parameter: Age (day) Value: 4 vs. 0
  misc_feature: MA Experiment 108464 PARAMETER Experiment Name: At_Germinating_Seeds_cDNA_P Parameter: Tissue Value: Germinating Seeds
  misc_feature: MA Experiment ID: 108572 Result: Down-regulated in Transcription
  misc_feature: MA Experiment 108572 PARAMETER Experiment Name: At_Drought_cDNA_P Parameter: Timepoint (hr) Value: 1
  misc_feature: MA Experiment 108572 PARAMETER Experiment Name: At_Drought_cDNA_P Parameter: Tissue Value: Aerial
  misc_feature: MA Experiment 108572 PARAMETER Experiment Name: At_Drought_cDNA_P Parameter: Treatment Value: Drought vs. No Drought
  misc_feature: MA Experiment ID: 108573 Result: Down-regulated in Transcription
  misc_feature: MA Experiment 108573 PARAMETER Experiment Name: At_Drought_cDNA_P Parameter: Timepoint (hr) Value: 6
  misc_feature: MA Experiment 108573 PARAMETER Experiment Name: At_Drought_cDNA_P Parameter: Tissue Value: Aerial
  misc_feature: MA Experiment 108573 PARAMETER Experiment Name: At_Drought_cDNA_P Parameter: Treatment Value: Drought vs. No Drought
  misc_feature: MA Experiment ID: 20000179 Result: Down-regulated in Transcription
  misc_feature: MA Experiment 20000179 PARAMETER Experiment Name: At_Germinating_Seeds_P Parameter: Age (hr) Value: 6 vs. 0
  misc_feature: MA Experiment 20000179 PARAMETER Experiment Name: At_Germinating_Seeds_P Parameter: Tissue Value: Germinating Seeds
  misc_feature: MA Experiment ID: 20000180 Result: Down-regulated in Transcription
  misc_feature: MA Experiment 20000180 PARAMETER Experiment Name: At_Germinating_Seeds_P Parameter: Age (hr) Value: 24 vs. 0
  misc_feature: MA Experiment 20000180 PARAMETER Experiment Name: At_Germinating_Seeds_P Parameter: Tissue Value: Germinating Seeds
  misc_feature: MA Experiment ID: 20000184 Result: Down-regulated in Transcription
  misc_feature: MA Experiment 20000184 PARAMETER Experiment Name: At_Shoots__P Parameter: Age (day) Value: 7
  misc_feature: MA Experiment 20000184 PARAMETER Experiment Name: At_Shoots__P Parameter: Tissue Value: Shoots vs. Whole Plant
  misc_feature: MA Experiment ID: 20000224 Result: Up-regulated in Transcription
  misc_feature: MA Experiment ID: 20001557 Result: Up-regulated in Transcription
  misc_feature: MA Experiment 20001557 PARAMETER Experiment Name: At_Drought_Soil_Dry_P Parameter: Age (day) Value: 27
  misc_feature: MA Experiment 20001557 PARAMETER Experiment Name: At_Drought_Soil_Dry_P Parameter: Organism Value: A. thaliana
  misc_feature: MA Experiment 20001557 PARAMETER Experiment Name: At_Drought_Soil_Dry_P Parameter: Plant Line Value: WS
  misc_feature: MA Experiment 20001557 PARAMETER Experiment Name: At_Drought_Soil_Dry_P Parameter: Post Timepoint (hr) Value: 3
  misc_feature: MA Experiment 20001557 PARAMETER Experiment Name: At_Drought_Soil_Dry_P Parameter: Post-Treatment Value: Re-Water vs. No Drought
  misc_feature: MA Experiment 20001557 PARAMETER Experiment Name: At_Drought_Soil_Dry_P Parameter: Timepoint (day) Value: 13
  misc_feature: MA Experiment 20001557 PARAMETER Experiment Name: At_Drought_Soil_Dry_P Parameter: Treatment Value: Drought vs. No Drought
  misc_feature: MA Experiment ID: 20001558 Result: Up-regulated in Transcription
  misc_feature: MA Experiment 20001558 PARAMETER Experiment Name: At_Drought_Soil_Dry_P Parameter: Age (day) Value: 27
  misc_feature: MA Experiment 20001558 PARAMETER Experiment Name: At_Drought_Soil_Dry_P Parameter: Organism Value: A. thaliana
  misc_feature: MA Experiment 20001558 PARAMETER Experiment Name: At_Drought_Soil_Dry_P Parameter: Plant Line Value: WS
  misc_feature: MA Experiment 20001558 PARAMETER Experiment Name: At_Drought_Soil_Dry_P Parameter: Post Timepoint (hr) Value: 6
  misc_feature: MA Experiment 20001558 PARAMETER Experiment Name: At_Drought_Soil_Dry_P Parameter: Post-Treatment Value: Re-Water vs. No Drought
  misc_feature: MA Experiment 20001558 PARAMETER Experiment Name: At_Drought_Soil_Dry_P Parameter: Timepoint (day) Value: 13
  misc_feature: MA Experiment 20001558 PARAMETER Experiment Name: At_Drought_Soil_Dry_P Parameter: Treatment Value: Drought vs. No Drought
atgagagtgaagaggcagaagaaaaacaggagaaccgtgagattcttcacggtctgttacggattccgtcaaccctacaaagtcctttgcgacggcactttcgtccaccatcttgtcactaatgagatcactcccgccgacactgctgtctctgaactcctcggaggtcccgtcaagctcttcaccaccagatgtgtgattgcggagttggagaaactgggtaaagattttgcggaatctctcgaagctgcccagacgcttaatacagcaacatgtgagcacgaggaggcaaaaacagcagacgagtgtttgtcagaggtaataggggtacaaaatactgagcatttcttccttggtactcaggacgcggagtttaggagaaagcttcagcaggagtctatagttcctcttgtgtttggtctaaggaacatactgctgattgatcaaccttctgatttccaacgtcagagtgccaaagactctgaaaataagcgcttaactatgaccgatacggaaaaaaagttgttggtgaaacggactgcgaaaatcatagcttctaatagaaaagaagcaacaattgcaaatgaagaatggggaatgcctcgagtagtttctacaaaaaatggacttggtgtgaaggatagacctcagttcaagcgaaatagagccaagggtccaaacccactttcatgcatgaagaaaaagaaggagaatcctcaatccaaatccaaagccgattctaactctaatgcacaaaagcaaagacgacccgtgtaa

SEQ ID NO: 101832 - protein, 258 aa, Arabidopsis thaliana
  peptide (1)..(258): Ceres Seq. ID no. 13608781
  misc_feature (51)..(150): Pfam Name: Protein of unknown function, DUF652 Pfam Description: Protein of unknown function, DUF652
  misc_feature (1)..(258): Homolog of NCBI NO: 25408336 NR Description: hypothetical protein At2g34570 [imported] - thaliana >gi|3128208|gb|AAC26688.1| hypothetical protein
  misc_feature (1)..(256): Homolog of NCBI NO: 30686117 NR Description: expressed protein [Arabidopsis thaliana]
  misc_feature (1)..(151): Homolog of NCBI NO: 21313442 NR Description: RIKEN cDNA D530033C11 [Mus musculus]
  misc_feature (1)..(151): Homolog of NCBI NO: 26335161 NR Description: unnamed protein product [Mus musculus]
  misc_feature (207)..(256): Homolog of NCBI NO: 21313442 NR Description: RIKEN cDNA D530033C11 [Mus musculus]
  misc_feature (207)..(256): Homolog of NCBI NO: 26335161 NR Description: unnamed protein product [Mus musculus]
  misc_feature (200)..(256): Homolog of NCBI NO: 26452330 NR Description: unknown protein [Arabidopsis thaliana]
  misc_feature (1)..(238): Homolog of NCBI NO: 19075891 NR Description: conserved protein; putative tRNA synthetase class [Schizosaccharomyces pombe] >gi|7490368|pir||T41155 conserved
  misc_feature (1)..(242): Homolog of NCBI NO: 14150118 NR Description: hypothetical protein MGC14595 [Homo sapiens] Similar to RIKEN cDNA D530033C11 gene [Homo sapiens]
  misc_feature (1)..(166): Homolog of NCBI NO: 17552478 NR Description: Protein required for cell viability like (26.3 [Caenorhabditis elegans] >gi|14550350|gb|AAK67218.1|U10402_10
MRVKRQKKNRRTVRFFTVCYGFRQPYKVLCDGTFVHHLVTNEITPADTAVSELLGGPVKLFTTRCVIAELEKLGKDFAESLEAAQTLNTATCEHEEAKTADECLSEVIGVQNTEHFFLGTQDAEFRRKLQQESIVPLVFGLRNILLIDQPSDFQRQSAKDSENKRLTMTDTEKKLLVKRTAKIIASNRKEATIANEEWGMPRVVSTKNGLGVKDRPQFKRNRAKGPNPLSCMKKKKENPQSKSKADSNSNAQKQRRPV

SEQ ID NO: 101833 - DNA, 1333 bp, Arabidopsis thaliana
  misc_feature (1)..(1333): Ceres Seq. ID no. 13608790
  misc_feature: MA Experiment ID: 108573 Result: Up-regulated in Transcription
  misc_feature: MA Experiment 108573 PARAMETER Experiment Name: At_Drought_cDNA_P Parameter: Timepoint (hr) Value: 6
  misc_feature: MA Experiment 108573 PARAMETER Experiment Name: At_Drought_cDNA_P Parameter: Tissue Value: Aerial
  misc_feature: MA Experiment 108573 PARAMETER Experiment Name: At_Drought_cDNA_P Parameter: Treatment Value: Drought vs. No Drought
  misc_feature: MA Experiment ID: 20000185 Result: Down-regulated in Transcription
  misc_feature: MA Experiment 20000185 PARAMETER Experiment Name: At_Roots__P Parameter: Age (day) Value: 7 vs. 21
  misc_feature: MA Experiment 20000185 PARAMETER Experiment Name: At_Roots__P Parameter: Organism Value: A. thaliana
  misc_feature: MA Experiment 20000185 PARAMETER Experiment Name: At_Roots__P Parameter: Tissue Value: Roots vs. Whole Plant
  misc_feature: MA Experiment ID: 20000439 Result: Down-regulated in Transcription
  misc_feature: MA Experiment 20000439 PARAMETER Experiment Name: At_Roots__P Parameter: Age (day) Value: 14 vs. 21
  misc_feature: MA Experiment 20000439 PARAMETER Experiment Name: At_Roots__P Parameter: Organism Value: A. thaliana
  misc_feature: MA Experiment 20000439 PARAMETER Experiment Name: At_Roots__P Parameter: Tissue Value: Roots vs. Whole Plant
aaatttcgtgtgattttctaagacttgagtaatcttgttttccgaaattttctcaccaagctcgaacacaaagatcggccatggctacgctcttcaccgtcgctcgtccttcttcactcctctatgtttcctccataaatccaagcaagaccttctctccttctatctccctaaaacttaactctctctctttctcttttggttatcgtcccaagccactccggttttctaaaatccgatcttctctgccctcggaatctgaatcggaatccgacctagatgcgtctgcagttacagatgaatggggtgagaaacctggagatgcaaatgagcccgactctcagccagataatgtgaccgtgaatgtgattacggacgaatggggcgagaaatccggacccgaacttgaggaatccgggacccggtttatggaatcggatcctccaaggaacgaagacgagtggggaggagaaattggaggagaaactgaagccgacgctggaaatggaagtgcggtgtctgacccgacttgggagctgaaaaggtgtttggcggattcggtgtacggaactgaattaggtttcaaagctgggtcagaagtccgagcggaggttttggagcttgtgaatcaactggaagctctgaatcctactccggctccgttagagaatccagaacttctcgacggcaactgggttttgctgtacactgctttctctgagttgattcctctactagctgcgggttcgacacctttgttgaaagttaaaagcataagtcagtcaatagacacaaacaatctcattatcgacaactccactacactctccagcccttttgcagacttctccttcagtgctactgcttcatttgaagttcgaagcccttcaagaattgaggtttctttcaaagaaggcacgctaaaacccccggtgatcaaatcaagtgtagatctcccagagagtgtgggcgtctttgggcagcagattagcctttcgttgttaaagcagtctttgaaccccttacaagatgtggcagcaaacatttcacgggcactctctggtcagccacctctcaagcttccgtttccaggaaaccgaggcagctcttggctcttgaccacttatctcgacaaggatctcaggatttctagaggagatggtggccttttcgtgcttgccagagaaggaagctctctgcttgagctctgaaatatttgataaagtatatatatagcaggcttcatgtaaaaaccgtaaccactacagtagagacatcttcagaataatgctgaatgcagattattgggcctaatcttaaattttaattatgt

SEQ ID NO: 101834 - protein, 376 aa, Arabidopsis thaliana; identical to SEQ ID NO: 24573
  peptide (1)..(376): Ceres Seq. ID no. 13608791
  misc_feature (151)..(367): Pfam Name: PAP_fibrillin Pfam Description: PAP_fibrillin
  misc_feature (1)..(376): Homolog of NCBI NO: 15227428 NR Description: plastid-lipid associated protein (PAP), putative
  misc_feature (1)..(376): Homolog of NCBI NO: 14596235 NR Description: putative fibrillin [Arabidopsis thaliana]
  misc_feature (1)..(376): Homolog of NCBI NO: 14248552 NR Description: plastid-lipid associated protein PAP3 [Brassica
  misc_feature (1)..(376): Homolog of NCBI NO: 14248558 NR Description: plastid-lipid associated protein PAP3 [Brassica
  misc_feature (28)..(375): Homolog of NCBI NO: 37537108 NR Description: putative plastid-lipid associated protein [Oryza
  misc_feature (14)..(375): Homolog of NCBI NO: 4105180 NR Description: plastoglobule associated protein PG1 precursor
  misc_feature (92)..(374): Homolog of NCBI NO: 14248548 NR Description: plastid-lipid associated protein PAP1 [Brassica
  misc_feature (92)..(374): Homolog of NCBI NO: 14248554 NR Description: plastid-lipid associated protein PAP1 [Brassica
  misc_feature (125)..(374): Homolog of NCBI NO: 15233357 NR Description: plastid-lipid associated protein PAP/fibrillin,
  misc_feature (125)..(375): Homolog of NCBI NO: 7489179 NR Description: plastid-lipid-associated protein pap - common

SEQ ID NO: 101835 - protein, 260 aa, Arabidopsis thaliana; identical to SEQ ID NO: 24574
  peptide (1)..(260): Ceres Seq. ID no. 13608792
  misc_feature (35)..(251): Pfam Name: PAP_fibrillin Pfam Description: PAP_fibrillin
  misc_feature (1)..(260): Homolog of NCBI NO: 15227428 NR Description: plastid-lipid associated protein (PAP), putative
  misc_feature (1)..(260): Homolog of NCBI NO: 14596235 NR Description: putative fibrillin [Arabidopsis thaliana]
  misc_feature (1)..(260): Homolog of NCBI NO: 14248552 NR Description: plastid-lipid associated protein PAP3 [Brassica
  misc_feature (1)..(260): Homolog of NCBI NO: 14248558 NR Description: plastid-lipid associated protein PAP3 [Brassica
  misc_feature (1)..(259): Homolog of NCBI NO: 37537108 NR Description: putative plastid-lipid associated protein [Oryza
  misc_feature (1)..(259): Homolog of NCBI NO: 4105180 NR Description: plastoglobule associated protein PG1 precursor
  misc_feature (1)..(258): Homolog of NCBI NO: 14248548 NR Description: plastid-lipid associated protein PAP1 [Brassica
  misc_feature (1)..(258): Homolog of NCBI NO: 14248554 NR Description: plastid-lipid associated protein PAP1 [Brassica
  misc_feature (9)..(258): Homolog of NCBI NO: 15233357 NR Description: plastid-lipid associated protein PAP/fibrillin,
  misc_feature (9)..(259): Homolog of NCBI NO: 7489179 NR Description: plastid-lipid-associated protein pap - common

SEQ ID NO: 101836 - DNA, 801 bp, Arabidopsis thaliana
  misc_feature (1)..(801): Ceres Seq. ID no. 13608793
  misc_feature: MA Experiment ID: 108434 Result: Down-regulated in Transcription
  misc_feature: MA Experiment 108434 PARAMETER Experiment Name: At_Root_Tips_cDNA_P Parameter: Tissue Value: Root Tips
  misc_feature: MA Experiment ID: 108435 Result: Down-regulated in Transcription
  misc_feature: MA Experiment 108435 PARAMETER Experiment Name: At_stm_Mutants_cDNA_P Parameter: Plant Line Value: wt Landsburg vs stm
  misc_feature: MA Experiment 108435 PARAMETER Experiment Name: At_stm_Mutants_cDNA_P Parameter: Tissue Value: Shoot Apical Meristem Region
  misc_feature: MA Experiment ID: 108461 Result: Up-regulated in Transcription
  misc_feature: MA Experiment 108461 PARAMETER Experiment Name: At_Germinating_Seeds_cDNA_P Parameter: Age (day) Value: 1 vs. 0
  misc_feature: MA Experiment 108461 PARAMETER Experiment Name: At_Germinating_Seeds_cDNA_P Parameter: Tissue Value: Germinating Seeds
  misc_feature: MA Experiment ID: 108462 Result: Up-regulated in Transcription
  misc_feature: MA Experiment 108462 PARAMETER Experiment Name: At_Germinating_Seeds_cDNA_P Parameter: Age (day) Value: 2 vs. 0
  misc_feature: MA Experiment 108462 PARAMETER Experiment Name: At_Germinating_Seeds_cDNA_P Parameter: Tissue Value: Germinating Seeds
  misc_feature: MA Experiment ID: 108463 Result: Up-regulated in Transcription
  misc_feature: MA Experiment 108463 PARAMETER Experiment Name: At_Germinating_Seeds_cDNA_P Parameter: Age (day) Value: 3 vs. 0
  misc_feature: MA Experiment 108463 PARAMETER Experiment Name: At_Germinating_Seeds_cDNA_P Parameter: Tissue Value: Germinating Seeds
  misc_feature: MA Experiment ID: 108464 Result: Up-regulated in Transcription
  misc_feature: MA Experiment 108464 PARAMETER Experiment Name: At_Germinating_Seeds_cDNA_P Parameter: Age (day) Value: 4 vs. 0
  misc_feature: MA Experiment 108464 PARAMETER Experiment Name: At_Germinating_Seeds_cDNA_P Parameter: Tissue Value: Germinating Seeds
  misc_feature: MA Experiment ID: 108488 Result: Up-regulated in Transcription
  misc_feature: MA Experiment ID: 108573 Result: Down-regulated in Transcription
  misc_feature: MA Experiment 108573 PARAMETER Experiment Name: At_Drought_cDNA_P Parameter: Timepoint (hr) Value: 6
  misc_feature: MA Experiment 108573 PARAMETER Experiment Name: At_Drought_cDNA_P Parameter: Tissue Value: Aerial
  misc_feature: MA Experiment 108573 PARAMETER Experiment Name: At_Drought_cDNA_P Parameter: Treatment Value: Drought vs. No Drought
  misc_feature: MA Experiment ID: 108595 Result: Down-regulated in Transcription
  misc_feature: MA Experiment 108595 PARAMETER Experiment Name: At_Ler-pi_Ovule_cDNA_P Parameter: Plant Line Value: null
  misc_feature: MA Experiment ID: 20000070 Result: Down-regulated in Transcription
  misc_feature: MA Experiment 20000070 PARAMETER Experiment Name: At_100uM_ABA_Mutants_cDNA_P Parameter: Plant Line Value: CS24
  misc_feature: MA Experiment 20000070 PARAMETER Experiment Name: At_100uM_ABA_Mutants_cDNA_P Parameter: Timepoint (hr) Value: 6
  misc_feature: MA Experiment 20000070 PARAMETER Experiment Name: At_100uM_ABA_Mutants_cDNA_P Parameter: Tissue Value: Aerial
  misc_feature: MA Experiment 20000070 PARAMETER Experiment Name: At_100uM_ABA_Mutants_cDNA_P Parameter: Treatment Value: 100uM ABA vs. No Treatment
  misc_feature: MA Experiment ID: 20000071 Result: Down-regulated in Transcription
  misc_feature: MA Experiment 20000071 PARAMETER Experiment Name: At_100uM_ABA_Mutants_cDNA_P Parameter: Plant Line Value: CS8104
  misc_feature: MA Experiment 20000071 PARAMETER Experiment Name: At_100uM_ABA_Mutants_cDNA_P Parameter: Timepoint (hr) Value: 6
  misc_feature: MA Experiment 20000071 PARAMETER Experiment Name: At_100uM_ABA_Mutants_cDNA_P Parameter: Tissue Value: Aerial
  misc_feature: MA Experiment 20000071 PARAMETER Experiment Name: At_100uM_ABA_Mutants_cDNA_P Parameter: Treatment Value: 100uM ABA vs. No Treatment
  misc_feature: MA Experiment ID: 20000072 Result: Down-regulated in Transcription
  misc_feature: MA Experiment 20000072 PARAMETER Experiment Name: At_100uM_ABA_Mutants_cDNA_P Parameter: Plant Line Value: CS8105
  misc_feature: MA Experiment 20000072 PARAMETER Experiment Name: At_100uM_ABA_Mutants_cDNA_P Parameter: Timepoint (hr) Value: 6
  misc_feature: MA Experiment 20000072 PARAMETER Experiment Name: At_100uM_ABA_Mutants_cDNA_P Parameter: Tissue Value: Aerial
  misc_feature: MA Experiment 20000072 PARAMETER Experiment Name: At_100uM_ABA_Mutants_cDNA_P Parameter: Treatment Value: 100uM ABA vs. No Treatment
  misc_feature: MA Experiment ID: 20000087 Result: Down-regulated in Transcription
  misc_feature: MA Experiment 20000087 PARAMETER Experiment Name: At_100uM_ABA_Mutants_cDNA_P Parameter: Plant Line Value: WS
  misc_feature: MA Experiment 20000087 PARAMETER Experiment Name: At_100uM_ABA_Mutants_cDNA_P Parameter: Timepoint (hr) Value: 6
  misc_feature: MA Experiment 20000087 PARAMETER Experiment Name: At_100uM_ABA_Mutants_cDNA_P Parameter: Tissue Value: Aerial
  misc_feature: MA Experiment 20000087 PARAMETER Experiment Name: At_100uM_ABA_Mutants_cDNA_P Parameter: Treatment Value: 100uM ABA vs. No Treatment
  misc_feature: MA Experiment ID: 20000088 Result: Down-regulated in Transcription
  misc_feature: MA Experiment 20000088 PARAMETER Experiment Name: At_100uM_ABA_Mutants_cDNA_P Parameter: Plant Line Value: Landsberg
  misc_feature: MA Experiment 20000088 PARAMETER Experiment Name: At_100uM_ABA_Mutants_cDNA_P Parameter: Timepoint (hr) Value: 6
  misc_feature: MA Experiment 20000088 PARAMETER Experiment Name: At_100uM_ABA_Mutants_cDNA_P Parameter: Tissue Value: Aerial
  misc_feature: MA Experiment 20000088 PARAMETER Experiment Name: At_100uM_ABA_Mutants_cDNA_P Parameter: Treatment Value: 100uM ABA vs. No Treatment
  misc_feature: MA Experiment ID: 20000180 Result: Up-regulated in Transcription
  misc_feature: MA Experiment 20000180 PARAMETER Experiment Name: At_Germinating_Seeds_P Parameter: Age (hr) Value: 24 vs. 0
  misc_feature: MA Experiment 20000180 PARAMETER Experiment Name: At_Germinating_Seeds_P Parameter: Tissue Value: Germinating Seeds
  misc_feature: MA Experiment ID: 20000185 Result: Down-regulated in Transcription
  misc_feature: MA Experiment 20000185 PARAMETER Experiment Name: At_Roots__P Parameter: Age (day) Value: 7 vs. 21
  misc_feature: MA Experiment 20000185 PARAMETER Experiment Name: At_Roots__P Parameter: Organism Value: A. thaliana
  misc_feature: MA Experiment 20000185 PARAMETER Experiment Name: At_Roots__P Parameter: Tissue Value: Roots vs. Whole Plant
  misc_feature: MA Experiment ID: 20000224 Result: Up-regulated in Transcription
  misc_feature: MA Experiment ID: 20000235 Result: Up-regulated in Transcription
  misc_feature: MA Experiment 20000235 PARAMETER Experiment Name: At_Siliques_P Parameter: Age (day) Value: 21
  misc_feature: MA Experiment 20000235 PARAMETER Experiment Name: At_Siliques_P Parameter: Organism Value: A. thaliana
  misc_feature: MA Experiment 20000235 PARAMETER Experiment Name: At_Siliques_P Parameter: Plant Line Value: WS
  misc_feature: MA Experiment 20000235 PARAMETER Experiment Name: At_Siliques_P Parameter: Tissue Value: 5-10mm Siliques vs. Whole Plant
  misc_feature: MA Experiment ID: 20000439 Result: Down-regulated in Transcription
  misc_feature: MA Experiment 20000439 PARAMETER Experiment Name: At_Roots__P Parameter: Age (day) Value: 14 vs. 21
  misc_feature: MA Experiment 20000439 PARAMETER Experiment Name: At_Roots__P Parameter: Organism Value: A. thaliana
  misc_feature: MA Experiment 20000439 PARAMETER Experiment Name: At_Roots__P Parameter: Tissue Value: Roots vs. Whole Plant
  misc_feature: MA Experiment ID: 20000794 Result: Down-regulated in Transcription
  misc_feature: MA Experiment 20000794 PARAMETER Experiment Name: At_Petals_P Parameter: Age (day) Value: 23-25 days
  misc_feature: MA Experiment 20000794 PARAMETER Experiment Name: At_Petals_P Parameter: Plant Line Value: WS
  misc_feature: MA Experiment 20000794 PARAMETER Experiment Name: At_Petals_P Parameter: Tissue Value: Petals vs. Whole plant
  misc_feature: MA Experiment ID: 20001248 Result: Down-regulated in Transcription
  misc_feature: MA Experiment 20001248 PARAMETER Experiment Name: At_Far-red-induction_P Parameter: Age (day) Value: 7
  misc_feature: MA Experiment 20001248 PARAMETER Experiment Name: At_Far-red-induction_P Parameter: Light Value: Far-red vs. White
  misc_feature: MA Experiment 20001248 PARAMETER Experiment Name: At_Far-red-induction_P Parameter: Organism Value: A. thaliana
  misc_feature: MA Experiment 20001248 PARAMETER Experiment Name: At_Far-red-induction_P Parameter: Plant Line Value: Columbia
  misc_feature: MA Experiment 20001248 PARAMETER Experiment Name: At_Far-red-induction_P Parameter: Timepoint (hr) Value: 4
  misc_feature: MA Experiment 20001248 PARAMETER Experiment Name: At_Far-red-induction_P Parameter: Tissue Value: Whole Plant
  misc_feature: MA Experiment ID: 20001450 Result: Down-regulated in Transcription
  misc_feature: MA Experiment 20001450 PARAMETER Experiment Name: At_Far-red-induction_P Parameter: Age (day) Value: 7
  misc_feature: MA Experiment 20001450 PARAMETER Experiment Name: At_Far-red-induction_P Parameter: Light Value: Far-red vs. White
  misc_feature: MA Experiment 20001450 PARAMETER Experiment Name: At_Far-red-induction_P Parameter: Organism Value: A. thaliana
  misc_feature: MA Experiment 20001450 PARAMETER Experiment Name: At_Far-red-induction_P Parameter: Plant Line Value: Columbia
  misc_feature: MA Experiment 20001450 PARAMETER Experiment Name: At_Far-red-induction_P Parameter: Timepoint (hr) Value: 8
  misc_feature: MA Experiment 20001450 PARAMETER Experiment Name: At_Far-red-induction_P Parameter: Tissue Value: Whole Plant
  misc_feature: MA Experiment ID: 20001906 Result: Down-regulated in Transcription
  misc_feature: MA Experiment 20001906 PARAMETER Experiment Name: At_Drought_Reproduction_P Parameter: Age (day) Value: 35
  misc_feature: MA Experiment 20001906 PARAMETER Experiment Name: At_Drought_Reproduction_P Parameter: Organism Value: A. thaliana
  misc_feature: MA Experiment 20001906 PARAMETER Experiment Name: At_Drought_Reproduction_P Parameter: Plant Line Value: WS
  misc_feature: MA Experiment 20001906 PARAMETER Experiment Name: At_Drought_Reproduction_P Parameter: Timepoint (day) Value: 5
  misc_feature: MA Experiment 20001906 PARAMETER Experiment Name: At_Drought_Reproduction_P Parameter: Tissue Value: Siliques
  misc_feature: MA Experiment 20001906 PARAMETER Experiment Name: At_Drought_Reproduction_P Parameter: Treatment Value: Drought vs. No Drought
  misc_feature: MA Experiment ID: 20001908 Result: Down-regulated in Transcription
  misc_feature: MA Experiment 20001908 PARAMETER Experiment Name: At_Drought_Reproduction_P Parameter: Age (day) Value: 40
  misc_feature: MA Experiment 20001908 PARAMETER Experiment Name: At_Drought_Reproduction_P Parameter: Organism Value: A. thaliana
  misc_feature: MA Experiment 20001908 PARAMETER Experiment Name: At_Drought_Reproduction_P Parameter: Plant Line Value: WS
  misc_feature: MA Experiment 20001908 PARAMETER Experiment Name: At_Drought_Reproduction_P Parameter: Timepoint (day) Value: 10
  misc_feature: MA Experiment 20001908 PARAMETER Experiment Name: At_Drought_Reproduction_P Parameter: Tissue Value: Siliques
  misc_feature: MA Experiment 20001908 PARAMETER Experiment Name: At_Drought_Reproduction_P Parameter: Treatment Value: Drought vs. No Drought
aatttctgccttacatatcaaaagatagaacacacacacaaataaagcaaagaaacagaatatctttgagatctcctctttatttggagaagacaaaacacagaacaagaattagaaagaagggagagaaagcaaaaatggcactaagaatgtgggcttcttctacagcaaacgctctcaagctttcttcttctgtttccaagtctcatctctctcctttctccttctctagatgcttctccacagttttggagggtttgaagtatgcaaattcacatgagtgggttaaacatgaaggctctgttgccaccattggcatcactgcccatgctcaggaccatttaggtgaagtggtgtttgttgaactgccagaggacaatacttcagtgagcaaagagaaaagctttggagcagtggagagtgtgaaggcaacaagtgagatcttatcaccaatctcaggtgaaatcattgaggttaacaagaagctcacagaatcacctggcttgatcaactcaagcccctatgaagatggttggatgatcaaagtgaaaccaagtagccccgcggagttggaatctttgatgggtccaaaggaatacaccaagttctgcgaggaggaagatgctgctcactaggagggtttctctctgtcttttatgttccaagttctatcaattctcatgcttgttttctaaatttgcatacactctatgaccaacttcacaaaataagagttcaagaagatgaaacagagacctaacaaacacattaagattttttctttcatatatcttgttatcc

SEQ ID NO: 101837 - protein, 210 aa, Arabidopsis thaliana; identical to SEQ ID NO: 35626
  peptide (1)..(210): Ceres Seq. ID no. 13608794
  misc_feature (86)..(206): Pfam Name: Glycine cleavage H-protein Pfam Description: Glycine cleavage H-protein
  misc_feature (46)..(210): Homolog of NCBI NO: 15226973 NR Description: glycine decarboxylase complex H-protein thaliana] >gi|121075|sp|P25855|GCSH_ARATH Glycine cleavage system protein 1, mitochondrial precursor >gi|25295838|pir||G84767
  misc_feature (46)..(210): Homolog of NCBI NO: 15223217 NR Description: glycine cleavage system H protein precursor [Arabidopsis thaliana] >gi|12644523|sp|Q9LQL0|GCSI_ARATH Probable
  misc_feature (46)..(210): Homolog of NCBI NO: 121080 NR Description: Glycine cleavage system H protein, mitochondrial
  misc_feature (46)..(210): Homolog of NCBI NO: 2147453 NR Description: glycine cleavage system protein H precursor HFC1) - Flaveria cronquistii >gi|7441692|pir||S60199 glycine
  misc_feature (46)..(210): Homolog of NCBI NO: 2499417 NR Description: Glycine cleavage system H protein, mitochondrial
  misc_feature (46)..(210): Homolog of NCBI NO: 2887286 NR Description: H protein [Flaveria anomala]
  misc_feature (46)..(210): Homolog of NCBI NO: 1346118 NR Description: Glycine cleavage system H protein, mitochondrial >gi|2119599|pir||S60194 glycine cleavage system protein H
  misc_feature (46)..(210): Homolog of NCBI NO: 3688309 NR Description: H-Protein precursor [Flaveria pringlei]
  misc_feature (47)..(210): Homolog of NCBI NO: 2119600 NR Description: glycine cleavage system protein H precursor
  misc_feature (46)..(209): Homolog of NCBI NO: 1362140 NR Description: H-protein precursor - Flaveria trinervia

SEQ ID NO: 101838 - protein, 165 aa, Arabidopsis thaliana; identical to SEQ ID NO: 35627
  peptide (1)..(165): Ceres Seq. ID no. 13608795
  misc_feature (41)..(161): Pfam Name: Glycine cleavage H-protein Pfam Description: Glycine cleavage H-protein
  misc_feature (1)..(165): Homolog of NCBI NO: 15226973 NR Description: glycine decarboxylase complex H-protein thaliana] >gi|121075|sp|P25855|GCSH_ARATH Glycine cleavage system protein 1, mitochondrial precursor >gi|25295838|pir||G84767
  misc_feature (1)..(165): Homolog of NCBI NO: 15223217 NR Description: glycine cleavage system H protein precursor [Arabidopsis thaliana] >gi|12644523|sp|Q9LQL0|GCSI_ARATH Probable
  misc_feature (1)..(165): Homolog of NCBI NO: 121080 NR Description: Glycine cleavage system H protein, mitochondrial
  misc_feature (1)..(165): Homolog of NCBI NO: 2147453 NR Description: glycine cleavage system protein H precursor HFC1) - Flaveria cronquistii >gi|7441692|pir||S60199 glycine
  misc_feature (1)..(165): Homolog of NCBI NO: 2499417 NR Description: Glycine cleavage system H protein, mitochondrial
  misc_feature (1)..(165): Homolog of NCBI NO: 2887286 NR Description: H protein [Flaveria anomala]
  misc_feature (1)..(165): Homolog of NCBI NO: 1346118 NR Description: Glycine cleavage system H protein, mitochondrial >gi|2119599|pir||S60194 glycine cleavage system protein H
  misc_feature (1)..(165): Homolog of NCBI NO: 3688309 NR Description: H-Protein precursor [Flaveria pringlei]
  misc_feature (2)..(165): Homolog of NCBI NO: 2119600 NR Description: glycine cleavage system protein H precursor
  misc_feature (1)..(164): Homolog of NCBI NO: 1362140 NR Description: H-protein precursor - Flaveria trinervia

SEQ ID NO: 101839 - protein, 161 aa, Arabidopsis thaliana; identical to SEQ ID NO: 35628
  peptide (1)..(161): Ceres Seq. ID no. 13608796
  misc_feature (37)..(157): Pfam Name: Glycine cleavage H-protein Pfam Description: Glycine cleavage H-protein
  misc_feature (1)..(161): Homolog of NCBI NO: 15226973 NR Description: glycine decarboxylase complex H-protein thaliana] >gi|121075|sp|P25855|GCSH_ARATH Glycine cleavage system protein 1, mitochondrial precursor >gi|25295838|pir||G84767
  misc_feature (1)..(161): Homolog of NCBI NO: 15223217 NR Description: glycine cleavage system H protein precursor [Arabidopsis thaliana] >gi|12644523|sp|Q9LQL0|GCSI_ARATH Probable
  misc_feature (1)..(161): Homolog of NCBI NO: 121080 NR Description: Glycine cleavage system H protein, mitochondrial
  misc_feature (1)..(161): Homolog of NCBI NO: 2147453 NR Description: glycine cleavage system protein H precursor HFC1) - Flaveria cronquistii >gi|7441692|pir||S60199 glycine
  misc_feature (1)..(161): Homolog of NCBI NO: 2499417 NR Description: Glycine cleavage system H protein, mitochondrial
  misc_feature (1)..(161): Homolog of NCBI NO: 2887286 NR Description: H protein [Flaveria anomala]
  misc_feature (1)..(161): Homolog of NCBI NO: 1346118 NR Description: Glycine cleavage system H protein, mitochondrial >gi|2119599|pir||S60194 glycine cleavage system protein H
  misc_feature (1)..(161): Homolog of NCBI NO: 3688309 NR Description: H-Protein precursor [Flaveria pringlei]
  misc_feature (1)..(161): Homolog of NCBI NO: 2119600 NR Description: glycine cleavage system protein H precursor
  misc_feature (1)..(160): Homolog of NCBI NO: 1362140 NR Description: H-protein precursor - Flaveria trinervia

SEQ ID NO: 101840 - DNA, 1424 bp, Arabidopsis thaliana
  misc_feature (1)..(1424): Ceres Seq. ID no. 13608797
  misc_feature: MA Experiment ID: 108488 Result: Up-regulated in Transcription
  misc_feature: MA Experiment ID: 108579 Result: Down-regulated in Transcription
  misc_feature: MA Experiment 108579 PARAMETER Experiment Name: At_4deg_Cold_cDNA_P Parameter: Temperature (deg C) Value: 4 vs. 22
  misc_feature: MA Experiment 108579 PARAMETER Experiment Name: At_4deg_Cold_cDNA_P Parameter: Timepoint (hr) Value: 6
  misc_feature: MA Experiment 108579 PARAMETER Experiment Name: At_4deg_Cold_cDNA_P Parameter: Tissue Value: Aerial
  misc_feature: MA Experiment ID: 108595 Result: Down-regulated in Transcription
  misc_feature: MA Experiment 108595 PARAMETER Experiment Name: At_Ler-pi_Ovule_cDNA_P Parameter: Plant Line Value: null
  misc_feature: MA Experiment ID: 20000111 Result: Up-regulated in Transcription
  misc_feature: MA Experiment 20000111 PARAMETER Experiment Name: At_42deg_Heat_cDNA_P Parameter: Temperature (deg C) Value: 42 vs. 22
  misc_feature: MA Experiment 20000111 PARAMETER Experiment Name: At_42deg_Heat_cDNA_P Parameter: Timepoint (hr) Value: 6
  misc_feature: MA Experiment 20000111 PARAMETER Experiment Name: At_42deg_Heat_cDNA_P Parameter: Tissue Value: Aerial
  misc_feature: MA Experiment ID: 20000113 Result: Up-regulated in Transcription
  misc_feature: MA Experiment 20000113 PARAMETER Experiment Name: At_42deg_Heat_cDNA_P Parameter: Temperature (deg C) Value: 42 vs. 22
  misc_feature: MA Experiment 20000113 PARAMETER Experiment Name: At_42deg_Heat_cDNA_P Parameter: Timepoint (hr) Value: 8
  misc_feature: MA Experiment 20000113 PARAMETER Experiment Name: At_42deg_Heat_cDNA_P Parameter: Tissue Value: Aerial
  misc_feature: MA Experiment ID: 20000180 Result: Up-regulated in Transcription
  misc_feature: MA Experiment 20000180 PARAMETER Experiment Name: At_Germinating_Seeds_P Parameter: Age (hr) Value: 24 vs. 0
  misc_feature: MA Experiment 20000180 PARAMETER Experiment Name: At_Germinating_Seeds_P Parameter: Tissue Value: Germinating Seeds
  misc_feature: MA Experiment ID: 20000184 Result: Up-regulated in Transcription
  misc_feature: MA Experiment 20000184 PARAMETER Experiment Name: At_Shoots__P Parameter: Age (day) Value: 7
  misc_feature: MA Experiment 20000184 PARAMETER Experiment Name: At_Shoots__P Parameter: Tissue Value: Shoots vs. Whole Plant
  misc_feature: MA Experiment ID: 20000438 Result: Up-regulated in Transcription
  misc_feature: MA Experiment 20000438 PARAMETER Experiment Name: At_Shoots__P Parameter: Age (day) Value: 14
  misc_feature: MA Experiment 20000438 PARAMETER Experiment Name: At_Shoots__P Parameter: Tissue Value: Shoots vs. Whole Plant
acaactctgttccaagtcttatcctttcatcatcatcatcacttaccttcttcacagagagagagcttcatcatcatatgtaatgtgagatgtctcttgaacaatgcaacaagaagctctctctttcctctcgtcctctctcccttcccttcaccacaattttccctctctttctcgcctccgcttcaacaattttcccgcactttccttcaaaccaaacacttcatcatcatcttcatcattcttcaaatccccagatataccctctctctcctccaccacaacaacaacaacaaccaccgaaaccctagaatcctcaatccacgagaaactcatttacctcgattcactcggaatcgatttcctaaccctaatcaaccgtcatccacctctcctctccaccgctctctccgccgttgaatcagtcgtcgattacatgaccactccaccaataaacttcactttacaagactttcgccgcctcgtctcaatgtgtccagagcttctcacttcacctttaacctcacacacaatcccagtcatcactttcctcctccgtgaagtcggcgttgactctatctttgacctccgtcaagctttacgacgtcgtcctcgtcttctcgcttgtagcgtcgatcaccagcttagaccaacgctttactttctccagagaatcggaatcttagatccgcataaacatacgtatcttctctcttgtagcgttgacaataaactcgtaccacggattgattacttcgagaagttaggattctcgcggcggagcgccaccgcgatgtttaagagattcccgcagctgtttaattacagtattgctgagaattatgagccgaagttgaagtatttgatggtggagatggggagagatgttagagaggttcttgagtttcctcagtatttctcgtttagtttggagaatcggattaaaccgagacatgaagcttgtgctgcgaaaggtgtgaggtttccattgccggtgatgttgaagactaatgaagctggttttagagatacattggaggtacatttttgtaatgaatgatgatgaagaactcaatgaatgaagaaaccagcctctgcctacattttgagacacacacagggatggtgagttaaatcttgataagagaaagaatgttcatttacaattcacgattccgatgtatttcggtctagttattgttagtgaacgagaaatcaagtgtatgtaagtccagaaaccgtgtagagttgcgatttgcagagaattgtgattctacaattggaggcaagatgatgaatgtgtgaactgattagcgtaacggtttagttattggtcttaagtcttaacagggagaattggttctagagcttttagtccctttgatggttcgtgaaatgccagtggtctatgatcggattctctg

SEQ ID NO: 101841 - protein, 318 aa, Arabidopsis thaliana
  peptide (1)..(318): Ceres Seq. ID no. 13608798
  misc_feature (40)..(309): Pfam Name: mTERF Pfam Description: mTERF
  misc_feature (1)..(318): Homolog of NCBI NO: 30686636 NR Description: expressed protein [Arabidopsis thaliana]
  misc_feature (1)..(318): Homolog of NCBI NO: 21537209 NR Description: unknown [Arabidopsis thaliana]
  misc_feature (1)..(313): Homolog of NCBI NO: 30686631 NR Description: expressed protein [Arabidopsis thaliana]
  misc_feature (37)..(311): Homolog of NCBI NO: 15226787 NR Description: expressed protein [Arabidopsis thaliana]
  misc_feature (54)..(311): Homolog of NCBI NO: 15227524 NR Description: hypothetical protein [Arabidopsis thaliana]
  misc_feature (54)..(311): Homolog of NCBI NO: 28204784 NR Description: hypothetical protein [Arabidopsis thaliana]
  misc_feature (83)..(311): Homolog of NCBI NO: 28392870 NR Description: unknown protein [Arabidopsis thaliana]
  misc_feature (46)..(307): Homolog of NCBI NO: 15230219 NR Description: hypothetical protein [Arabidopsis thaliana] gb|AAC26693.1~gene_id:MCB22.4~similar to unknown protein
  misc_feature (79)..(307): Homolog of NCBI NO: 33589698 NR Description: At1g78930 [Arabidopsis thaliana]
  misc_feature (79)..(307): Homolog of NCBI NO: 30699372 NR Description: expressed protein [Arabidopsis thaliana]
MQQEALSFLSSSLPSLHHNFPSLSRLRFNNFPALSFKPNTSSSSSSFFKSPDIPSLSSTTTTTTTTETLESSIHEKLIYLDSLGIDFLTLINRHPPLLSTALSAVESVVDYMTTPPINFTLQDFRRLVSMCPELLTSPLTSHTIPVITFLLREVGVDSIFDLRQALRRRPRLLACSVDHQLRPTLYFLQRIGILDPHKHTYLLSCSVDNKLVPRIDYFEKLGFSRRSATAMFKRFPQLFNYSIAENYEPKLKYLMVEMGRDVREVLEFPQYFSFSLENRIKPRHEACAAKGVRFPLPVMLKTNEAGFRDTLEVHFCNE

SEQ ID NO: 101842 - protein, 207 aa, Arabidopsis thaliana
  peptide (1)..(207): Ceres Seq. ID no. 13608799
  misc_feature (1)..(198): Pfam Name: mTERF Pfam Description: mTERF
  misc_feature (1)..(207): Homolog of NCBI NO: 30686636 NR Description: expressed protein [Arabidopsis thaliana]
  misc_feature (1)..(207): Homolog of NCBI NO: 21537209 NR Description: unknown [Arabidopsis thaliana]
  misc_feature (1)..(202): Homolog of NCBI NO: 30686631 NR Description: expressed protein [Arabidopsis thaliana]
  misc_feature (1)..(200): Homolog of NCBI NO: 15226787 NR Description: expressed protein [Arabidopsis thaliana]
  misc_feature (1)..(200): Homolog of NCBI NO: 15227524 NR Description: hypothetical protein [Arabidopsis thaliana]
  misc_feature (1)..(200): Homolog of NCBI NO: 28204784 NR Description: hypothetical protein [Arabidopsis thaliana]
  misc_feature (1)..(200): Homolog of NCBI NO: 28392870 NR Description: unknown protein [Arabidopsis thaliana]
  misc_feature (1)..(196): Homolog of NCBI NO: 15230219 NR Description: hypothetical protein [Arabidopsis thaliana] gb|AAC26693.1~gene_id:MCB22.4~similar to unknown protein
  misc_feature (1)..(196): Homolog of NCBI NO: 33589698 NR Description: At1g78930 [Arabidopsis thaliana]
  misc_feature (1)..(196): Homolog of NCBI NO: 30699372 NR Description: expressed protein [Arabidopsis thaliana]
MTTPPINFTLQDFRRLVSMCPELLTSPLTSHTIPVITFLLREVGVDSIFDLRQALRRRPRLLACSVDHQLRPTLYFLQRIGILDPHKHTYLLSCSVDNKLVPRIDYFEKLGFSRRSATAMFKRFPQLFNYSIAENYEPKLKYLMVEMGRDVREVLEFPQYFSFSLENRIKPRHEACAAKGVRFPLPVMLKTNEAGFRDTLEVHFCNE

SEQ ID NO: 101843 - protein, 189 aa, Arabidopsis thaliana; identical to SEQ ID NO: 41769
  peptide (1)..(189): Ceres Seq. ID no. 13608800
  misc_feature (1)..(180): Pfam Name: mTERF Pfam Description: mTERF
  misc_feature (1)..(189): Homolog of NCBI NO: 30686636 NR Description: expressed protein [Arabidopsis thaliana]
  misc_feature (1)..(189): Homolog of NCBI NO: 21537209 NR Description: unknown [Arabidopsis thaliana]
  misc_feature (1)..(184): Homolog of NCBI NO: 30686631 NR Description: expressed protein [Arabidopsis thaliana]
  misc_feature (1)..(182): Homolog of NCBI NO: 15226787 NR Description: expressed protein [Arabidopsis thaliana]
  misc_feature (1)..(182): Homolog of NCBI NO: 15227524 NR Description: hypothetical protein [Arabidopsis thaliana]
  misc_feature (1)..(182): Homolog of NCBI NO: 28204784 NR Description: hypothetical protein [Arabidopsis thaliana]
  misc_feature (1)..(182): Homolog of NCBI NO: 28392870 NR Description: unknown protein [Arabidopsis thaliana]
  misc_feature (1)..(178): Homolog of NCBI NO: 15230219 NR Description: hypothetical protein [Arabidopsis thaliana] gb|AAC26693.1~gene_id:MCB22.4~similar to unknown protein
  misc_feature (1)..(178): Homolog of NCBI NO: 33589698 NR Description: At1g78930 [Arabidopsis thaliana]
  misc_feature (1)..(178): Homolog of NCBI NO: 30699372 NR Description: expressed protein [Arabidopsis thaliana]

SEQ ID NO: 101844 - DNA, 1605 bp, Arabidopsis thaliana
  misc_feature (1)..(1605): Ceres Seq. ID no. 13608809
  misc_feature: MA Experiment ID: 20001905 Result: Down-regulated in Transcription
  misc_feature: MA Experiment 20001905 PARAMETER Experiment Name: At_Drought_Reproduction_P Parameter: Age (day) Value: 40
  misc_feature: MA Experiment 20001905 PARAMETER Experiment Name: At_Drought_Reproduction_P Parameter: Organism Value: A. thaliana
  misc_feature: MA Experiment 20001905 PARAMETER Experiment Name: At_Drought_Reproduction_P Parameter: Plant Line Value: WS
  misc_feature: MA Experiment 20001905 PARAMETER Experiment Name: At_Drought_Reproduction_P Parameter: Timepoint (day) Value: 10
  misc_feature: MA Experiment 20001905 PARAMETER Experiment Name: At_Drought_Reproduction_P Parameter: Tissue Value: Rosettes
  misc_feature: MA Experiment 20001905 PARAMETER Experiment Name: At_Drought_Reproduction_P Parameter: Treatment Value: Drought vs. No Drought
gacaaacagagagtgatgcgatggaacaagaagaacgttatcagtctcgtctcaaagtctcatcatcttccggcgccgattacgccaccgttacctgagatttaccgaatacctaatcctccaccaaagcttccggagatctcaattcctccgacacttacgctctctccatctcccaaacactccaatttcgtcaatttcctcgagaacaatctccctcaccatcaaacactaacgccacaaactcttcttggattcctccgttccaagatccgtaaccatccgctctacgctcattatgacttcgccgtctttaattgggcagctacactcgacactttccgtcatgatcacgattctttcctctggatgtcgagatcactcgccgccacgcaccggtttgacgatctttatcgtcttctctcttttgtagctgcgaatccatgtccttgttcctcaggtatattctcttgtccagagcttgaacctattttccgatccgccattgatgcgtattgtagagctaggaaaatggattatgctttgttagcgtttgatactatgaagagattgatcgatggtaaaccaaatgttggagtttataacactgttgtgaatggatatgtgaaatctggagatatggataaggctttaaggttttaccagaggatgggaaaggaaagagcaaagccagatgtatgcacgtttaacattctcatcaatggttattgtagaagctctaagtttgatttggcattggatttgttcagggagatgaaggagaaaggttgtgaaccgaatgtggttagcttcaacactcttattagagggtttttgagcagtggtaaaatcgaggaaggtgttaaaatggcttatgagatgattgagctaggttgtagattctcagaagctacttgtgagattcttgttgatgggttgtgtagagaaggtcgggttgacgatgcttgtggattggtgctcgatcttttgaacaagagggttttacctagtgagtttgattatggtagtttggttgagaaactctgcggagaaaacaaggcggttagagcaatggagatgatggaggagctgtggaagaaaggccaaaccccatgtttcattgcttgtactacactcgtcgaagggttgaggaaatcaggaagaacagagaaagcgtcagggtttatggagaagatgatgaatgcaggaattcttcccgatagtgtgacatttaacttgcttcttcgggatctctgcagttctgatcattctactgatgcaaacagattgagacttttggcatcaagcaaaggatatgaacccgatgagacaacgtaccatgttttggtttcggggttcacgaaagaagggagaagaaaggaaggagaagttctagtgaacgagatgttggataaagatatgttgcctgatatctttacatataatagattgatggatggcttgtcctgcactggaaaattctcaaggaaacaagtccggatgttgtaacctgtgtttgatctgtgtaaactagacccaagctatatctatgtatcaacaaattttattttgaacatatgaaatggaaaccaagttggttctttg

SEQ ID NO: 101845 - protein, 502 aa, Arabidopsis thaliana
  peptide (1)..(502): Ceres Seq. ID no. 13608810
  misc_feature (339)..(373): Pfam Name: PPR repeat Pfam Description: PPR repeat
  misc_feature (6)..(502): Homolog of NCBI NO: 15227609 NR Description: pentatricopeptide (PPR) repeat-containing protein
  misc_feature (15)..(488): Homolog of NCBI NO: 20804895 NR Description: P0497A05.20 [Oryza sativa (japonica
  misc_feature (169)..(493): Homolog of NCBI NO: 15218325 NR Description: pentatricopeptide (PPR) repeat-containing protein
  misc_feature (164)..(496): Homolog of NCBI NO: 34896698 NR Description: putative pentatricopeptide repeat protein [Oryza
  misc_feature (164)..(487): Homolog of NCBI NO: 15218241 NR Description: pentatricopeptide (PPR) repeat-containing protein thaliana] >gi|25402563|pir||F86230 hypothetical protein
  misc_feature (52)..(502): Homolog of NCBI NO: 15231863 NR Description: pentatricopeptide (PPR) repeat-containing protein
  misc_feature (157)..(496): Homolog of NCBI NO: 34015356 NR Description: putative fertility restorer [Oryza sativa
  misc_feature (169)..(496): Homolog of NCBI NO: 22329519 NR Description: pentatricopeptide (PPR) repeat-containing protein
  misc_feature (159)..(487): Homolog of NCBI NO: 34902570 NR Description: Putative indole-3-acetate
  misc_feature (169)..(496): Homolog of NCBI NO: 25402738 NR Description: protein T12C24.22 [imported] - Arabidopsis >gi|9502386|gb|AAF88093.1|AC025417_21 T12C24.22 [Arabidopsis
DKQRVMRWNKKNVISLVSKSHHLPAPITPPLPEIYRIPNPPPKLPEISIPPTLTLSPSPKHSNFVNFLENNLPHHQTLTPQTLLGFLRSKIRNHPLYAHYDFAVFNWAATLDTFRHDHDSFLWMSRSLAATHRFDDLYRLLSFVAANPCPCSSGIFSCPELEPIFRSAIDAYCRARKMDYALLAFDTMKRLIDGKPNVGVYNTVVNGYVKSGDMDKALRFYQRMGKERAKPDVCTFNILINGYCRSSKFDLALDLFREMKEKGCEPNVVSFNTLIRGFLSSGKIEEGVKMAYEMIELGCRFSEATCEILVDGLCREGRVDDACGLVLDLLNKRVLPSEFDYGSLVEKLCGENKAVRAMEMMEELWKKGQTPCFIACTTLVEGLRKSGRTEKASGFMEKMMNAGILPDSVTFNLLLRDLCSSDHSTDANRLRLLASSKGYEPDETTYHVLVSGFTKEGRRKEGEVLVNEMLDKDMLPDIFTYNRLMDGLSCTGKFSRKQVRML

SEQ ID NO: 101846 - protein, 497 aa, Arabidopsis thaliana
  peptide (1)..(497): Ceres Seq. ID no. 13608811
  misc_feature (334)..(368): Pfam Name: PPR repeat Pfam Description: PPR repeat
  misc_feature (1)..(497): Homolog of NCBI NO: 15227609 NR Description: pentatricopeptide (PPR) repeat-containing protein
  misc_feature (10)..(483): Homolog of NCBI NO: 20804895 NR Description: P0497A05.20 [Oryza sativa (japonica
  misc_feature (164)..(488): Homolog of NCBI NO: 15218325 NR Description: pentatricopeptide (PPR) repeat-containing protein
  misc_feature (159)..(491): Homolog of NCBI NO: 34896698 NR Description: putative pentatricopeptide repeat protein [Oryza
  misc_feature (159)..(482): Homolog of NCBI NO: 15218241 NR Description: pentatricopeptide (PPR) repeat-containing protein thaliana] >gi|25402563|pir||F86230 hypothetical protein
  misc_feature (47)..(497): Homolog of NCBI NO: 15231863 NR Description: pentatricopeptide (PPR) repeat-containing protein
  misc_feature (152)..(491): Homolog of NCBI NO: 34015356 NR Description: putative fertility restorer [Oryza sativa
  misc_feature (164)..(491): Homolog of NCBI NO: 22329519 NR Description: pentatricopeptide (PPR) repeat-containing protein
  misc_feature (154)..(482): Homolog of NCBI NO: 34902570 NR Description: Putative indole-3-acetate
  misc_feature (164)..(491): Homolog of NCBI NO: 25402738 NR Description: protein T12C24.22 [imported] - Arabidopsis >gi|9502386|gb|AAF88093.1|AC025417_21 T12C24.22 [Arabidopsis
MRWNKKNVISLVSKSHHLPAPITPPLPEIYRIPNPPPKLPEISIPPTLTLSPSPKHSNFVNFLENNLPHHQTLTPQTLLGFLRSKIRNHPLYAHYDFAVFNWAATLDTFRHDHDSFLWMSRSLAATHRFDDLYRLLSFVAANPCPCSSGIFSCPELEPIFRSAIDAYCRARKMDYALLAFDTMKRLIDGKPNVGVYNTVVNGYVKSGDMDKALRFYQRMGKERAKPDVCTFNILINGYCRSSKFDLALDLFREMKEKGCEPNVVSFNTLIRGFLSSGKIEEGVKMAYEMIELGCRFSEATCEILVDGLCREGRVDDACGLVLDLLNKRVLPSEFDYGSLVEKLCGENKAVRAMEMMEELWKKGQTPCFIACTTLVEGLRKSGRTEKASGFMEKMMNAGILPDSVTFNLLLRDLCSSDHSTDANRLRLLASSKGYEPDETTYHVLVSGFTKEGRRKEGEVLVNEMLDKDMLPDIFTYNRLMDGLSCTGKFSRKQVRML

SEQ ID NO: 101847 - protein, 379 aa, Arabidopsis thaliana
  peptide (1)..(379): Ceres Seq. ID no. 13608812
  misc_feature (216)..(250): Pfam Name: PPR repeat Pfam Description: PPR repeat
  misc_feature (1)..(379): Homolog of NCBI NO: 15227609 NR Description: pentatricopeptide (PPR) repeat-containing protein
  misc_feature (1)..(365): Homolog of NCBI NO: 20804895 NR Description: P0497A05.20 [Oryza sativa (japonica
  misc_feature (46)..(370): Homolog of NCBI NO: 15218325 NR Description: pentatricopeptide (PPR) repeat-containing protein
  misc_feature (41)..(373): Homolog of NCBI NO: 34896698 NR Description: putative pentatricopeptide repeat protein [Oryza
  misc_feature (41)..(364): Homolog of NCBI NO: 15218241 NR Description: pentatricopeptide (PPR) repeat-containing protein thaliana] >gi|25402563|pir||F86230 hypothetical protein
  misc_feature (1)..(379): Homolog of NCBI NO: 15231863 NR Description: pentatricopeptide (PPR) repeat-containing protein
  misc_feature (34)..(373): Homolog of NCBI NO: 34015356 NR Description: putative fertility restorer [Oryza sativa
  misc_feature (46)..(373): Homolog of NCBI NO: 22329519 NR Description: pentatricopeptide (PPR) repeat-containing protein
  misc_feature (36)..(364): Homolog of NCBI NO: 34902570 NR Description: Putative indole-3-acetate
  misc_feature (46)..(373): Homolog of NCBI NO: 25402738 NR Description: protein T12C24.22 [imported] - Arabidopsis >gi|9502386|gb|AAF88093.1|AC025417_21 T12C24.22 [Arabidopsis
MSRSLAATHRFDDLYRLLSFVAANPCPCSSGIFSCPELEPIFRSAIDAYCRARKMDYALLAFDTMKRLIDGKPNVGVYNTVVNGYVKSGDMDKALRFYQRMGKERAKPDVCTFNILINGYCRSSKFDLALDLFREMKEKGCEPNVVSFNTLIRGFLSSGKIEEGVKMAYEMIELGCRFSEATCEILVDGLCREGRVDDACGLVLDLLNKRVLPSEFDYGSLVEKLCGENKAVRAMEMMEELWKKGQTPCFIACTTLVEGLRKSGRTEKASGFMEKMMNAGILPDSVTFNLLLRDLCSSDHSTDANRLRLLASSKGYEPDETTYHVLVSGFTKEGRRKEGEVLVNEMLDKDMLPDIFTYNRLMDGLSCTGKFSRKQVRML

SEQ ID NO: 101848 - DNA, 1149 bp, Arabidopsis thaliana
  misc_feature (1)..(1149): Ceres Seq. ID no. 13608817
  misc_feature: MA Experiment ID: 20000180 Result: Up-regulated in Transcription
  misc_feature: MA Experiment 20000180 PARAMETER Experiment Name: At_Germinating_Seeds_P Parameter: Age (hr) Value: 24 vs. 0
  misc_feature: MA Experiment 20000180 PARAMETER Experiment Name: At_Germinating_Seeds_P Parameter: Tissue Value: Germinating Seeds
  misc_feature: MA Experiment ID: 20000184 Result: Up-regulated in Transcription
  misc_feature: MA Experiment 20000184 PARAMETER Experiment Name: At_Shoots__P Parameter: Age (day) Value: 7
  misc_feature: MA Experiment 20000184 PARAMETER Experiment Name: At_Shoots__P Parameter: Tissue Value: Shoots vs. Whole Plant
  misc_feature: MA Experiment ID: 20000185 Result: Down-regulated in Transcription
  misc_feature: MA Experiment 20000185 PARAMETER Experiment Name: At_Roots__P Parameter: Age (day) Value: 7 vs. 21
  misc_feature: MA Experiment 20000185 PARAMETER Experiment Name: At_Roots__P Parameter: Organism Value: A. thaliana
  misc_feature: MA Experiment 20000185 PARAMETER Experiment Name: At_Roots__P Parameter: Tissue Value: Roots vs. Whole Plant
  misc_feature: MA Experiment ID: 20000438 Result: Up-regulated in Transcription
  misc_feature: MA Experiment 20000438 PARAMETER Experiment Name: At_Shoots__P Parameter: Age (day) Value: 14
  misc_feature: MA Experiment 20000438 PARAMETER Experiment Name: At_Shoots__P Parameter: Tissue Value: Shoots vs. Whole Plant
  misc_feature: MA Experiment ID: 20000439 Result: Down-regulated in Transcription
  misc_feature: MA Experiment 20000439 PARAMETER Experiment Name: At_Roots__P Parameter: Age (day) Value: 14 vs. 21
  misc_feature: MA Experiment 20000439 PARAMETER Experiment Name: At_Roots__P Parameter: Organism Value: A. thaliana
  misc_feature: MA Experiment 20000439 PARAMETER Experiment Name: At_Roots__P Parameter: Tissue Value: Roots vs. Whole Plant
  misc_feature: MA Experiment ID: 20000573 Result: Down-regulated in Transcription
  misc_feature: MA Experiment 20000573 PARAMETER Experiment Name: At_100uM_ABA_Mutants__P Parameter: Organism Value: A. thaliana
  misc_feature: MA Experiment 20000573 PARAMETER Experiment Name: At_100uM_ABA_Mutants__P Parameter: Plant Line Value: CS22 vs. Ler wt
  misc_feature: MA Experiment 20000573 PARAMETER Experiment Name: At_100uM_ABA_Mutants__P Parameter: Timepoint (hr) Value: N/A
  misc_feature: MA Experiment 20000573 PARAMETER Experiment Name: At_100uM_ABA_Mutants__P Parameter: Tissue Value: Whole Plant
  misc_feature: MA Experiment 20000573 PARAMETER Experiment Name: At_100uM_ABA_Mutants__P Parameter: Treatment Value: None
  misc_feature: MA Experiment ID: 20001248 Result: Down-regulated in Transcription
  misc_feature: MA Experiment 20001248 PARAMETER Experiment Name: At_Far-red-induction_P Parameter: Age (day) Value: 7
  misc_feature: MA Experiment 20001248 PARAMETER Experiment Name: At_Far-red-induction_P Parameter: Light Value: Far-red vs. White
  misc_feature: MA Experiment 20001248 PARAMETER Experiment Name: At_Far-red-induction_P Parameter: Organism Value: A. thaliana
  misc_feature: MA Experiment 20001248 PARAMETER Experiment Name: At_Far-red-induction_P Parameter: Plant Line Value: Columbia
  misc_feature: MA Experiment 20001248 PARAMETER Experiment Name: At_Far-red-induction_P Parameter: Timepoint (hr) Value: 4
  misc_feature: MA Experiment 20001248 PARAMETER Experiment Name: At_Far-red-induction_P Parameter: Tissue Value: Whole Plant
  misc_feature: MA Experiment ID: 20001558 Result: Up-regulated in Transcription
  misc_feature: MA Experiment 20001558 PARAMETER Experiment Name: At_Drought_Soil_Dry_P Parameter: Age (day) Value: 27
  misc_feature: MA Experiment 20001558 PARAMETER Experiment Name: At_Drought_Soil_Dry_P Parameter: Organism Value: A. thaliana
  misc_feature: MA Experiment 20001558 PARAMETER Experiment Name: At_Drought_Soil_Dry_P Parameter: Plant Line Value: WS
  misc_feature: MA Experiment 20001558 PARAMETER Experiment Name: At_Drought_Soil_Dry_P Parameter: Post Timepoint (hr) Value: 6
  misc_feature: MA Experiment 20001558 PARAMETER Experiment Name: At_Drought_Soil_Dry_P Parameter: Post-Treatment Value: Re-Water vs. No Drought
  misc_feature: MA Experiment 20001558 PARAMETER Experiment Name: At_Drought_Soil_Dry_P Parameter: Timepoint (day) Value: 13
  misc_feature: MA Experiment 20001558 PARAMETER Experiment Name: At_Drought_Soil_Dry_P Parameter: Treatment Value: Drought vs. No Drought
  misc_feature: MA Experiment ID: 20001910 Result: Down-regulated in Transcription
  misc_feature: MA Experiment 20001910 PARAMETER Experiment Name: At_Drought_Reproduction_P Parameter: Age (day) Value: 37
  misc_feature: MA Experiment 20001910 PARAMETER Experiment Name: At_Drought_Reproduction_P Parameter: Organism Value: A. thaliana
  misc_feature: MA Experiment 20001910 PARAMETER Experiment Name: At_Drought_Reproduction_P Parameter: Plant Line Value: WS
  misc_feature: MA Experiment 20001910 PARAMETER Experiment Name: At_Drought_Reproduction_P Parameter: Timepoint (day) Value: 7
  misc_feature: MA Experiment 20001910 PARAMETER Experiment Name: At_Drought_Reproduction_P Parameter: Tissue Value: Flowers
  misc_feature: MA Experiment 20001910 PARAMETER Experiment Name: At_Drought_Reproduction_P Parameter: Treatment Value: Drought vs. No Drought
cacacaaaagaagaaaaagagagaaatgggtaactctttgatctctcttctctcaatcttccacttgctggtgttatggggatcctcagtgaatgcctattggccaccatcacctggttattggccaagctccaaggttggttccctcaacttctacaaaggttttaggaatctttggggtcctcagcatcagagaatggaccaaaatgccctcaccatctggcttgatagaacctcaggaagtggattcaagtcagtgaagccattcagatcaggctactttggagcaaacatcaaactccaacctggctacactgctggagtcatcacatctctctatctatcaaataatgaggcacatccagggttccatgatgaggtagacatagaatttttggggacaacatttgggaagccttacacacttcagacaaatgtgtatattagaggaagtggtgatgggaaaatcattggccgtgagatgaagtttcgcttgtggtttgatccaactaaagattttcaccattatgctattctttggagccctagagaaatcatatttttggtggatgatattcccataagaagatacccaaagaagagtgcgtctacatttcctttaagaccaatgtggctttatggttccatatgggatgcttcttcttgggcaacggaagacggtaaatacaaagccgactataaatatcaacctttcactgctaaatacaccaattttaaagcgctcggctgcaccgcctactcgtcagctcggtgctatccgttgtcggcttcgccataccgttctggcggattaacccgacaacaacaccaagccatgagatgggttcaaacacatagtatggtatacaattattgcaaagattataagcgagaccattctttaacgccggaatgttggcgttaggaaatattcgatgaaagtcccaaagtttgagagttttaatcacatcaaagttaataccagaaagagcttggtacaattttgggatttttttcattactattattatgtggttggttgtttcacgaaaataaattttcttttttttttgacttatcatcttttcttatgtaaatgtatccagtacggtaccatattgttttgtcaatcgtctgtgactgtgtctc

SEQ ID NO: 101849 - protein, 307 aa, Arabidopsis thaliana; identical to SEQ ID NO: 27892
  peptide (1)..(307): Ceres Seq. ID no. 13608818
  misc_feature (51)..(235): Pfam Name: Glycosyl hydrolases family 16 Pfam Description: Glycosyl hydrolases family 16
  misc_feature (9)..(307): Homolog of NCBI NO: 15228047 NR Description: xyloglucan endotransglycosylase, putative
  misc_feature (15)..(305): Homolog of NCBI NO: 1362078 NR Description: xyloglucan endo-1,4-beta-D-glucanase (EC 3.2.1.-)
  misc_feature (22)..(305): Homolog of NCBI NO: 17402583 NR Description: Xyloglucan endo-transglycosylase [Vitis labrusca
  misc_feature (13)..(305): Homolog of NCBI NO: 14029149 NR Description: xyloglucan endo-transglycosylase [Carica papaya]
  misc_feature (14)..(305): Homolog of NCBI NO: 1769907 NR Description: xyloglucan endo-transglycosylase [Arabidopsis
  misc_feature (14)..(305): Homolog of NCBI NO: 15230574 NR Description: xyloglucan endotransglycosylase, putative
  misc_feature (36)..(305): Homolog of NCBI NO: 34901732 NR Description: putative xyloglucan endo-transglycosylase [Oryza
  misc_feature (10)..(305): Homolog of NCBI NO: 37536586 NR Description: putative cellulase [Oryza sativa (japonica
  misc_feature (114)..(305): Homolog of NCBI NO: 1084391 NR Description: xyloglucan endo-1,4-beta-D-glucanase (EC 3.2.1.-)
  misc_feature (39)..(305): Homolog of NCBI NO: 29691676 NR Description: putative xyloglucan endotransglycosylase [Cucumis

SEQ ID NO: 101850 - protein, 299 aa, Arabidopsis thaliana; identical to SEQ ID NO: 27893
  peptide (1)..(299): Ceres Seq. ID no. 13608819
  misc_feature (43)..(227): Pfam Name: Glycosyl hydrolases family 16 Pfam Description: Glycosyl hydrolases family 16
  misc_feature (1)..(299): Homolog of NCBI NO: 15228047 NR Description: xyloglucan endotransglycosylase, putative
  misc_feature (7)..(297): Homolog of NCBI NO: 1362078 NR Description: xyloglucan endo-1,4-beta-D-glucanase (EC 3.2.1.-)
  misc_feature (14)..(297): Homolog of NCBI NO: 17402583 NR Description: Xyloglucan endo-transglycosylase [Vitis labrusca
  misc_feature (5)..(297): Homolog of NCBI NO: 14029149 NR Description: xyloglucan endo-transglycosylase [Carica papaya]
  misc_feature (6)..(297): Homolog of NCBI NO: 1769907 NR Description: xyloglucan endo-transglycosylase [Arabidopsis
  misc_feature (6)..(297): Homolog of NCBI NO: 15230574 NR Description: xyloglucan endotransglycosylase, putative
  misc_feature (28)..(297): Homolog of NCBI NO: 34901732 NR Description: putative xyloglucan endo-transglycosylase [Oryza
  misc_feature (2)..(297): Homolog of NCBI NO: 37536586 NR Description: putative cellulase [Oryza sativa (japonica
  misc_feature (106)..(297): Homolog of NCBI NO: 1084391 NR Description: xyloglucan endo-1,4-beta-D-glucanase (EC 3.2.1.-)
  misc_feature (31)..(297): Homolog of NCBI NO: 29691676 NR Description: putative xyloglucan endotransglycosylase [Cucumis

SEQ ID NO: 101851 - protein, 242 aa, Arabidopsis thaliana; identical to SEQ ID NO: 27894
  peptide (1)..(242): Ceres Seq. ID no. 13608820
  misc_feature (1)..(170): Pfam Name: Glycosyl hydrolases family 16 Pfam Description: Glycosyl hydrolases family 16
  misc_feature (1)..(242): Homolog of NCBI NO: 15228047 NR Description: xyloglucan endotransglycosylase, putative
  misc_feature (1)..(240): Homolog of NCBI NO: 1362078 NR Description: xyloglucan endo-1,4-beta-D-glucanase (EC 3.2.1.-)
  misc_feature (1)..(240): Homolog of NCBI NO: 17402583 NR Description: Xyloglucan endo-transglycosylase [Vitis labrusca
  misc_feature (1)..(240): Homolog of NCBI NO: 14029149 NR Description: xyloglucan endo-transglycosylase [Carica papaya]
  misc_feature (1)..(240): Homolog of NCBI NO: 1769907 NR Description: xyloglucan endo-transglycosylase [Arabidopsis
  misc_feature (1)..(240): Homolog of NCBI NO: 15230574 NR Description: xyloglucan endotransglycosylase, putative
  misc_feature (1)..(240): Homolog of NCBI NO: 34901732 NR Description: putative xyloglucan endo-transglycosylase [Oryza
  misc_feature (1)..(240): Homolog of NCBI NO: 37536586 NR Description: putative cellulase [Oryza sativa (japonica
  misc_feature (49)..(240): Homolog of NCBI NO: 1084391 NR Description: xyloglucan endo-1,4-beta-D-glucanase (EC 3.2.1.-)
  misc_feature (1)..(240): Homolog of NCBI NO: 29691676 NR Description: putative xyloglucan endotransglycosylase [Cucumis

SEQ ID NO: 101852 - DNA, 1304 bp, Arabidopsis thaliana
  misc_feature (1)..(1304): Ceres Seq. ID no. 13608825
  misc_feature: MA Experiment ID: 108434 Result: Up-regulated in Transcription
  misc_feature: MA Experiment 108434 PARAMETER Experiment Name: At_Root_Tips_cDNA_P Parameter: Tissue Value: Root Tips
  misc_feature: MA Experiment ID: 108462 Result: Down-regulated in Transcription
  misc_feature: MA Experiment 108462 PARAMETER Experiment Name: At_Germinating_Seeds_cDNA_P Parameter: Age (day) Value: 2 vs. 0
  misc_feature: MA Experiment 108462 PARAMETER Experiment Name: At_Germinating_Seeds_cDNA_P Parameter: Tissue Value: Germinating Seeds
  misc_feature: MA Experiment ID: 108463 Result: Down-regulated in Transcription
  misc_feature: MA Experiment 108463 PARAMETER Experiment Name: At_Germinating_Seeds_cDNA_P Parameter: Age (day) Value: 3 vs. 0
  misc_feature: MA Experiment 108463 PARAMETER Experiment Name: At_Germinating_Seeds_cDNA_P Parameter: Tissue Value: Germinating Seeds
  misc_feature: MA Experiment ID: 108464 Result: Down-regulated in Transcription
  misc_feature: MA Experiment 108464 PARAMETER Experiment Name: At_Germinating_Seeds_cDNA_P Parameter: Age (day) Value: 4 vs. 0
  misc_feature: MA Experiment 108464 PARAMETER Experiment Name: At_Germinating_Seeds_cDNA_P Parameter: Tissue Value: Germinating Seeds
  misc_feature: MA Experiment ID: 108585 Result: Up-regulated in Transcription
  misc_feature: MA Experiment 108585 PARAMETER Experiment Name: At_5mM_NaNP_cDNA_P Parameter: Timepoint (hr) Value: 6
  misc_feature: MA Experiment 108585 PARAMETER Experiment Name: At_5mM_NaNP_cDNA_P Parameter: Tissue Value: Aerial
  misc_feature: MA Experiment 108585 PARAMETER Experiment Name: At_5mM_NaNP_cDNA_P Parameter: Treatment Value: null
  misc_feature: MA Experiment ID: 108595 Result: Down-regulated in Transcription
  misc_feature: MA Experiment 108595 PARAMETER Experiment Name: At_Ler-pi_Ovule_cDNA_P Parameter: Plant Line Value: null
  misc_feature: MA Experiment ID: 20000214 Result: Up-regulated in Transcription
  misc_feature: MA Experiment 20000214 PARAMETER Experiment Name: At_4deg_Cold_P Parameter: Timepoint (hr) Value: 6
  misc_feature: MA Experiment ID: 20000227 Result: Up-regulated in Transcription
  misc_feature: MA Experiment 20000227 PARAMETER Experiment Name: At_Root-Tips-vs-Tops_P Parameter: Tissue Value: Root Tips vs. Root Tops
  misc_feature: MA Experiment ID: 20001557 Result: Up-regulated in Transcription
  misc_feature: MA Experiment 20001557 PARAMETER Experiment Name: At_Drought_Soil_Dry_P Parameter: Age (day) Value: 27
  misc_feature: MA Experiment 20001557 PARAMETER Experiment Name: At_Drought_Soil_Dry_P Parameter: Organism Value: A. thaliana
  misc_feature: MA Experiment 20001557 PARAMETER Experiment Name: At_Drought_Soil_Dry_P Parameter: Plant Line Value: WS
  misc_feature: MA Experiment 20001557 PARAMETER Experiment Name: At_Drought_Soil_Dry_P Parameter: Post Timepoint (hr) Value: 3
  misc_feature: MA Experiment 20001557 PARAMETER Experiment Name: At_Drought_Soil_Dry_P Parameter: Post-Treatment Value: Re-Water vs. No Drought
  misc_feature: MA Experiment 20001557 PARAMETER Experiment Name: At_Drought_Soil_Dry_P Parameter: Timepoint (day) Value: 13
  misc_feature: MA Experiment 20001557 PARAMETER Experiment Name: At_Drought_Soil_Dry_P Parameter: Treatment Value: Drought vs. No Drought
  misc_feature: MA Experiment ID: 20001558 Result: Up-regulated in Transcription
  misc_feature: MA Experiment 20001558 PARAMETER Experiment Name: At_Drought_Soil_Dry_P Parameter: Age (day) Value: 27
  misc_feature: MA Experiment 20001558 PARAMETER Experiment Name: At_Drought_Soil_Dry_P Parameter: Organism Value: A. thaliana
  misc_feature: MA Experiment 20001558 PARAMETER Experiment Name: At_Drought_Soil_Dry_P Parameter: Plant Line Value: WS
  misc_feature: MA Experiment 20001558 PARAMETER Experiment Name: At_Drought_Soil_Dry_P Parameter: Post Timepoint (hr) Value: 6
  misc_feature: MA Experiment 20001558 PARAMETER Experiment Name: At_Drought_Soil_Dry_P Parameter: Post-Treatment Value: Re-Water vs. No Drought
  misc_feature: MA Experiment 20001558 PARAMETER Experiment Name: At_Drought_Soil_Dry_P Parameter: Timepoint (day) Value: 13
  misc_feature: MA Experiment 20001558 PARAMETER Experiment Name: At_Drought_Soil_Dry_P Parameter: Treatment Value: Drought vs. No Drought
  misc_feature: MA Experiment ID: 20001560 Result: Up-regulated in Transcription
  misc_feature: MA Experiment 20001560 PARAMETER Experiment Name: At_Drought_Soil_Dry_P Parameter: Age (day) Value: 28
  misc_feature: MA Experiment 20001560 PARAMETER Experiment Name: At_Drought_Soil_Dry_P Parameter: Organism Value: A. thaliana
  misc_feature: MA Experiment 20001560 PARAMETER Experiment Name: At_Drought_Soil_Dry_P Parameter: Plant Line Value: WS
  misc_feature: MA Experiment 20001560 PARAMETER Experiment Name: At_Drought_Soil_Dry_P Parameter: Post Timepoint (hr) Value: None
  misc_feature: MA Experiment 20001560 PARAMETER Experiment Name: At_Drought_Soil_Dry_P Parameter: Post-Treatment Value: None
  misc_feature: MA Experiment 20001560 PARAMETER Experiment Name: At_Drought_Soil_Dry_P Parameter: Timepoint (day) Value: 14
  misc_feature: MA Experiment 20001560 PARAMETER Experiment Name: At_Drought_Soil_Dry_P Parameter: Treatment Value: Drought vs. No Drought
aagctcaaagctcaagccgcttctatctctctacatttctctttctgcaatggcgagattagtgcgtgtggctagatcctcctccctctttggctttggtaaccgtttctactctacttcagccgaagctagccacgcgtcgtcgccttcgccgtttcttcacggcggcggagctagcagggttgctccgaaagatagaaatgttcagtgggtgtttttgggatgtcctggtgttggaaaaggaacttacgctagtagactatcaacccttctcggcgttcctcacatcgccaccggcgatctcgtccgtgaagagcttgcatcttctggacctctctctcaaaagctatcggagattgtaaatcagggaaaattggtttctgatgagatcattgtagacttattgtccaaaagacttgaggctggtgaagctagaggtgaatcagggtttatccttgatggctttcctcgtaccatgagacaagctgaaatactgggagatgtaactgacatcgatttggtggtgaatttgaagcttcctgaggaagttttggttgacaaatgccttggaaggagaacatgtagtcaatgtggcaagggttttaatgtagctcacatcaacttaaagggtgagaatggaagacctggaattagtatggatccacttctccctccacatcaatgtatgtcaaagcttgtcactcgagctgatgatactgaagaggtggtgaaagcaaggcttcgtatatacaatgaaacgagccagcctcttgaagaatactaccgtaccaagggaaagcttatggagtttgacttacctggaggcatcccagagtcatggccaaggctattggaagctttaaggcttgacgattacgaggagaaacagtctgtcgcagcataagttcactatcaaatcccggtatttaaaattctttgcatgtggaatacatatgcgtaatcaattttgtgttggaaataaaagtaaaaagaaaaccttagattgtttttcacctcaatagaaataatcatacacacttgcgcaaactattatttttccaccagccggggattttggctccatgagagaaatatgatgtatcatgattgtttgagattgctagtgacattacaggaatgtatcaatacttctacaccacttgttatgcattgagtttaatcgttatgctcttgtgatatgttttttttggaaaatgtgatgaatgatgatattgcggctggccgagctggctggttaaagaactcaaccagacagtaaagtaaaacagccgcatagattaaac

SEQ ID NO: 101853 - protein, 300 aa, Arabidopsis thaliana; identical to SEQ ID NO: 29922
  peptide (1)..(300): Ceres Seq. ID no. 13608826
  misc_feature (72)..(190): Pfam Name: Adenylate kinase Pfam Description: Adenylate kinase
  misc_feature (17)..(300): Homolog of NCBI NO: 15228109 NR Description: adenylate kinase -related [Arabidopsis thaliana]
  misc_feature (14)..(300): Homolog of NCBI NO: 29427816 NR Description: Adenylate kinase, chloroplast precursor (ATP-AMP
  misc_feature (113)..(300): Homolog of NCBI NO: 6063552 NR Description: ESTs AU065232(E60855),C23624(S1554), correspond to a region of the predicted gene.~similar to putative
  misc_feature (14)..(122): Homolog of NCBI NO: 6063552 NR Description: ESTs AU065232(E60855),C23624(S1554), correspond to a region of the predicted gene.~similar to putative
  misc_feature (19)..(300): Homolog of NCBI NO: 30687836 NR Description: adenylate kinase -related [Arabidopsis thaliana]
  misc_feature (71)..(287): Homolog of NCBI NO: 11498284 NR Description: adenylate kinase (adk) [Archaeoglobus fulgidus
  misc_feature (71)..(295): Homolog of NCBI NO: 15644227 NR Description: adenylate kinase [Thermotoga maritima]
  misc_feature (71)..(271): Homolog of NCBI NO: 28212159 NR Description: adenylate kinase [Clostridium tetani E88]
  misc_feature (71)..(276): Homolog of NCBI NO: 23510140 NR Description: adenylate kinase 1 [Plasmodium falciparum 3D7] adenylate kinase 1 [Plasmodium falciparum]
  misc_feature (71)..(291): Homolog of NCBI NO: 26985214 NR Description: adenylate kinase [Thermotoga neapolitana]

SEQ ID NO: 101854 - protein, 284 aa, Arabidopsis thaliana; identical to SEQ ID NO: 29923
  peptide (1)..(284): Ceres Seq. ID no. 13608827
  misc_feature (56)..(174): Pfam Name: Adenylate kinase Pfam Description: Adenylate kinase
  misc_feature (1)..(284): Homolog of NCBI NO: 15228109 NR Description: adenylate kinase -related [Arabidopsis thaliana]
  misc_feature (1)..(284): Homolog of NCBI NO: 29427816 NR Description: Adenylate kinase, chloroplast precursor (ATP-AMP
  misc_feature (97)..(284): Homolog of NCBI NO: 6063552 NR Description: ESTs AU065232(E60855),C23624(S1554), correspond to a region of the predicted gene.~similar to putative
  misc_feature (1)..(106): Homolog of NCBI NO: 6063552 NR Description: ESTs AU065232(E60855),C23624(S1554), correspond to a region of the predicted gene.~similar to putative
  misc_feature (3)..(284): Homolog of NCBI NO: 30687836 NR Description: adenylate kinase -related [Arabidopsis thaliana]
  misc_feature (55)..(271): Homolog of NCBI NO: 11498284 NR Description: adenylate kinase (adk) [Archaeoglobus fulgidus
  misc_feature (55)..(279): Homolog of NCBI NO: 15644227 NR Description: adenylate kinase [Thermotoga maritima]
  misc_feature (55)..(255): Homolog of NCBI NO: 28212159 NR Description: adenylate kinase [Clostridium tetani E88]
  misc_feature (55)..(260): Homolog of NCBI NO: 23510140 NR Description: adenylate kinase 1 [Plasmodium falciparum 3D7] adenylate kinase 1 [Plasmodium falciparum]
  misc_feature (55)..(275): Homolog of NCBI NO: 26985214 NR Description: adenylate kinase [Thermotoga neapolitana]

SEQ ID NO: 101855 - DNA, 1026 bp, Arabidopsis thaliana
  misc_feature (1)..(1026): Ceres Seq. ID no. 13608828
  misc_feature: MA Experiment ID: 20000166 Result: Up-regulated in Transcription
  misc_feature: MA Experiment 20000166 PARAMETER Experiment Name: At_100uM_ABA_P Parameter: Age (day) Value: 14
  misc_feature: MA Experiment 20000166 PARAMETER Experiment Name: At_100uM_ABA_P Parameter: Organism Value: A. thaliana
  misc_feature: MA Experiment 20000166 PARAMETER Experiment Name: At_100uM_ABA_P Parameter: Plant Line Value: WS
  misc_feature: MA Experiment 20000166 PARAMETER Experiment Name: At_100uM_ABA_P Parameter: Timepoint (hr) Value: 1
  misc_feature: MA Experiment 20000166 PARAMETER Experiment Name: At_100uM_ABA_P Parameter: Tissue Value: Aerial
  misc_feature: MA Experiment 20000166 PARAMETER Experiment Name: At_100uM_ABA_P Parameter: Treatment Value: 100uM ABA vs. No Treatment
  misc_feature: MA Experiment ID: 20000171 Result: Down-regulated in Transcription
  misc_feature: MA Experiment 20000171 PARAMETER Experiment Name: At_42deg_Heat_P Parameter: Age (day) Value: 14
  misc_feature: MA Experiment 20000171 PARAMETER Experiment Name: At_42deg_Heat_P Parameter: Organism Value: A. thaliana
  misc_feature: MA Experiment 20000171 PARAMETER Experiment Name: At_42deg_Heat_P Parameter: Plant Line Value: WS
  misc_feature: MA Experiment 20000171 PARAMETER Experiment Name: At_42deg_Heat_P Parameter: Temperature (deg C) Value: 42 vs. 22
  misc_feature: MA Experiment 20000171 PARAMETER Experiment Name: At_42deg_Heat_P Parameter: Timepoint (hr) Value: 1
  misc_feature: MA Experiment 20000171 PARAMETER Experiment Name: At_42deg_Heat_P Parameter: Tissue Value: Aerial
  misc_feature: MA Experiment ID: 20000173 Result: Down-regulated in Transcription
  misc_feature: MA Experiment 20000173 PARAMETER Experiment Name: At_42deg_Heat_P Parameter: Age (day) Value: 14
  misc_feature: MA Experiment 20000173 PARAMETER Experiment Name: At_42deg_Heat_P Parameter: Organism Value: A. thaliana
  misc_feature: MA Experiment 20000173 PARAMETER Experiment Name: At_42deg_Heat_P Parameter: Plant Line Value: WS
  misc_feature: MA Experiment 20000173 PARAMETER Experiment Name: At_42deg_Heat_P Parameter: Temperature (deg C) Value: 42 vs. 22
  misc_feature: MA Experiment 20000173 PARAMETER Experiment Name: At_42deg_Heat_P Parameter: Timepoint (hr) Value: 6
  misc_feature: MA Experiment 20000173 PARAMETER Experiment Name: At_42deg_Heat_P Parameter: Tissue Value: Aerial
  misc_feature: MA Experiment ID: 20000179 Result: Down-regulated in Transcription
  misc_feature: MA Experiment 20000179 PARAMETER Experiment Name: At_Germinating_Seeds_P Parameter: Age (hr) Value: 6 vs. 0
  misc_feature: MA Experiment 20000179 PARAMETER Experiment Name: At_Germinating_Seeds_P Parameter: Tissue Value: Germinating Seeds
  misc_feature: MA Experiment ID: 20000182 Result: Up-regulated in Transcription
  misc_feature: MA Experiment 20000182 PARAMETER Experiment Name: At_2mM_SA_P Parameter: Age (day) Value: 14
  misc_feature: MA Experiment 20000182 PARAMETER Experiment Name: At_2mM_SA_P Parameter: Organism Value: A. thaliana
  misc_feature: MA Experiment 20000182 PARAMETER Experiment Name: At_2mM_SA_P Parameter: Plant Line Value: WS
  misc_feature: MA Experiment 20000182 PARAMETER Experiment Name: At_2mM_SA_P Parameter: Timepoint (hr) Value: 6
  misc_feature: MA Experiment 20000182 PARAMETER Experiment Name: At_2mM_SA_P Parameter: Tissue Value: Aerial
  misc_feature: MA Experiment 20000182 PARAMETER Experiment Name: At_2mM_SA_P Parameter: Treatment Value: 2mM SA vs. No Treatment
  misc_feature: MA Experiment ID: 20000185 Result: Down-regulated in Transcription
  misc_feature: MA Experiment 20000185 PARAMETER Experiment Name: At_Roots__P Parameter: Age (day) Value: 7 vs. 21
  misc_feature: MA Experiment 20000185 PARAMETER Experiment Name: At_Roots__P Parameter: Organism Value: A. thaliana
  misc_feature: MA Experiment 20000185 PARAMETER Experiment Name: At_Roots__P Parameter: Tissue Value: Roots vs. Whole Plant
  misc_feature: MA Experiment ID: 20000439 Result: Down-regulated in Transcription
  misc_feature: MA Experiment 20000439 PARAMETER Experiment Name: At_Roots__P Parameter: Age (day) Value: 14 vs. 21
  misc_feature: MA Experiment 20000439 PARAMETER Experiment Name: At_Roots__P Parameter: Organism Value: A. thaliana
  misc_feature: MA Experiment 20000439 PARAMETER Experiment Name: At_Roots__P Parameter: Tissue Value: Roots vs. Whole Plant
  misc_feature: MA Experiment ID: 20000573 Result: Down-regulated in Transcription
  misc_feature: MA Experiment 20000573 PARAMETER Experiment Name: At_100uM_ABA_Mutants__P Parameter: Organism Value: A. thaliana
  misc_feature: MA Experiment 20000573 PARAMETER Experiment Name: At_100uM_ABA_Mutants__P Parameter: Plant Line Value: CS22 vs. Ler wt
  misc_feature: MA Experiment 20000573 PARAMETER Experiment Name: At_100uM_ABA_Mutants__P Parameter: Timepoint (hr) Value: N/A
  misc_feature: MA Experiment 20000573 PARAMETER Experiment Name: At_100uM_ABA_Mutants__P Parameter: Tissue Value: Whole Plant
  misc_feature: MA Experiment 20000573 PARAMETER Experiment Name: At_100uM_ABA_Mutants__P Parameter: Treatment Value: None
  misc_feature: MA Experiment ID: 20000574 Result: Down-regulated in Transcription
  misc_feature: MA Experiment 20000574 PARAMETER Experiment Name: At_100uM_ABA_Mutants__P Parameter: Organism Value: A. thaliana
  misc_feature: MA Experiment 20000574 PARAMETER Experiment Name: At_100uM_ABA_Mutants__P Parameter: Plant Line Value: CS23 vs. Ler wt
  misc_feature: MA Experiment 20000574 PARAMETER Experiment Name: At_100uM_ABA_Mutants__P Parameter: Timepoint (hr) Value: N/A
  misc_feature: MA Experiment 20000574 PARAMETER Experiment Name: At_100uM_ABA_Mutants__P Parameter: Tissue Value: Whole Plant
  misc_feature: MA Experiment 20000574 PARAMETER Experiment Name: At_100uM_ABA_Mutants__P Parameter: Treatment Value: None
  misc_feature: MA Experiment ID: 20000794 Result: Down-regulated in Transcription
  misc_feature: MA Experiment 20000794 PARAMETER Experiment Name: At_Petals_P Parameter: Age (day) Value: 23-25 days
  misc_feature: MA Experiment 20000794 PARAMETER Experiment Name: At_Petals_P Parameter: Plant Line Value: WS
  misc_feature: MA Experiment 20000794 PARAMETER Experiment Name: At_Petals_P Parameter: Tissue Value: Petals vs. Whole plant
  misc_feature: MA Experiment ID: 20001558 Result: Down-regulated in Transcription
  misc_feature: MA Experiment 20001558 PARAMETER Experiment Name: At_Drought_Soil_Dry_P Parameter: Age (day) Value: 27
  misc_feature: MA Experiment 20001558 PARAMETER Experiment Name: At_Drought_Soil_Dry_P Parameter: Organism Value: A. thaliana
  misc_feature: MA Experiment 20001558 PARAMETER Experiment Name: At_Drought_Soil_Dry_P Parameter: Plant Line Value: WS
  misc_feature: MA Experiment 20001558 PARAMETER Experiment Name: At_Drought_Soil_Dry_P Parameter: Post Timepoint (hr) Value: 6
  misc_feature: MA Experiment 20001558 PARAMETER Experiment Name: At_Drought_Soil_Dry_P Parameter: Post-Treatment Value: Re-Water vs. No Drought
  misc_feature: MA Experiment 20001558 PARAMETER Experiment Name: At_Drought_Soil_Dry_P Parameter: Timepoint (day) Value: 13
  misc_feature: MA Experiment 20001558 PARAMETER Experiment Name: At_Drought_Soil_Dry_P Parameter: Treatment Value: Drought vs. No Drought
acctcttatcaaacaccaaaccacaccagaacagaactcagccatggcttcttcttcttcttctcttctaatcctagccgttgcttgtttcgtctcgctaatctcaccggcgatttcacaacaggcttgcaaatcacagaacttgaactccgccggtccgttcgatagttgcgaagaccttccggtactcaattcctacctccattacacctacaattcctcaaattcatctctctccgtcgctttcgtcgccactccatctcaagccaacggtggctgggtcgcttgggctattaaccctacggggactaagatggctggttctcaagccttcctcgcttacagatccggcggtggtgcggctccggtcgtgaagacgtacaacattagcagctacagcagtctcgtcgaaggtaaacttgcttttgatttttggaatctacgcgccgagtcgttaagcggcggtaggatcgccattttcacgacggttaaggttccggcgggagctgatagtgtgaatcaggtatggcagatcggcggcaatgttaccaacggtcgtcccggtgtacatcctttcggtcctgataatttgggctcccaccgtgtgttgagtttcacagaagatgcagcaccgggctctgctccttcgccgggatctgctccggcgccgggcaccagtggctcgactaccccaggaacagcggcgggaggtccagggaacgcggggtcattgacgaggaacgtaaattttggggtcaatttgggaattttggttttgttgggttctatttttattttctgaatggggatctctctctagtctctcttctcttcttgagtctctctctatttttttttttttttggtttgttcgaacaataatggtgccccatacttttgtactgttttagtcttagggccatttactttgtttcaccacattacttagagttattggattgtatggaccattactatcatgagattgagatcatcttatcttcttaaaatatctatttgccatcc

SEQ ID NO: 101856 - protein, 266 aa, Arabidopsis thaliana
  peptide (1)..(266): Ceres Seq. ID no. 13608829
  misc_feature (105)..(216): Pfam Name: Protein of unknown function (DUF568) Pfam Description: Protein of unknown function (DUF568)
  misc_feature (1)..(266): Homolog of NCBI NO: 30680258 NR Description: auxin-induced protein (AIR12) [Arabidopsis
  misc_feature (10)..(266): Homolog of NCBI NO: 11357190 NR Description: auxin-induced protein AIR12 [imported] - thaliana (fragment) >gi|3695023|gb|AAC62613.1| unknown
  misc_feature (105)..(266): Homolog of NCBI NO: 18426884 NR Description: AT3g07390/F21O3_10 [Arabidopsis thaliana]
  misc_feature (24)..(243): Homolog of NCBI NO: 29647484 NR Description: OJ1191_A10.2 [Oryza sativa (japonica
  misc_feature (15)..(213): Homolog of NCBI NO: 18404500 NR Description: auxin-induced protein family [Arabidopsis >gi|9294186|dbj|BAB02088.1| similarity to unknown protein [Arabidopsis thaliana]
  misc_feature (19)..(266): Homolog of NCBI NO: 15235545 NR Description: auxin-induced protein, putative [Arabidopsis
  misc_feature (19)..(266): Homolog of NCBI NO: 21593814 NR Description: unknown [Arabidopsis thaliana]
  misc_feature (20)..(220): Homolog of NCBI NO: 15238124 NR Description: auxin-induced protein, putative [Arabidopsis >gi|9758781|dbj|BAB09079.1| gene_id:MNJ7.12~pir||H71441~similar
  misc_feature (24)..(220): Homolog of NCBI NO: 18086563 NR Description: AT4g17280/dl4675c [Arabidopsis thaliana]
  misc_feature (24)..(220): Homolog of NCBI NO: 22328744 NR Description: auxin-induced protein family [Arabidopsis
PLIKHQTTPEQNSAMASSSSSLLILAVACFVSLISPAISQQACKSQNLNSAGPFDSCEDLPVLNSYLHYTYNSSNSSLSVAFVATPSQANGGWVAWAINPTGTKMAGSQAFLAYRSGGGAAPVVKTYNISSYSSLVEGKLAFDFWNLRAESLSGGRIAIFTTVKVPAGADSVNQVWQIGGNVTNGRPGVHPFGPDNLGSHRVLSFTEDAAPGSAPSPGSAPAPGTSGSTTPGTAAGGPGNAGSLTRNVNFGVNLGILVLLGSIFIF

SEQ ID NO: 101857 - protein, 252 aa, Arabidopsis thaliana
  peptide (1)..(252): Ceres Seq. ID no. 13608830
  misc_feature (91)..(202): Pfam Name: Protein of unknown function (DUF568) Pfam Description: Protein of unknown function (DUF568)
  misc_feature (1)..(252): Homolog of NCBI NO: 30680258 NR Description: auxin-induced protein (AIR12) [Arabidopsis
  misc_feature (1)..(252): Homolog of NCBI NO: 11357190 NR Description: auxin-induced protein AIR12 [imported] - thaliana (fragment) >gi|3695023|gb|AAC62613.1| unknown
  misc_feature (91)..(252): Homolog of NCBI NO: 18426884 NR Description: AT3g07390/F21O3_10 [Arabidopsis thaliana]
  misc_feature (10)..(229): Homolog of NCBI NO: 29647484 NR Description: OJ1191_A10.2 [Oryza sativa (japonica
  misc_feature (1)..(199): Homolog of NCBI NO: 18404500 NR Description: auxin-induced protein family [Arabidopsis >gi|9294186|dbj|BAB02088.1| similarity to unknown protein [Arabidopsis thaliana]
  misc_feature (5)..(252): Homolog of NCBI NO: 15235545 NR Description: auxin-induced protein, putative [Arabidopsis
  misc_feature (5)..(252): Homolog of NCBI NO: 21593814 NR Description: unknown [Arabidopsis thaliana]
  misc_feature (6)..(206): Homolog of NCBI NO: 15238124 NR Description: auxin-induced protein, putative [Arabidopsis >gi|9758781|dbj|BAB09079.1| gene_id:MNJ7.12~pir||H71441~similar
  misc_feature (10)..(206): Homolog of NCBI NO: 18086563 NR Description: AT4g17280/dl4675c [Arabidopsis thaliana]
  misc_feature (10)..(206): Homolog of NCBI NO: 22328744 NR Description: auxin-induced protein family [Arabidopsis
MASSSSSLLILAVACFVSLISPAISQQACKSQNLNSAGPFDSCEDLPVLNSYLHYTYNSSNSSLSVAFVATPSQANGGWVAWAINPTGTKMAGSQAFLAYRSGGGAAPVVKTYNISSYSSLVEGKLAFDFWNLRAESLSGGRIAIFTTVKVPAGADSVNQVWQIGGNVTNGRPGVHPFGPDNLGSHRVLSFTEDAAPGSAPSPGSAPAPGTSGSTTPGTAAGGPGNAGSLTRNVNFGVNLGILVLLGSIFIF

SEQ ID NO: 101858 - protein, 162 aa, Arabidopsis thaliana
  peptide (1)..(162): Ceres Seq. ID no. 13608831
  misc_feature (1)..(112): Pfam Name: Protein of unknown function (DUF568) Pfam Description: Protein of unknown function (DUF568)
  misc_feature (1)..(162): Homolog of NCBI NO: 30680258 NR Description: auxin-induced protein (AIR12) [Arabidopsis
  misc_feature (1)..(162): Homolog of NCBI NO: 11357190 NR Description: auxin-induced protein AIR12 [imported] - thaliana (fragment) >gi|3695023|gb|AAC62613.1| unknown
  misc_feature (1)..(162): Homolog of NCBI NO: 18426884 NR Description: AT3g07390/F21O3_10 [Arabidopsis thaliana]
  misc_feature (1)..(139): Homolog of NCBI NO: 29647484 NR Description: OJ1191_A10.2 [Oryza sativa (japonica
  misc_feature (1)..(109): Homolog of NCBI NO: 18404500 NR Description: auxin-induced protein family [Arabidopsis >gi|9294186|dbj|BAB02088.1| similarity to unknown protein [Arabidopsis thaliana]
  misc_feature (1)..(162): Homolog of NCBI NO: 15235545 NR Description: auxin-induced protein, putative [Arabidopsis
  misc_feature (1)..(162): Homolog of NCBI NO: 21593814 NR Description: unknown [Arabidopsis thaliana]
  misc_feature (1)..(116): Homolog of NCBI NO: 15238124 NR Description: auxin-induced protein, putative [Arabidopsis >gi|9758781|dbj|BAB09079.1| gene_id:MNJ7.12~pir||H71441~similar
  misc_feature (1)..(116): Homolog of NCBI NO: 18086563 NR Description: AT4g17280/dl4675c [Arabidopsis thaliana]
  misc_feature (1)..(116): Homolog of NCBI NO: 22328744 NR Description: auxin-induced protein family [Arabidopsis
MAGSQAFLAYRSGGGAAPVVKTYNISSYSSLVEGKLAFDFWNLRAESLSGGRIAIFTTVKVPAGADSVNQVWQIGGNVTNGRPGVHPFGPDNLGSHRVLSFTEDAAPGSAPSPGSAPAPGTSGSTTPGTAAGGPGNAGSLTRNVNFGVNLGILVLLGSIFIF

SEQ ID NO: 101859 - DNA, 824 bp, Arabidopsis thaliana
  misc_feature (1)..(824): Ceres Seq. ID no. 13608844
  misc_feature: MA Experiment ID: 20000235 Result: Down-regulated in Transcription
  misc_feature: MA Experiment 20000235 PARAMETER Experiment Name: At_Siliques_P Parameter: Age (day) Value: 21
  misc_feature: MA Experiment 20000235 PARAMETER Experiment Name: At_Siliques_P Parameter: Organism Value: A. thaliana
  misc_feature: MA Experiment 20000235 PARAMETER Experiment Name: At_Siliques_P Parameter: Plant Line Value: WS
  misc_feature: MA Experiment 20000235 PARAMETER Experiment Name: At_Siliques_P Parameter: Tissue Value: 5-10mm Siliques vs. Whole Plant
  misc_feature: MA Experiment ID: 20000495 Result: Up-regulated in Transcription
  misc_feature: MA Experiment 20000495 PARAMETER Experiment Name: At_Guard_Cells_P Parameter: Harvest Date Value: 8/2/2002
  misc_feature: MA Experiment 20000495 PARAMETER Experiment Name: At_Guard_Cells_P Parameter: Organism Value: A. thaliana
  misc_feature: MA Experiment 20000495 PARAMETER Experiment Name: At_Guard_Cells_P Parameter: Tissue Value: Guard Cells vs. Leaves
  misc_feature: MA Experiment ID: 20000496 Result: Up-regulated in Transcription
  misc_feature: MA Experiment 20000496 PARAMETER Experiment Name: At_Guard_Cells_P Parameter: Harvest Date Value: 7/19/2002
  misc_feature: MA Experiment 20000496 PARAMETER Experiment Name: At_Guard_Cells_P Parameter: Organism Value: Canola
  misc_feature: MA Experiment 20000496 PARAMETER Experiment Name: At_Guard_Cells_P Parameter: Tissue Value: Guard Cells vs. Leaves
  misc_feature: MA Experiment ID: 20001248 Result: Up-regulated in Transcription
  misc_feature: MA Experiment 20001248 PARAMETER Experiment Name: At_Far-red-induction_P Parameter: Age (day) Value: 7
  misc_feature: MA Experiment 20001248 PARAMETER Experiment Name: At_Far-red-induction_P Parameter: Light Value: Far-red vs. White
  misc_feature: MA Experiment 20001248 PARAMETER Experiment Name: At_Far-red-induction_P Parameter: Organism Value: A. thaliana
  misc_feature: MA Experiment 20001248 PARAMETER Experiment Name: At_Far-red-induction_P Parameter: Plant Line Value: Columbia
  misc_feature: MA Experiment 20001248 PARAMETER Experiment Name: At_Far-red-induction_P Parameter: Timepoint (hr) Value: 4
  misc_feature: MA Experiment 20001248 PARAMETER Experiment Name: At_Far-red-induction_P Parameter: Tissue Value: Whole Plant
  misc_feature: MA Experiment ID: 20001451 Result: Up-regulated in Transcription
  misc_feature: MA Experiment 20001451 PARAMETER Experiment Name: At_Far-red-induction_P Parameter: Age (day) Value: 7
  misc_feature: MA Experiment 20001451 PARAMETER Experiment Name: At_Far-red-induction_P Parameter: Light Value: Far-red vs. White
  misc_feature: MA Experiment 20001451 PARAMETER Experiment Name: At_Far-red-induction_P Parameter: Organism Value: A. thaliana
  misc_feature: MA Experiment 20001451 PARAMETER Experiment Name: At_Far-red-induction_P Parameter: Plant Line Value: Columbia
  misc_feature: MA Experiment 20001451 PARAMETER Experiment Name: At_Far-red-induction_P Parameter: Timepoint (hr) Value: 24
  misc_feature: MA Experiment 20001451 PARAMETER Experiment Name: At_Far-red-induction_P Parameter: Tissue Value: Whole Plant
agactctctcttctcatctctctctctctctctctcttcaaaccctaaaaattcacgcattttggcacagttaagttcgctgaatcccgttcctcttcctctgtctctctccccaagaaaatcactcagatcaaagctcaaatttcggatctcacagctgtcgcttcggtagaggaaaggatgaccagagaacatcctcccgagcctcttgatttcttcatctggactgttgaggatgttgggtcttggctcgaggagataaaccttgggggctaccgccagattttcaaagaaaatggtgtcaatggagaatatctagaaagcatgtctgtgtttactaccgagcagatccttcacttcataaggaggcatcacatgaagtggggagacttcatcaccctctgtaaagaactcagaaggattaaagtggcttgcttgaaaggtgagcagagagttagacggccatggtgggcaccgtcttgtctatccgtagtctttgttaaggcagccaaacgcaaccgacagtctcgtgttgtatctctcaagcttgaatcttgacattacactttggctgtttatgtacgtacttgtctctcttctcttctcttgttttcttttcctttttttttttttttggtttgggtttgtttgtggcacatgcactaggaagaaacaaactcaagtcaaaaaagctgtttggcttggtgaaatcttgcaagcgggaaaaaaattatgcgttttgtactttggtggtgtatacaaagcttgctctcagatgtttaatatatggcttgtgcaatctttatgtgacagataatagtgtg

SEQ ID NO: 101860 - protein, 125 aa, Arabidopsis thaliana; identical to SEQ ID NO: 27736
  peptide (1)..(125): Ceres Seq. ID no. 13608845
  misc_feature (13)..(42): Pfam Name: SAM domain (Sterile alpha motif) Pfam Description: SAM domain (Sterile alpha motif)
  misc_feature (1)..(125): Homolog of NCBI NO: 6466959 NR Description: unknown protein [Arabidopsis thaliana]
  misc_feature (1)..(125): Homolog of NCBI NO: 18398048 NR Description: auxin-regulated protein [Arabidopsis thaliana]

SEQ ID NO: 101861 - protein, 79 aa, Arabidopsis thaliana
  peptide (1)..(79): Ceres Seq. ID no. 13608846
MYVLVSLLFSCFLFLFFFFWFGFVCGTCTRKKQTQVKKAVWLGEILQAGKKLCVLYFGGVYKACSQMFNIWLVQSLCDR

SEQ ID NO: 101862 - protein, 77 aa, Arabidopsis thaliana; identical to SEQ ID NO: 27737
  peptide (1)..(77): Ceres Seq. ID no. 13608847
  misc_feature (1)..(77): Homolog of NCBI NO: 6466959 NR Description: unknown protein [Arabidopsis thaliana]
  misc_feature (1)..(77): Homolog of NCBI NO: 18398048 NR Description: auxin-regulated protein [Arabidopsis thaliana]

SEQ ID NO: 101863 - DNA, 2143 bp, Arabidopsis thaliana
  misc_feature (1)..(2143): Ceres Seq. ID no. 13608852
  misc_feature: MA Experiment ID: 20000171 Result: Down-regulated in Transcription
  misc_feature: MA Experiment 20000171 PARAMETER Experiment Name: At_42deg_Heat_P Parameter: Age (day) Value: 14
  misc_feature: MA Experiment 20000171 PARAMETER Experiment Name: At_42deg_Heat_P Parameter: Organism Value: A. thaliana
  misc_feature: MA Experiment 20000171 PARAMETER Experiment Name: At_42deg_Heat_P Parameter: Plant Line Value: WS
  misc_feature: MA Experiment 20000171 PARAMETER Experiment Name: At_42deg_Heat_P Parameter: Temperature (deg C) Value: 42 vs. 22
  misc_feature: MA Experiment 20000171 PARAMETER Experiment Name: At_42deg_Heat_P Parameter: Timepoint (hr) Value: 1
  misc_feature: MA Experiment 20000171 PARAMETER Experiment Name: At_42deg_Heat_P Parameter: Tissue Value: Aerial
  misc_feature: MA Experiment ID: 20000173 Result: Down-regulated in Transcription
  misc_feature: MA Experiment 20000173 PARAMETER Experiment Name: At_42deg_Heat_P Parameter: Age (day) Value: 14
  misc_feature: MA Experiment 20000173 PARAMETER Experiment Name: At_42deg_Heat_P Parameter: Organism Value: A. thaliana
  misc_feature: MA Experiment 20000173 PARAMETER Experiment Name: At_42deg_Heat_P Parameter: Plant Line Value: WS
  misc_feature: MA Experiment 20000173 PARAMETER Experiment Name: At_42deg_Heat_P Parameter: Temperature (deg C) Value: 42 vs. 22
  misc_feature: MA Experiment 20000173 PARAMETER Experiment Name: At_42deg_Heat_P Parameter: Timepoint (hr) Value: 6
  misc_feature: MA Experiment 20000173 PARAMETER Experiment Name: At_42deg_Heat_P Parameter: Tissue Value: Aerial
  misc_feature: MA Experiment ID: 20000185 Result: Up-regulated in Transcription
  misc_feature: MA Experiment 20000185 PARAMETER Experiment Name: At_Roots__P Parameter: Age (day) Value: 7 vs. 21
  misc_feature: MA Experiment 20000185 PARAMETER Experiment Name: At_Roots__P Parameter: Organism Value: A. thaliana
  misc_feature: MA Experiment 20000185 PARAMETER Experiment Name: At_Roots__P Parameter: Tissue Value: Roots vs. Whole Plant
  misc_feature: MA Experiment ID: 20000286 Result: Down-regulated in Transcription
  misc_feature: MA Experiment 20000286 PARAMETER Experiment Name: At_Open_Flower_P Parameter: Age (day) Value: 21
  misc_feature: MA Experiment 20000286 PARAMETER Experiment Name: At_Open_Flower_P Parameter: Plant Line Value: WS
  misc_feature: MA Experiment 20000286 PARAMETER Experiment Name: At_Open_Flower_P Parameter: Tissue Value: Half Open vs. Whole Plant
acattttcatgacgtctcgtttgatctacacatattgtttgacctctctctatctctaagtttacatattcgctaatgcgttgagctcaaagcatccacgacaagataagtagaaaaaaaaagacatccttttttggttcttcttcttcttcttcttcggacaaaaaggaagaaggtgttgactgattcttaagatgggtttgtgttaagtttgtgagtatagttgaaagtttcagttcaatttcaatggagcctccaataggatttcgagcttctttattccaattcttactcttccttccttatttcattggattgctatttctgggtttcatcaaaggtattgttttgtgcccactcgtatgcctcgttgtgactataggcaactccgcggtcatactgagtcttctaccagtccacatcgtttggactttctattcaatcgtgagtgccaaacaagtaggaccaatcttgaagatctttctatgcttatgtcttcctgctgccatcattctctggcctattgttggtattttaggaagtgttttgggaggagctttatatggtttcttctccccaattttcgccacctttgatgctgttggtgaaggcaagccttaccagtttttccattgcttttatgatggaacttggagcaccatgcaacgcagcttcaccgttgttcgggattttaaagatgtttgctttcattcatacttctcacttatggatgagctgaaacaaagctgtccggatcgaaaatattatgaaataaggctacttcaacttccaggggctttagtagtttcagttctcgggatacttgttgatcctccggttatctcacttgtagccatatgcaaaagcccttatatgttgttcaaaggatggcaccgtttgtttcacgacttgattggacgggaaggtccattcttggagacaatgtgtgtccccatagcaggcctcgcgatcttactctggcctttggctgtcacgggcgcggttattggatcagttatctctagtatcttccttggtgcttatgcaggagtagtctcatatcaagaatcatctttttactatggactctgctatatagttgcctctgtctccatttacgacgagtatagcaccgatatacttgacttgcctgaaggttcttgttttccaaggccgaaatatcgaagaaaggacgaggaaccaacgcctttttctggtcctgtaccaagactaggctctgtcaagaacgcgtcatcgatgagaggaggatcagtcagagtccctatgattgatattaagcctctcgatctgttgaatgagctctttgtggaatgtagaagatatggagaagttttagcgacaaaaggactgataaactcgaaagatatcgaagaagcgagatctagtaaaggcagccaagtgatcagcgttggtttaccggcttatggacttctttacgagattcttcgctcagtcaaagccaattcttccggcttgttactaagtgacggtgtaactgaaataactaccatgaaccgcccaaaagacgtcttctttgattggtttctgaatccgtttttgatactaaaggagcaaatgaaagctacaaacttgtctgaggaagaagaagagtacctcggaagattagttttgctatttggagatccagagaggctaaagagctcgaatgccatttccgcgtctcctcctctcaccgaacgtaaaagagccgaactcgatgcctttgctcgcaggatgcaagggctaacgaaaacggtatcaagatatccaacatttcgtcgacattttgtggcattagtgaagaaactatcggaagatttggacttgaaagacaacaattcggctaaggacgaatcgataacagaaccgccagctccggttaagatcatttcgcggatattcagtcagagatcgttcagaagaaaaggaagtgtcaatggatctgatcaagaatcgcaaaagggtgtctcaaggaatgtagatatagtttaaacatggaacgtgtggtgtggatatttgaaacttaaaacgcatttagttctttgctttataaactttgtcattccttgtaaagatttttcagacgtttttatttatttatagaacagtgtatgttttcgtt

SEQ ID NO: 101864 - protein, 588 aa, Arabidopsis thaliana
  peptide (1)..(588): Ceres Seq. ID no. 13608853
  misc_feature (1)..(588): Homolog of NCBI NO: 30688768 NR Description: expressed protein [Arabidopsis thaliana]
  misc_feature (1)..(588): Homolog of NCBI NO: 27311557 NR Description: Unknown protein [Arabidopsis thaliana]
  misc_feature (99)..(355): Homolog of NCBI NO: 7939511 NR Description: emb|CAB40985.1~gene_id:K1G2.10~similar to unknown
  misc_feature (353)..(588): Homolog of NCBI NO: 7939511 NR Description: emb|CAB40985.1~gene_id:K1G2.10~similar to unknown
  misc_feature (1)..(588): Homolog of NCBI NO: 30693640 NR Description: expressed protein [Arabidopsis thaliana] unknown protein [Arabidopsis thaliana]
  misc_feature (1)..(588): Homolog of NCBI NO: 9758091 NR Description: dbj|BAA95714.1~gene_id:MNF13.19~strong similarity
  misc_feature (1)..(578): Homolog of NCBI NO: 38345330 NR Description: OSJNBa0081L15.3 [Oryza sativa (japonica
  misc_feature (1)..(528): Homolog of NCBI NO: 15235450 NR Description: hypothetical protein [Arabidopsis thaliana]
  misc_feature (1)..(545): Homolog of NCBI NO: 38344840 NR Description: OSJNBa0064H22.21 [Oryza sativa (japonica
  misc_feature (21)..(503): Homolog of NCBI NO: 15234594 NR Description: hypothetical protein [Arabidopsis thaliana]
MEPPIGFRASLFQFLLFLPYFIGLLFLGFIKGIVLCPLVCLVVTIGNSAVILSLLPVHIVWTFYSIVSAKQVGPILKIFLCLCLPAAIILWPIVGILGSVLGGALYGFFSPIFATFDAVGEGKPYQFFHCFYDGTWSTMQRSFTVVRDFKDVCFHSYFSLMDELKQSCPDRKYYEIRLLQLPGALVVSVLGILVDPPVISLVAICKSPYMLFKGWHRLFHDLIGREGPFLETMCVPIAGLAILLWPLAVTGAVIGSVISSIFLGAYAGVVSYQESSFYYGLCYIVASVSIYDEYSTDILDLPEGSCFPRPKYRRKDEEPTPFSGPVPRLGSVKNASSMRGGSVRVPMIDIKPLDLLNELFVECRRYGEVLATKGLINSKDIEEARSSKGSQVISVGLPAYGLLYEILRSVKANSSGLLLSDGVTEITTMNRPKDVFFDWFLNPFLILKEQMKATNLSEEEEEYLGRLVLLFGDPERLKSSNAISASPPLTERKRAELDAFARRMQGLTKTVSRYPTFRRHFVALVKKLSEDLDLKDNNSAKDESITEPPAPVKIISRIFSQRSFRRKGSVNGSDQESQKGVSRNVDIV

SEQ ID NO: 101865 - protein, 450 aa, Arabidopsis thaliana
  peptide (1)..(450): Ceres Seq. ID no. 13608854
  misc_feature (1)..(450): Homolog of NCBI NO: 30688768 NR Description: expressed protein [Arabidopsis thaliana]
  misc_feature (1)..(450): Homolog of NCBI NO: 27311557 NR Description: Unknown protein [Arabidopsis thaliana]
  misc_feature (1)..(217): Homolog of NCBI NO: 7939511 NR Description: emb|CAB40985.1~gene_id:K1G2.10~similar to unknown
  misc_feature (215)..(450): Homolog of NCBI NO: 7939511 NR Description: emb|CAB40985.1~gene_id:K1G2.10~similar to unknown
  misc_feature (1)..(450): Homolog of NCBI NO: 30693640 NR Description: expressed protein [Arabidopsis thaliana] unknown protein [Arabidopsis thaliana]
  misc_feature (1)..(450): Homolog of NCBI NO: 9758091 NR Description: dbj|BAA95714.1~gene_id:MNF13.19~strong similarity
  misc_feature (1)..(440): Homolog of NCBI NO: 38345330 NR Description: OSJNBa0081L15.3 [Oryza sativa (japonica
  misc_feature (1)..(390): Homolog of NCBI NO: 15235450 NR Description: hypothetical protein [Arabidopsis thaliana]
  misc_feature (1)..(407): Homolog of NCBI NO: 38344840 NR Description: OSJNBa0064H22.21 [Oryza sativa (japonica
  misc_feature (1)..(365): Homolog of NCBI NO: 15234594 NR Description: hypothetical protein [Arabidopsis thaliana]
MQRSFTVVRDFKDVCFHSYFSLMDELKQSCPDRKYYEIRLLQLPGALVVSVLGILVDPPVISLVAICKSPYMLFKGWHRLFHDLIGREGPFLETMCVPIAGLAILLWPLAVTGAVIGSVISSIFLGAYAGVVSYQESSFYYGLCYIVASVSIYDEYSTDILDLPEGSCFPRPKYRRKDEEPTPFSGPVPRLGSVKNASSMRGGSVRVPMIDIKPLDLLNELFVECRRYGEVLATKGLINSKDIEEARSSKGSQVISVGLPAYGLLYEILRSVKANSSGLLLSDGVTEITTMNRPKDVFFDWFLNPFLILKEQMKATNLSEEEEEYLGRLVLLFGDPERLKSSNAISASPPLTERKRAELDAFARRMQGLTKTVSRYPTFRRHFVALVKKLSEDLDLKDNNSAKDESITEPPAPVKIISRIFSQRSFRRKGSVNGSDQESQKGVSRNVDIV

SEQ ID NO: 101866 - protein, 428 aa, Arabidopsis thaliana
  peptide (1)..(428): Ceres Seq. ID no. 13608855
  misc_feature (1)..(428): Homolog of NCBI NO: 30688768 NR Description: expressed protein [Arabidopsis thaliana]
  misc_feature (1)..(428): Homolog of NCBI NO: 27311557 NR Description: Unknown protein [Arabidopsis thaliana]
  misc_feature (1)..(195): Homolog of NCBI NO: 7939511 NR Description: emb|CAB40985.1~gene_id:K1G2.10~similar to unknown
  misc_feature (193)..(428): Homolog of NCBI NO: 7939511 NR Description: emb|CAB40985.1~gene_id:K1G2.10~similar to unknown
  misc_feature (1)..(428): Homolog of NCBI NO: 30693640 NR Description: expressed protein [Arabidopsis thaliana] unknown protein [Arabidopsis thaliana]
  misc_feature (1)..(428): Homolog of NCBI NO: 9758091 NR Description: dbj|BAA95714.1~gene_id:MNF13.19~strong similarity
  misc_feature (1)..(418): Homolog of NCBI NO: 38345330 NR Description: OSJNBa0081L15.3 [Oryza sativa (japonica
  misc_feature (1)..(368): Homolog of NCBI NO: 15235450 NR Description: hypothetical protein [Arabidopsis thaliana]
  misc_feature (1)..(385): Homolog of NCBI NO: 38344840 NR Description: OSJNBa0064H22.21 [Oryza sativa (japonica
  misc_feature (1)..(343): Homolog of NCBI NO: 15234594 NR Description: hypothetical protein [Arabidopsis thaliana]
MDELKQSCPDRKYYEIRLLQLPGALVVSVLGILVDPPVISLVAICKSPYMLFKGWHRLFHDLIGREGPFLETMCVPIAGLAILLWPLAVTGAVIGSVISSIFLGAYAGVVSYQESSFYYGLCYIVASVSIYDEYSTDILDLPEGSCFPRPKYRRKDEEPTPFSGPVPRLGSVKNASSMRGGSVRVPMIDIKPLDLLNELFVECRRYGEVLATKGLINSKDIEEARSSKGSQVISVGLPAYGLLYEILRSVKANSSGLLLSDGVTEITTMNRPKDVFFDWFLNPFLILKEQMKATNLSEEEEEYLGRLVLLFGDPERLKSSNAISASPPLTERKRAELDAFARRMQGLTKTVSRYPTFRRHFVALVKKLSEDLDLKDNNSAKDESITEPPAPVKIISRIFSQRSFRRKGSVNGSDQESQKGVSRNVDIV

SEQ ID NO: 101867 - DNA, 669 bp, Arabidopsis thaliana
  misc_feature (1)..(669): Ceres Seq. ID no. 13608856
  misc_feature: MA Experiment ID: 20001910 Result: Up-regulated in Transcription
  misc_feature: MA Experiment 20001910 PARAMETER Experiment Name: At_Drought_Reproduction_P Parameter: Age (day) Value: 37
  misc_feature: MA Experiment 20001910 PARAMETER Experiment Name: At_Drought_Reproduction_P Parameter: Organism Value: A. thaliana
  misc_feature: MA Experiment 20001910 PARAMETER Experiment Name: At_Drought_Reproduction_P Parameter: Plant Line Value: WS
  misc_feature: MA Experiment 20001910 PARAMETER Experiment Name: At_Drought_Reproduction_P Parameter: Timepoint (day) Value: 7
  misc_feature: MA Experiment 20001910 PARAMETER Experiment Name: At_Drought_Reproduction_P Parameter: Tissue Value: Flowers
  misc_feature: MA Experiment 20001910 PARAMETER Experiment Name: At_Drought_Reproduction_P Parameter: Treatment Value: Drought vs. No Drought
aaaaataactcttttcttctttttaatcttttttagcactaatcataaaccacaaaaatacataattaatcaccacaaaagcaattcacattcaccacaaaatgacaatgacacttaaactcctatctctcgccgtggctgccttggccatcaccgccgtcttggccgccgatcctccaacaccggcaaacgcaccgaaagccaacggcgaaaagaactctacctctccttctcccgccgccgcagcatccccaaaatcacccacggcctccgccccaacctcaccgcctacagctgctccaaccatggccaagaaaaattccaccggaactccaagcccttccccatcttccccatctccaaagtcatcatcagccaaaactccggcttcaagccctgactcaagctccggtgattcttccgaaggtcctaccagctcctctgacgcacctaccgcctcctctccgccagctccgactccagaaatgtctccatcttccgatgacggaactggcgccagtgacggccctgaagcttcggctcctgcggcaggagcctcatcgcttgtgatctctgtctcgggctctgttctcgcagccgttgcatggcttttcttcatatgattgaatattactagtattttcttggagatttcatactacatttaag

SEQ ID NO: 101868 - protein, 173 aa, Arabidopsis thaliana
  peptide (1)..(173): Ceres Seq. ID no. 13608857
  misc_feature (7)..(154): Pfam Name: Equine herpesvirus glycoprotein gp2 Pfam Description: Equine herpesvirus glycoprotein gp2
  misc_feature (46)..(172): Homolog of NCBI NO: 25354589 NR Description: probable arabinogalactan protein AGP6 [imported] Arabidopsis thaliana >gi|4775268|emb|CAB42531.1| AGP6 protein
  misc_feature (46)..(172): Homolog of NCBI NO: 15241392 NR Description: arabinogalactan-protein (AGP6) [Arabidopsis
  misc_feature (18)..(166): Homolog of NCBI NO: 11359723 NR Description: proteophosphoglycan, membrane-associated - Leishmania major (fragment) >gi|5420389|emb|CAB46680.1|
  misc_feature (56)..(171): Homolog of NCBI NO: 18395919 NR Description: arabinogalactan-protein (AGP11) [Arabidopsis >gi|6016727|gb|AAF01553.1|AC009325_23 unknown protein
  misc_feature (9)..(166): Homolog of NCBI NO: 13592175 NR Description: ppg3 [Leishmania major]
  misc_feature (56)..(171): Homolog of NCBI NO: 10880499 NR Description: arabinogalactan protein [Arabidopsis thaliana]
  misc_feature (14)..(166): Homolog of NCBI NO: 13592175 NR Description: ppg3 [Leishmania major]
  misc_feature (14)..(166): Homolog of NCBI NO: 5420387 NR Description: proteophosphoglycan [Leishmania major]
  misc_feature (22)..(166): Homolog of NCBI NO: 11359723 NR Description: proteophosphoglycan, membrane-associated - Leishmania major (fragment) >gi|5420389|emb|CAB46680.1|
  misc_feature (9)..(166): Homolog of NCBI NO: 13592175 NR Description: ppg3 [Leishmania major]
MTMTLKLLSLAVAALAITAVLAADPPTPANAPKANGEKNSTSPSPAAAASPKSPTASAPTSPPTAAPTMAKKNSTGTPSPSPSSPSPKSSSAKTPASSPDSSSGDSSEGPTSSSDAPTASSPPAPTPEMSPSSDDGTGASDGPEASAPAAGASSLVISVSGSVLAAVAWLFFI

SEQ ID NO: 101869 - protein, 171 aa, Arabidopsis thaliana
  peptide (1)..(171): Ceres Seq. ID no. 13608858
  misc_feature (5)..(152): Pfam Name: Equine herpesvirus glycoprotein gp2 Pfam Description: Equine herpesvirus glycoprotein gp2
  misc_feature (44)..(170): Homolog of NCBI NO: 25354589 NR Description: probable arabinogalactan protein AGP6 [imported] Arabidopsis thaliana >gi|4775268|emb|CAB42531.1| AGP6 protein
  misc_feature (44)..(170): Homolog of NCBI NO: 15241392 NR Description: arabinogalactan-protein (AGP6) [Arabidopsis
  misc_feature (16)..(164): Homolog of NCBI NO: 11359723 NR Description: proteophosphoglycan, membrane-associated - Leishmania major (fragment) >gi|5420389|emb|CAB46680.1|
  misc_feature (54)..(169): Homolog of NCBI NO: 18395919 NR Description: arabinogalactan-protein (AGP11) [Arabidopsis >gi|6016727|gb|AAF01553.1|AC009325_23 unknown protein
  misc_feature (7)..(164): Homolog of NCBI NO: 13592175 NR Description: ppg3 [Leishmania major]
  misc_feature (54)..(169): Homolog of NCBI NO: 10880499 NR Description: arabinogalactan protein [Arabidopsis thaliana]
  misc_feature (12)..(164): Homolog of NCBI NO: 13592175 NR Description: ppg3 [Leishmania major]
  misc_feature (12)..(164): Homolog of NCBI NO: 5420387 NR Description: proteophosphoglycan [Leishmania major]
  misc_feature (20)..(164): Homolog of NCBI NO: 11359723 NR Description: proteophosphoglycan, membrane-associated - Leishmania major (fragment) >gi|5420389|emb|CAB46680.1|
  misc_feature (7)..(164): Homolog of NCBI NO: 13592175 NR Description: ppg3 [Leishmania major]
MTLKLLSLAVAALAITAVLAADPPTPANAPKANGEKNSTSPSPAAAASPKSPTASAPTSPPTAAPTMAKKNSTGTPSPSPSSPSPKSSSAKTPASSPDSSSGDSSEGPTSSSDAPTASSPPAPTPEMSPSSDDGTGASDGPEASAPAAGASSLVISVSGSVLAAVAWLFFI

SEQ ID NO: 101870 - protein, 105 aa, Arabidopsis thaliana
  peptide (1)..(105): Ceres Seq. ID no. 13608859
  misc_feature (1)..(86): Pfam Name: Equine herpesvirus glycoprotein gp2 Pfam Description: Equine herpesvirus glycoprotein gp2
  misc_feature (1)..(104): Homolog of NCBI NO: 25354589 NR Description: probable arabinogalactan protein AGP6 [imported] Arabidopsis thaliana >gi|4775268|emb|CAB42531.1| AGP6 protein
  misc_feature (1)..(104): Homolog of NCBI NO: 15241392 NR Description: arabinogalactan-protein (AGP6) [Arabidopsis
  misc_feature (1)..(98): Homolog of NCBI NO: 11359723 NR Description: proteophosphoglycan, membrane-associated - Leishmania major (fragment) >gi|5420389|emb|CAB46680.1|
  misc_feature (1)..(103): Homolog of NCBI NO: 18395919 NR Description: arabinogalactan-protein (AGP11) [Arabidopsis >gi|6016727|gb|AAF01553.1|AC009325_23 unknown protein
  misc_feature (1)..(98): Homolog of NCBI NO: 13592175 NR Description: ppg3 [Leishmania major]
  misc_feature (1)..(103): Homolog of NCBI NO: 10880499 NR Description: arabinogalactan protein [Arabidopsis thaliana]
  misc_feature (1)..(98): Homolog of NCBI NO: 13592175 NR Description: ppg3 [Leishmania major]
  misc_feature (1)..(98): Homolog of NCBI NO: 5420387 NR Description: proteophosphoglycan [Leishmania major]
  misc_feature (1)..(98): Homolog of NCBI NO: 11359723 NR Description: proteophosphoglycan, membrane-associated - Leishmania major (fragment) >gi|5420389|emb|CAB46680.1|
  misc_feature (1)..(98): Homolog of NCBI NO: 13592175 NR Description: ppg3 [Leishmania major]
MAKKNSTGTPSPSPSSPSPKSSSAKTPASSPDSSSGDSSEGPTSSSDAPTASSPPAPTPEMSPSSDDGTGASDGPEASAPAAGASSLVISVSGSVLAAVAWLFFI

SEQ ID NO: 101871 - DNA, 1889 bp, Arabidopsis thaliana
  misc_feature (1)..(1889): Ceres Seq. ID no. 13608879
  misc_feature: MA Experiment ID: 108461 Result: Down-regulated in Transcription
  misc_feature: MA Experiment 108461 PARAMETER Experiment Name: At_Germinating_Seeds_cDNA_P Parameter: Age (day) Value: 1 vs. 0
  misc_feature: MA Experiment 108461 PARAMETER Experiment Name: At_Germinating_Seeds_cDNA_P Parameter: Tissue Value: Germinating Seeds
  misc_feature: MA Experiment ID: 108488 Result: Down-regulated in Transcription
  misc_feature: MA Experiment ID: 108569 Result: Up-regulated in Transcription
  misc_feature: MA Experiment 108569 PARAMETER Experiment Name: At_0.001%_MeJA__cDNA_P Parameter: Timepoint (hr) Value: 6
  misc_feature: MA Experiment 108569 PARAMETER Experiment Name: At_0.001%_MeJA__cDNA_P Parameter: Tissue Value: Aerial
  misc_feature: MA Experiment 108569 PARAMETER Experiment Name: At_0.001%_MeJA__cDNA_P Parameter: Treatment Value: 0.001% MeJA vs. No Treatment
  misc_feature: MA Experiment ID: 108573 Result: Up-regulated in Transcription
  misc_feature: MA Experiment 108573 PARAMETER Experiment Name: At_Drought_cDNA_P Parameter: Timepoint (hr) Value: 6
  misc_feature: MA Experiment 108573 PARAMETER Experiment Name: At_Drought_cDNA_P Parameter: Tissue Value: Aerial
  misc_feature: MA Experiment 108573 PARAMETER Experiment Name: At_Drought_cDNA_P Parameter: Treatment Value: Drought vs. No Drought
  misc_feature: MA Experiment ID: 108585 Result: Up-regulated in Transcription
  misc_feature: MA Experiment 108585 PARAMETER Experiment Name: At_5mM_NaNP_cDNA_P Parameter: Timepoint (hr) Value: 6
  misc_feature: MA Experiment 108585 PARAMETER Experiment Name: At_5mM_NaNP_cDNA_P Parameter: Tissue Value: Aerial
  misc_feature: MA Experiment 108585 PARAMETER Experiment Name: At_5mM_NaNP_cDNA_P Parameter: Treatment Value: null
  misc_feature: MA Experiment ID: 108594 Result: Down-regulated in Transcription
  misc_feature: MA Experiment 108594 PARAMETER Experiment Name: At_Ler-rhl_Root_cDNA_P Parameter: Plant Line Value: null
  misc_feature: MA Experiment ID: 20000069 Result: Up-regulated in Transcription
  misc_feature: MA Experiment 20000069 PARAMETER Experiment Name: At_100uM_ABA_Mutants_cDNA_P Parameter: Plant Line Value: CS23
  misc_feature: MA Experiment 20000069 PARAMETER Experiment Name: At_100uM_ABA_Mutants_cDNA_P Parameter: Timepoint (hr) Value: 6
  misc_feature: MA Experiment 20000069 PARAMETER Experiment Name: At_100uM_ABA_Mutants_cDNA_P Parameter: Tissue Value: Aerial
  misc_feature: MA Experiment 20000069 PARAMETER Experiment Name: At_100uM_ABA_Mutants_cDNA_P Parameter: Treatment Value: 100uM ABA vs. No Treatment
  misc_feature: MA Experiment ID: 20000070 Result: Up-regulated in Transcription
  misc_feature: MA Experiment 20000070 PARAMETER Experiment Name: At_100uM_ABA_Mutants_cDNA_P Parameter: Plant Line Value: CS24
  misc_feature: MA Experiment 20000070 PARAMETER Experiment Name: At_100uM_ABA_Mutants_cDNA_P Parameter: Timepoint (hr) Value: 6
  misc_feature: MA Experiment 20000070 PARAMETER Experiment Name: At_100uM_ABA_Mutants_cDNA_P Parameter: Tissue Value: Aerial
  misc_feature: MA Experiment 20000070 PARAMETER Experiment Name: At_100uM_ABA_Mutants_cDNA_P Parameter: Treatment Value: 100uM ABA vs. No Treatment
  misc_feature: MA Experiment ID: 20000071 Result: Up-regulated in Transcription
  misc_feature: MA Experiment 20000071 PARAMETER Experiment Name: At_100uM_ABA_Mutants_cDNA_P Parameter: Plant Line Value: CS8104
  misc_feature: MA Experiment 20000071 PARAMETER Experiment Name: At_100uM_ABA_Mutants_cDNA_P Parameter: Timepoint (hr) Value: 6
  misc_feature: MA Experiment 20000071 PARAMETER Experiment Name: At_100uM_ABA_Mutants_cDNA_P Parameter: Tissue Value: Aerial
  misc_feature: MA Experiment 20000071 PARAMETER Experiment Name: At_100uM_ABA_Mutants_cDNA_P Parameter: Treatment Value: 100uM ABA vs. No Treatment
  misc_feature: MA Experiment ID: 20000072 Result: Up-regulated in Transcription
  misc_feature: MA Experiment 20000072 PARAMETER Experiment Name: At_100uM_ABA_Mutants_cDNA_P Parameter: Plant Line Value: CS8105
  misc_feature: MA Experiment 20000072 PARAMETER Experiment Name: At_100uM_ABA_Mutants_cDNA_P Parameter: Timepoint (hr) Value: 6
  misc_feature: MA Experiment 20000072 PARAMETER Experiment Name: At_100uM_ABA_Mutants_cDNA_P Parameter: Tissue Value: Aerial
  misc_feature: MA Experiment 20000072 PARAMETER Experiment Name: At_100uM_ABA_Mutants_cDNA_P Parameter: Treatment Value: 100uM ABA vs. No Treatment
  misc_feature: MA Experiment ID: 20000086 Result: Up-regulated in Transcription
  misc_feature: MA Experiment 20000086 PARAMETER Experiment Name: At_100uM_ABA_Mutants_cDNA_P Parameter: Plant Line Value: CS22
  misc_feature: MA Experiment 20000086 PARAMETER Experiment Name: At_100uM_ABA_Mutants_cDNA_P Parameter: Timepoint (hr) Value: 6
  misc_feature: MA Experiment 20000086 PARAMETER Experiment Name: At_100uM_ABA_Mutants_cDNA_P Parameter: Tissue Value: Aerial
  misc_feature: MA Experiment 20000086 PARAMETER Experiment Name: At_100uM_ABA_Mutants_cDNA_P Parameter: Treatment Value: 100uM ABA vs. No Treatment
  misc_feature: MA Experiment ID: 20000088 Result: Up-regulated in Transcription
  misc_feature: MA Experiment 20000088 PARAMETER Experiment Name: At_100uM_ABA_Mutants_cDNA_P Parameter: Plant Line Value: Landsberg
  misc_feature: MA Experiment 20000088 PARAMETER Experiment Name: At_100uM_ABA_Mutants_cDNA_P Parameter: Timepoint (hr) Value: 6
  misc_feature: MA Experiment 20000088 PARAMETER Experiment Name: At_100uM_ABA_Mutants_cDNA_P Parameter: Tissue Value: Aerial
  misc_feature: MA Experiment 20000088 PARAMETER Experiment Name: At_100uM_ABA_Mutants_cDNA_P Parameter: Treatment Value: 100uM ABA vs. No Treatment
  misc_feature: MA Experiment ID: 20000117 Result: Up-regulated in Transcription
  misc_feature: MA Experiment 20000117 PARAMETER Experiment Name: At_100uM_ABA_Mutants_cDNA_P Parameter: Plant Line Value: Columbia
  misc_feature: MA Experiment 20000117 PARAMETER Experiment Name: At_100uM_ABA_Mutants_cDNA_P Parameter: Timepoint (hr) Value: 6
  misc_feature: MA Experiment 20000117 PARAMETER Experiment Name: At_100uM_ABA_Mutants_cDNA_P Parameter: Tissue Value: Aerial
  misc_feature: MA Experiment 20000117 PARAMETER Experiment Name: At_100uM_ABA_Mutants_cDNA_P Parameter: Treatment Value: 100uM ABA vs. No Treatment
  misc_feature: MA Experiment ID: 20000179 Result: Down-regulated in Transcription
  misc_feature: MA Experiment 20000179 PARAMETER Experiment Name: At_Germinating_Seeds_P Parameter: Age (hr) Value: 6 vs. 0
  misc_feature: MA Experiment 20000179 PARAMETER Experiment Name: At_Germinating_Seeds_P Parameter: Tissue Value: Germinating Seeds
  misc_feature: MA Experiment ID: 20000180 Result: Down-regulated in Transcription
  misc_feature: MA Experiment 20000180 PARAMETER Experiment Name: At_Germinating_Seeds_P Parameter: Age (hr) Value: 24 vs. 0
  misc_feature: MA Experiment 20000180 PARAMETER Experiment Name: At_Germinating_Seeds_P Parameter: Tissue Value: Germinating Seeds
  misc_feature: MA Experiment ID: 20000185 Result: Up-regulated in Transcription
  misc_feature: MA Experiment 20000185 PARAMETER Experiment Name: At_Roots__P Parameter: Age (day) Value: 7 vs. 21
  misc_feature: MA Experiment 20000185 PARAMETER Experiment Name: At_Roots__P Parameter: Organism Value: A. thaliana
  misc_feature: MA Experiment 20000185 PARAMETER Experiment Name: At_Roots__P Parameter: Tissue Value: Roots vs. Whole Plant
  misc_feature: MA Experiment ID: 20000794 Result: Up-regulated in Transcription
  misc_feature: MA Experiment 20000794 PARAMETER Experiment Name: At_Petals_P Parameter: Age (day) Value: 23-25 days
  misc_feature: MA Experiment 20000794 PARAMETER Experiment Name: At_Petals_P Parameter: Plant Line Value: WS
  misc_feature: MA Experiment 20000794 PARAMETER Experiment Name: At_Petals_P Parameter: Tissue Value: Petals vs. Whole plant
aactcataaatctctcattctttctcagattctctctctctgttttccttgttctccaagccagatctctctccataaatctctcttcatctctctctttccaccaaacatccgcgatcctcgattctcaattccgtgtctgttttttttcttcacttagcgatggcgatgatagagcaaaggccgaagacgaagatcgtttgtactctaggtccagcttccagatctgttccgatggtcgagaagcttcttagggctggtatgaacgttgctcgtttcaatttctctcatggatctcatgaataccatcaagagactctcgataatcttcatcaagctatgcttaacactgggattctctgtgccgtcatgctcgacaccaagggtccagaaatccgaaccgggttcttgaaagatgggaaaccaatccagctgaaacaaggacaagagatcactatttcgactgactatgacttgaagggtgacgagaacacgatttgcatgagctacaaaaagttggctgttgatgtgaacccaggaatggtcattctttgtgctgatggtacaatctccttactggttctctcttgtgacaaagagaacggtacagtccgttgccggtgtgagaactctgcgatgctcggtgagagaaagaacgttaatctcccaggtgttgttgtggatctcccaactctaactgagaaagacaaagaagacatcatgcaatggggagtcccgaatcaaatcgacatgattgctctgtcttttgtcaggaaaggttcagacttggttcaagtccggaaacttctaggaaagcacgccaaaaacattcttctcatgtctaaggtcgagaaccaagaaggtgtggcaaattttgatgacattttggtcaattcagacgctttcatgattgctagaggagatctgggcatggaaatcccgattgagaagatcttcttagctcagaaggtgatgatctacaaatgcaacatccagggaaaacctgtggtcacagcaactcagatgctcgagtccatgatcaaatctcctagacccacaagagccgaagctacggatgtagcaaacgcagtccttgatggtacagactgtgtcatgctcagtggtgaaactgcagctggagcataccctgaactagccgtccgtacaatggctaagatctgcgtggaagccgagagcacccttgactacggtgatgtcttcaagaggatcatgctgtactctccagttccaatgagtccactcgagtcacttgcatcttcagctgtcagaactgctaactcagctagagccactctcatcatggtcctaaccagaggaggaagcacagcaagacttgtggctaagtacagaccaggaatgcctattctatccgtcgttgttcctgagatcaaaaccgacttctttgactggtcttgcagcgatgaatcccccgcgagacacagccttatcttccgtggtctgatcccagtgctctacgctggatccgcaagagcctcacacgatgaatcaacagaagaagctatcgagtttgctactcagtacgggaaagagaaagagctatgcaagactggagattccgttgttgctctactccgagtcggtaatgcttccgtgatcaagatcttgaccgtcaagtgatgattccactcaaaaattcacgtttttggcgtttggggaacgctactttaaacgttttattatgaaactattcaagattgtgattaaaatcttgagatagaaaactcaagttctattttttgcttattaccacaactactgtgaccggtgaatccacttaacagctccttttgggatattttggttgtattgaaacctattggatcattcatacacgtatcaattatcat

SEQ ID NO: 101872 - protein, 498 aa, Arabidopsis thaliana; identical to SEQ ID NO: 21788
  peptide (1)..(498): Ceres Seq. ID no. 13608880
  misc_feature (367)..(498): Pfam Name: Pyruvate kinase, alpha/beta domain Pfam Description: Pyruvate kinase, alpha/beta domain
  misc_feature (1)..(498): Homolog of NCBI NO: 15241190 NR Description: pyruvate kinase, putative [Arabidopsis thaliana] pyruvate kinase [Arabidopsis thaliana]
  misc_feature (1)..(498): Homolog of NCBI NO: 15236190 NR Description: pyruvate kinase, putative [Arabidopsis thaliana]
  misc_feature (6)..(498): Homolog of NCBI NO: 2497543 NR Description: Pyruvate kinase, cytosolic isozyme
  misc_feature (8)..(498): Homolog of NCBI NO: 15242313 NR Description: pyruvate kinase, putative [Arabidopsis thaliana] pyruvate kinase [Arabidopsis thaliana]
  misc_feature (8)..(498): Homolog of NCBI NO: 15242863 NR Description: pyruvate kinase, putative [Arabidopsis thaliana]
  misc_feature (8)..(498): Homolog of NCBI NO: 2497538 NR Description: Pyruvate kinase, cytosolic isozyme

SEQ ID NO: 101873 - protein, 496 aa, Arabidopsis thaliana; identical to SEQ ID NO: 21789
  peptide (1)..(496): Ceres Seq. ID no. 13608881
  misc_feature (365)..(496): Pfam Name: Pyruvate kinase, alpha/beta domain Pfam Description: Pyruvate kinase, alpha/beta domain
  misc_feature (1)..(496): Homolog of NCBI NO: 15241190 NR Description: pyruvate kinase, putative [Arabidopsis thaliana] pyruvate kinase [Arabidopsis thaliana]
  misc_feature (1)..(496): Homolog of NCBI NO: 15236190 NR Description: pyruvate kinase, putative [Arabidopsis thaliana]
  misc_feature (4)..(496): Homolog of NCBI NO: 2497543 NR Description: Pyruvate kinase, cytosolic isozyme
  misc_feature (6)..(496): Homolog of NCBI NO: 15242313 NR Description: pyruvate kinase, putative [Arabidopsis thaliana] pyruvate kinase [Arabidopsis thaliana]
  misc_feature (6)..(496): Homolog of NCBI NO: 15242863 NR Description: pyruvate kinase, putative [Arabidopsis thaliana]
  misc_feature (6)..(496): Homolog of NCBI NO: 2497538 NR Description: Pyruvate kinase, cytosolic isozyme

SEQ ID NO: 101874 - protein, 474 aa, Arabidopsis thaliana; identical to SEQ ID NO: 21790
  peptide (1)..(474): Ceres Seq. ID no. 13608882
  misc_feature (343)..(474): Pfam Name: Pyruvate kinase, alpha/beta domain Pfam Description: Pyruvate kinase, alpha/beta domain
  misc_feature (1)..(474): Homolog of NCBI NO: 15241190 NR Description: pyruvate kinase, putative [Arabidopsis thaliana] pyruvate kinase [Arabidopsis thaliana]
  misc_feature (1)..(474): Homolog of NCBI NO: 15236190 NR Description: pyruvate kinase, putative [Arabidopsis thaliana]
  misc_feature (1)..(474): Homolog of NCBI NO: 2497543 NR Description: Pyruvate kinase, cytosolic isozyme
  misc_feature (1)..(474): Homolog of NCBI NO: 15242313 NR Description: pyruvate kinase, putative [Arabidopsis thaliana] pyruvate kinase [Arabidopsis thaliana]
  misc_feature (1)..(474): Homolog of NCBI NO: 15242863 NR Description: pyruvate kinase, putative [Arabidopsis thaliana]
  misc_feature (1)..(474): Homolog of NCBI NO: 2497538 NR Description: Pyruvate kinase, cytosolic isozyme

SEQ ID NO: 101875 - DNA, 1227 bp, Arabidopsis thaliana
  misc_feature (1)..(1227): Ceres Seq. ID no. 13608883
  misc_feature: MA Experiment ID: 20000264 Result: Up-regulated in Transcription
  misc_feature: MA Experiment 20000264 PARAMETER Experiment Name: At_Open_Flower_P Parameter: Age (day) Value: 21
  misc_feature: MA Experiment 20000264 PARAMETER Experiment Name: At_Open_Flower_P Parameter: Plant Line Value: WS
  misc_feature: MA Experiment 20000264 PARAMETER Experiment Name: At_Open_Flower_P Parameter: Tissue Value: Open Flower vs. Whole Plant
  misc_feature: MA Experiment ID: 20000286 Result: Up-regulated in Transcription
  misc_feature: MA Experiment 20000286 PARAMETER Experiment Name: At_Open_Flower_P Parameter: Age (day) Value: 21
  misc_feature: MA Experiment 20000286 PARAMETER Experiment Name: At_Open_Flower_P Parameter: Plant Line Value: WS
  misc_feature: MA Experiment 20000286 PARAMETER Experiment Name: At_Open_Flower_P Parameter: Tissue Value: Half Open vs. Whole Plant
  misc_feature: MA Experiment ID: 20000439 Result: Down-regulated in Transcription
  misc_feature: MA Experiment 20000439 PARAMETER Experiment Name: At_Roots__P Parameter: Age (day) Value: 14 vs. 21
  misc_feature: MA Experiment 20000439 PARAMETER Experiment Name: At_Roots__P Parameter: Organism Value: A. thaliana
  misc_feature: MA Experiment 20000439 PARAMETER Experiment Name: At_Roots__P Parameter: Tissue Value: Roots vs. Whole Plant
  misc_feature: MA Experiment ID: 20000573 Result: Up-regulated in Transcription
  misc_feature: MA Experiment 20000573 PARAMETER Experiment Name: At_100uM_ABA_Mutants__P Parameter: Organism Value: A. thaliana
  misc_feature: MA Experiment 20000573 PARAMETER Experiment Name: At_100uM_ABA_Mutants__P Parameter: Plant Line Value: CS22 vs. Ler wt
  misc_feature: MA Experiment 20000573 PARAMETER Experiment Name: At_100uM_ABA_Mutants__P Parameter: Timepoint (hr) Value: N/A
  misc_feature: MA Experiment 20000573 PARAMETER Experiment Name: At_100uM_ABA_Mutants__P Parameter: Tissue Value: Whole Plant
  misc_feature: MA Experiment 20000573 PARAMETER Experiment Name: At_100uM_ABA_Mutants__P Parameter: Treatment Value: None
  misc_feature: MA Experiment ID: 20000794 Result: Up-regulated in Transcription
  misc_feature: MA Experiment 20000794 PARAMETER Experiment Name: At_Petals_P Parameter: Age (day) Value: 23-25 days
  misc_feature: MA Experiment 20000794 PARAMETER Experiment Name: At_Petals_P Parameter: Plant Line Value: WS
  misc_feature: MA Experiment 20000794 PARAMETER Experiment Name: At_Petals_P Parameter: Tissue Value: Petals vs. Whole plant
  misc_feature: MA Experiment ID: 20001757 Result: Down-regulated in Transcription
  misc_feature: MA Experiment 20001757 PARAMETER Experiment Name: At_50mM_NH4NO3_L-to-H_P Parameter: Timepoint (hr) Value: 6
  misc_feature: MA Experiment 20001757 PARAMETER Experiment Name: At_50mM_NH4NO3_L-to-H_P Parameter: Tissue Value: Leaf
  misc_feature: MA Experiment 20001757 PARAMETER Experiment Name: At_50mM_NH4NO3_L-to-H_P Parameter: Treatment Value: 50mM NH4NO3 vs 100mM Mannitol
atcttttcgtagacattctctctcgatctttagttttcataactcatcttcttttttactttgtttttttttggaagatgaatatctccgtcgaaaaccctgtttttgtacatgaggactcgacaacgcagaagaccggagagttacgattggacagcgacataccaatgtcgaagatatcatccgatgatgaagtgtttttggctcctgagatgaacgcatttggtcgtcaattcagagactacacggatacaaacagcgagaggcaaaagagcgtcgaacatttctatgcaacacaacacactaaccaaactttagactttgtacagaaaatgagaagtgagtatggaaaattggacaagatggtgatgaacatttgggaatgttgtgaactttcaaaagaagtggtggacgagagtgatcccgacctcgacgaaccacaaattcaacatttgcttcaatctgcggaagcaatccgtaaagattatcctaacgaagattggcttcatctcactgcgcttatccatgatcttgggaaggttcttaccctaccacagtttggagggcttcctcaatgggctgttgttggtgacacatttcctgttgggtgtgcatttgatgaatctaacgtacaccacaagtattttatggaaaaccctgattttaacaaccctaagtacaataccaaagctggaatttattctgaaggctgtggacttgaaaatgttcttatgtcatggggacatgatgactacatgtatctggtggccaaggagaatggaagcaccttaccatccccgggactattcatcatccgataccattccttttatccattgcacaaggctggagcttacactcaccttatgaacgaggaagacaaggagaatctcaaatggcttcatgtttttaacaagtatgacttatacagcaagagcaaagtacacgtcaatgtcgagaaggttaagccgtactacatgtctcttatcaagaaatatttcccggaaaatctgaggtggtgaaaacggcatcgaggccgtccaaaaaaagtctactattagaaagataaaatggtgtgtgtgtttgattacttgtcgtttaagcatattattgcccagttaataaagttgtattgttacattagctaatgttaatgctaatgttgatacaaacggtaattgtatctcgtctgtcctattataaactaaaatgatattttcttctttc

SEQ ID NO: 101876 - protein, 339 aa, Arabidopsis thaliana
  peptide (1)..(339): Ceres Seq. ID no. 13608884
  misc_feature (83)..(339): Pfam Name: Family of unknown function (DUF706) Pfam Description: Family of unknown function (DUF706)
  misc_feature (26)..(339): Homolog of NCBI NO: 15241891 NR Description: expressed protein [Arabidopsis thaliana] gene_id:MIK19.9~pir||T06010~similar to unknown protein
  misc_feature (26)..(339): Homolog of NCBI NO: 21536858 NR Description: unknown [Arabidopsis thaliana]
  misc_feature (26)..(339): Homolog of NCBI NO: 7487428 NR Description: hypothetical protein T25K17.70 - Arabidopsis >gi|4539422|emb|CAB38955.1| putative protein [Arabidopsis >gi|7269477|emb|CAB79481.1| putative protein [Arabidopsis
  misc_feature (26)..(339): Homolog of NCBI NO: 30687167 NR Description: expressed protein [Arabidopsis thaliana]
  misc_feature (43)..(339): Homolog of NCBI NO: 21554393 NR Description: unknown [Arabidopsis thaliana]
  misc_feature (43)..(339): Homolog of NCBI NO: 18399158 NR Description: expressed protein [Arabidopsis thaliana]
  misc_feature (63)..(339): Homolog of NCBI NO: 30683840 NR Description: expressed protein [Arabidopsis thaliana] unknown protein [Arabidopsis thaliana]
  misc_feature (63)..(339): Homolog of NCBI NO: 26451656 NR Description: unknown protein [Arabidopsis thaliana]
  misc_feature (99)..(339): Homolog of NCBI NO: 13877657 NR Description: Unknown protein [Arabidopsis thaliana]
  misc_feature (63)..(331): Homolog of NCBI NO: 7262695 NR Description: Strong similarity to an unknown protein from
LFVDILSRSLVFITHLLFYFVFFWKMNISVENPVFVHEDSTTQKTGELRLDSDIPMSKISSDDEVFLAPEMNAFGRQFRDYTDTNSERQKSVEHFYATQHTNQTLDFVQKMRSEYGKLDKMVMNIWECCELSKEVVDESDPDLDEPQIQHLLQSAEAIRKDYPNEDWLHLTALIHDLGKVLTLPQFGGLPQWAVVGDTFPVGCAFDESNVHHKYFMENPDFNNPKYNTKAGIYSEGCGLENVLMSWGHDDYMYLVAKENGSTLPSPGLFIIRYHSFYPLHKAGAYTHLMNEEDKENLKWLHVFNKYDLYSKSKVHVNVEKVKPYYMSLIKKYFPENLRW

SEQ ID NO: 101877 - protein, 314 aa, Arabidopsis thaliana
  peptide (1)..(314): Ceres Seq. ID no. 13608885
  misc_feature (58)..(314): Pfam Name: Family of unknown function (DUF706) Pfam Description: Family of unknown function (DUF706)
  misc_feature (1)..(314): Homolog of NCBI NO: 15241891 NR Description: expressed protein [Arabidopsis thaliana] gene_id:MIK19.9~pir||T06010~similar to unknown protein
  misc_feature (1)..(314): Homolog of NCBI NO: 21536858 NR Description: unknown [Arabidopsis thaliana]
  misc_feature (1)..(314): Homolog of NCBI NO: 7487428 NR Description: hypothetical protein T25K17.70 - Arabidopsis >gi|4539422|emb|CAB38955.1| putative protein [Arabidopsis >gi|7269477|emb|CAB79481.1| putative protein [Arabidopsis
  misc_feature (1)..(314): Homolog of NCBI NO: 30687167 NR Description: expressed protein [Arabidopsis thaliana]
  misc_feature (18)..(314): Homolog of NCBI NO: 21554393 NR Description: unknown [Arabidopsis thaliana]
  misc_feature (18)..(314): Homolog of NCBI NO: 18399158 NR Description: expressed protein [Arabidopsis thaliana]
  misc_feature (38)..(314): Homolog of NCBI NO: 30683840 NR Description: expressed protein [Arabidopsis thaliana] unknown protein [Arabidopsis thaliana]
  misc_feature (38)..(314): Homolog of NCBI NO: 26451656 NR Description: unknown protein [Arabidopsis thaliana]
  misc_feature (74)..(314): Homolog of NCBI NO: 13877657 NR Description: Unknown protein [Arabidopsis thaliana]
  misc_feature (38)..(306): Homolog of NCBI NO: 7262695 NR Description: Strong similarity to an unknown protein from
MNISVENPVFVHEDSTTQKTGELRLDSDIPMSKISSDDEVFLAPEMNAFGRQFRDYTDTNSERQKSVEHFYATQHTNQTLDFVQKMRSEYGKLDKMVMNIWECCELSKEVVDESDPDLDEPQIQHLLQSAEAIRKDYPNEDWLHLTALIHDLGKVLTLPQFGGLPQWAVVGDTFPVGCAFDESNVHHKYFMENPDFNNPKYNTKAGIYSEGCGLENVLMSWGHDDYMYLVAKENGSTLPSPGLFIIRYHSFYPLHKAGAYTHLMNEEDKENLKWLHVFNKYDLYSKSKVHVNVEKVKPYYMSLIKKYFPENLRW

SEQ ID NO: 101878 - protein, 284 aa, Arabidopsis thaliana
  peptide (1)..(284): Ceres Seq. ID no. 13608886
  misc_feature (28)..(284): Pfam Name: Family of unknown function (DUF706) Pfam Description: Family of unknown function (DUF706)
  misc_feature (1)..(284): Homolog of NCBI NO: 15241891 NR Description: expressed protein [Arabidopsis thaliana] gene_id:MIK19.9~pir||T06010~similar to unknown protein
  misc_feature (1)..(284): Homolog of NCBI NO: 21536858 NR Description: unknown [Arabidopsis thaliana]
  misc_feature (1)..(284): Homolog of NCBI NO: 7487428 NR Description: hypothetical protein T25K17.70 - Arabidopsis >gi|4539422|emb|CAB38955.1| putative protein [Arabidopsis >gi|7269477|emb|CAB79481.1| putative protein [Arabidopsis
  misc_feature (1)..(284): Homolog of NCBI NO: 30687167 NR Description: expressed protein [Arabidopsis thaliana]
  misc_feature (1)..(284): Homolog of NCBI NO: 21554393 NR Description: unknown [Arabidopsis thaliana]
  misc_feature (1)..(284): Homolog of NCBI NO: 18399158 NR Description: expressed protein [Arabidopsis thaliana]
  misc_feature (8)..(284): Homolog of NCBI NO: 30683840 NR Description: expressed protein [Arabidopsis thaliana] unknown protein [Arabidopsis thaliana]
  misc_feature (8)..(284): Homolog of NCBI NO: 26451656 NR Description: unknown protein [Arabidopsis thaliana]
  misc_feature (44)..(284): Homolog of NCBI NO: 13877657 NR Description: Unknown protein [Arabidopsis thaliana]
  misc_feature (8)..(276): Homolog of NCBI NO: 7262695 NR Description: Strong similarity to an unknown protein from
MSKISSDDEVFLAPEMNAFGRQFRDYTDTNSERQKSVEHFYATQHTNQTLDFVQKMRSEYGKLDKMVMNIWECCELSKEVVDESDPDLDEPQIQHLLQSAEAIRKDYPNEDWLHLTALIHDLGKVLTLPQFGGLPQWAVVGDTFPVGCAFDESNVHHKYFMENPDFNNPKYNTKAGIYSEGCGLENVLMSWGHDDYMYLVAKENGSTLPSPGLFIIRYHSFYPLHKAGAYTHLMNEEDKENLKWLHVFNKYDLYSKSKVHVNVEKVKPYYMSLIKKYFPENLRW

SEQ ID NO: 101879 - DNA, 887 bp, Arabidopsis thaliana
  misc_feature (1)..(887): Ceres Seq. ID no. 13608897
  misc_feature: MA Experiment ID: 108434 Result: Down-regulated in Transcription
  misc_feature: MA Experiment 108434 PARAMETER Experiment Name: At_Root_Tips_cDNA_P Parameter: Tissue Value: Root Tips
  misc_feature: MA Experiment ID: 108461 Result: Up-regulated in Transcription
  misc_feature: MA Experiment 108461 PARAMETER Experiment Name: At_Germinating_Seeds_cDNA_P Parameter: Age (day) Value: 1 vs. 0
  misc_feature: MA Experiment 108461 PARAMETER Experiment Name: At_Germinating_Seeds_cDNA_P Parameter: Tissue Value: Germinating Seeds
  misc_feature: MA Experiment ID: 108463 Result: Up-regulated in Transcription
  misc_feature: MA Experiment 108463 PARAMETER Experiment Name: At_Germinating_Seeds_cDNA_P Parameter: Age (day) Value: 3 vs. 0
  misc_feature: MA Experiment 108463 PARAMETER Experiment Name: At_Germinating_Seeds_cDNA_P Parameter: Tissue Value: Germinating Seeds
  misc_feature: MA Experiment ID: 108464 Result: Up-regulated in Transcription
  misc_feature: MA Experiment 108464 PARAMETER Experiment Name: At_Germinating_Seeds_cDNA_P Parameter: Age (day) Value: 4 vs. 0
  misc_feature: MA Experiment 108464 PARAMETER Experiment Name: At_Germinating_Seeds_cDNA_P Parameter: Tissue Value: Germinating Seeds
  misc_feature: MA Experiment ID: 108577 Result: Down-regulated in Transcription
  misc_feature: MA Experiment 108577 PARAMETER Experiment Name: At_42deg_Heat_cDNA_P Parameter: Temperature (deg C) Value: 42 vs. 22
  misc_feature: MA Experiment 108577 PARAMETER Experiment Name: At_42deg_Heat_cDNA_P Parameter: Timepoint (hr) Value: 6
  misc_feature: MA Experiment 108577 PARAMETER Experiment Name: At_42deg_Heat_cDNA_P Parameter: Tissue Value: Aerial
  misc_feature: MA Experiment ID: 108594 Result: Down-regulated in Transcription
  misc_feature: MA Experiment 108594 PARAMETER Experiment Name: At_Ler-rhl_Root_cDNA_P Parameter: Plant Line Value: null
  misc_feature: MA Experiment ID: 20000117 Result: Up-regulated in Transcription
  misc_feature: MA Experiment 20000117 PARAMETER Experiment Name: At_100uM_ABA_Mutants_cDNA_P Parameter: Plant Line Value: Columbia
  misc_feature: MA Experiment 20000117 PARAMETER Experiment Name: At_100uM_ABA_Mutants_cDNA_P Parameter: Timepoint (hr) Value: 6
  misc_feature: MA Experiment 20000117 PARAMETER Experiment Name: At_100uM_ABA_Mutants_cDNA_P Parameter: Tissue Value: Aerial
  misc_feature: MA Experiment 20000117 PARAMETER Experiment Name: At_100uM_ABA_Mutants_cDNA_P Parameter: Treatment Value: 100uM ABA vs. No Treatment
  misc_feature: MA Experiment ID: 20000173 Result: Down-regulated in Transcription
  misc_feature: MA Experiment 20000173 PARAMETER Experiment Name: At_42deg_Heat_P Parameter: Age (day) Value: 14
  misc_feature: MA Experiment 20000173 PARAMETER Experiment Name: At_42deg_Heat_P Parameter: Organism Value: A. thaliana
  misc_feature: MA Experiment 20000173 PARAMETER Experiment Name: At_42deg_Heat_P Parameter: Plant Line Value: WS
  misc_feature: MA Experiment 20000173 PARAMETER Experiment Name: At_42deg_Heat_P Parameter: Temperature (deg C) Value: 42 vs. 22
  misc_feature: MA Experiment 20000173 PARAMETER Experiment Name: At_42deg_Heat_P Parameter: Timepoint (hr) Value: 6
  misc_feature: MA Experiment 20000173 PARAMETER Experiment Name: At_42deg_Heat_P Parameter: Tissue Value: Aerial
  misc_feature: MA Experiment ID: 20000184 Result: Down-regulated in Transcription
  misc_feature: MA Experiment 20000184 PARAMETER Experiment Name: At_Shoots__P Parameter: Age (day) Value: 7
  misc_feature: MA Experiment 20000184 PARAMETER Experiment Name: At_Shoots__P Parameter: Tissue Value: Shoots vs. Whole Plant
  misc_feature: MA Experiment ID: 20000185 Result: Up-regulated in Transcription
  misc_feature: MA Experiment 20000185 PARAMETER Experiment Name: At_Roots__P Parameter: Age (day) Value: 7 vs. 21
  misc_feature: MA Experiment 20000185 PARAMETER Experiment Name: At_Roots__P Parameter: Organism Value: A. thaliana
  misc_feature: MA Experiment 20000185 PARAMETER Experiment Name: At_Roots__P Parameter: Tissue Value: Roots vs. Whole Plant
  misc_feature: MA Experiment ID: 20000439 Result: Up-regulated in Transcription
  misc_feature: MA Experiment 20000439 PARAMETER Experiment Name: At_Roots__P Parameter: Age (day) Value: 14 vs. 21
  misc_feature: MA Experiment 20000439 PARAMETER Experiment Name: At_Roots__P Parameter: Organism Value: A. thaliana
  misc_feature: MA Experiment 20000439 PARAMETER Experiment Name: At_Roots__P Parameter: Tissue Value: Roots vs. Whole Plant
  misc_feature: MA Experiment ID: 20001248 Result: Down-regulated in Transcription
  misc_feature: MA Experiment 20001248 PARAMETER Experiment Name: At_Far-red-induction_P Parameter: Age (day) Value: 7
  misc_feature: MA Experiment 20001248 PARAMETER Experiment Name: At_Far-red-induction_P Parameter: Light Value: Far-red vs. White
  misc_feature: MA Experiment 20001248 PARAMETER Experiment Name: At_Far-red-induction_P Parameter: Organism Value: A. thaliana
  misc_feature: MA Experiment 20001248 PARAMETER Experiment Name: At_Far-red-induction_P Parameter: Plant Line Value: Columbia
  misc_feature: MA Experiment 20001248 PARAMETER Experiment Name: At_Far-red-induction_P Parameter: Timepoint (hr) Value: 4
  misc_feature: MA Experiment 20001248 PARAMETER Experiment Name: At_Far-red-induction_P Parameter: Tissue Value: Whole Plant
  misc_feature: MA Experiment ID: 20001450 Result: Down-regulated in Transcription
  misc_feature: MA Experiment 20001450 PARAMETER Experiment Name: At_Far-red-induction_P Parameter: Age (day) Value: 7
  misc_feature: MA Experiment 20001450 PARAMETER Experiment Name: At_Far-red-induction_P Parameter: Light Value: Far-red vs. White
  misc_feature: MA Experiment 20001450 PARAMETER Experiment Name: At_Far-red-induction_P Parameter: Organism Value: A. thaliana
  misc_feature: MA Experiment 20001450 PARAMETER Experiment Name: At_Far-red-induction_P Parameter: Plant Line Value: Columbia
  misc_feature: MA Experiment 20001450 PARAMETER Experiment Name: At_Far-red-induction_P Parameter: Timepoint (hr) Value: 8
  misc_feature: MA Experiment 20001450 PARAMETER Experiment Name: At_Far-red-induction_P Parameter: Tissue Value: Whole Plant
  misc_feature: MA Experiment ID: 20001555 Result: Up-regulated in Transcription
  misc_feature: MA Experiment 20001555 PARAMETER Experiment Name: At_Drought_Soil_Dry_P Parameter: Age (day) Value: 24
  misc_feature: MA Experiment 20001555 PARAMETER Experiment Name: At_Drought_Soil_Dry_P Parameter: Organism Value: A. thaliana
  misc_feature: MA Experiment 20001555 PARAMETER Experiment Name: At_Drought_Soil_Dry_P Parameter: Plant Line Value: WS
  misc_feature: MA Experiment 20001555 PARAMETER Experiment Name: At_Drought_Soil_Dry_P Parameter: Post Timepoint (hr) Value: None
  misc_feature: MA Experiment 20001555 PARAMETER Experiment Name: At_Drought_Soil_Dry_P Parameter: Post-Treatment Value: None
  misc_feature: MA Experiment 20001555 PARAMETER Experiment Name: At_Drought_Soil_Dry_P Parameter: Timepoint (day) Value: 10
  misc_feature: MA Experiment 20001555 PARAMETER Experiment Name: At_Drought_Soil_Dry_P Parameter: Treatment Value: Drought vs. No Drought
aaacgaactagagacagtttgattcgaaaatcttgtcggaaaatggaggatatcgtcgaccaagaattaagcaattactgggaacctagctccttcctccaaaacgaagacttcgaatacgacagctggcctttggaagaagccatttctgggtcgtatgattcgagttcgccggatggagctgcttcgtcgccggcttctaagaatattgtgtcggagagaaacagaagacagaaacttaaccagagactcttcgctcttcgatcagttgttcccaatatcactaagatggataaagcctcaataatcaaagatgctattagttacatagaaggattacaatatgaagaaaagaagctcgaagctgagatcagagaacttgaatctacaccaaagagtagccttagtttcagcaaagattttgatcgtgatttacttgttcctgtcacatccaagaagatgaagcagcttgattctggttcttccacttctctcatcgaagttctcgaattgaaggtaacattcatgggagagaggacaatggtggtgagtgtaacatgtaataagaggacagatacaatggtgaaactgtgtgaagtctttgagtcattgaatctcaaaatcctcacttccaatctcacctctttctctggcatgatcttccacactgtctttattgaggcggatgaagaagaacaagaggtgttgcggttaaaaatagaaacaggaataggagcttataatgaaactcaaagccctactttgagcatcgactctctttactaataatactttttttcttccttttttggttcattttggcttctctctttacaataatgtatgtctctcttttcatttttatgatctcctacgtttgtttgtcc

SEQ ID NO: 101880 - protein, 261 aa, Arabidopsis thaliana
  peptide (1)..(261): Ceres Seq. ID no. 13608898
  misc_feature (67)..(114): Pfam Name: Helix-loop-helix DNA-binding domain Pfam Description: Helix-loop-helix DNA-binding domain
  misc_feature (15)..(261): Homolog of NCBI NO: 18423944 NR Description: bHLH protein family [Arabidopsis thaliana]
  misc_feature (15)..(261): Homolog of NCBI NO: 21554896 NR Description: unknown [Arabidopsis thaliana]
  misc_feature (15)..(227): Homolog of NCBI NO: 8843817 NR Description: contains similarity to unknown
  misc_feature (15)..(227): Homolog of NCBI NO: 16604348 NR Description: AT5g57150/MUL3_10 [Arabidopsis thaliana]
  misc_feature (15)..(249): Homolog of NCBI NO: 30688496 NR Description: bHLH protein family [Arabidopsis thaliana] putative bHLH transcription factor bHLH027 [Arabidopsis thaliana]
  misc_feature (15)..(171): Homolog of NCBI NO: 7486225 NR Description: hypothetical protein F27B13.170 - Arabidopsis >gi|4914417|emb|CAB43668.1| putative protein [Arabidopsis >gi|7269892|emb|CAB79751.1| putative protein [Arabidopsis
  misc_feature (151)..(227): Homolog of NCBI NO: 7486225 NR Description: hypothetical protein F27B13.170 - Arabidopsis >gi|4914417|emb|CAB43668.1| putative protein [Arabidopsis >gi|7269892|emb|CAB79751.1| putative protein [Arabidopsis
  misc_feature (131)..(257): Homolog of NCBI NO: 29466635 NR Description: Transcription Factor [Oryza sativa]
  misc_feature (60)..(134): Homolog of NCBI NO: 29466635 NR Description: Transcription Factor [Oryza sativa]
  misc_feature (33)..(240): Homolog of NCBI NO: 23600383 NR Description: bHLH transcriptional regulator [Lycopersicon
KRTRDSLIRKSCRKMEDIVDQELSNYWEPSSFLQNEDFEYDSWPLEEAISGSYDSSSPDGAASSPASKNIVSERNRRQKLNQRLFALRSVVPNITKMDKASIIKDAISYIEGLQYEEKKLEAEIRELESTPKSSLSFSKDFDRDLLVPVTSKKMKQLDSGSSTSLIEVLELKVTFMGERTMVVSVTCNKRTDTMVKLCEVFESLNLKILTSNLTSFSGMIFHTVFIEADEEEQEVLRLKIETGIGAYNETQSPTLSIDSLY

SEQ ID NO: 101881 - protein, 247 aa, Arabidopsis thaliana
  peptide (1)..(247): Ceres Seq. ID no. 13608899
  misc_feature (53)..(100): Pfam Name: Helix-loop-helix DNA-binding domain Pfam Description: Helix-loop-helix DNA-binding domain
  misc_feature (1)..(247): Homolog of NCBI NO: 18423944 NR Description: bHLH protein family [Arabidopsis thaliana]
  misc_feature (1)..(247): Homolog of NCBI NO: 21554896 NR Description: unknown [Arabidopsis thaliana]
  misc_feature (1)..(213): Homolog of NCBI NO: 8843817 NR Description: contains similarity to unknown
  misc_feature (1)..(213): Homolog of NCBI NO: 16604348 NR Description: AT5g57150/MUL3_10 [Arabidopsis thaliana]
  misc_feature (1)..(235): Homolog of NCBI NO: 30688496 NR Description: bHLH protein family [Arabidopsis thaliana] putative bHLH transcription factor bHLH027 [Arabidopsis thaliana]
  misc_feature (1)..(157): Homolog of NCBI NO: 7486225 NR Description: hypothetical protein F27B13.170 - Arabidopsis >gi|4914417|emb|CAB43668.1| putative protein [Arabidopsis >gi|7269892|emb|CAB79751.1| putative protein [Arabidopsis
  misc_feature (137)..(213): Homolog of NCBI NO: 7486225 NR Description: hypothetical protein F27B13.170 - Arabidopsis >gi|4914417|emb|CAB43668.1| putative protein [Arabidopsis >gi|7269892|emb|CAB79751.1| putative protein [Arabidopsis
  misc_feature (117)..(243): Homolog of NCBI NO: 29466635 NR Description: Transcription Factor [Oryza sativa]
  misc_feature (46)..(120): Homolog of NCBI NO: 29466635 NR Description: Transcription Factor [Oryza sativa]
  misc_feature (19)..(226): Homolog of NCBI NO: 23600383 NR Description: bHLH transcriptional regulator [Lycopersicon
MEDIVDQELSNYWEPSSFLQNEDFEYDSWPLEEAISGSYDSSSPDGAASSPASKNIVSERNRRQKLNQRLFALRSVVPNITKMDKASIIKDAISYIEGLQYEEKKLEAEIRELESTPKSSLSFSKDFDRDLLVPVTSKKMKQLDSGSSTSLIEVLELKVTFMGERTMVVSVTCNKRTDTMVKLCEVFESLNLKILTSNLTSFSGMIFHTVFIEADEEEQEVLRLKIETGIGAYNETQSPTLSIDSLY

SEQ ID NO: 101882 - protein, 165 aa, Arabidopsis thaliana; identical to SEQ ID NO: 37145
  peptide (1)..(165): Ceres Seq. ID no. 13608900
  misc_feature (1)..(165): Homolog of NCBI NO: 18423944 NR Description: bHLH protein family [Arabidopsis thaliana]
  misc_feature (1)..(165): Homolog of NCBI NO: 21554896 NR Description: unknown [Arabidopsis thaliana]
  misc_feature (1)..(131): Homolog of NCBI NO: 8843817 NR Description: contains similarity to unknown
  misc_feature (1)..(131): Homolog of NCBI NO: 16604348 NR Description: AT5g57150/MUL3_10 [Arabidopsis thaliana]
  misc_feature (1)..(153): Homolog of NCBI NO: 30688496 NR Description: bHLH protein family [Arabidopsis thaliana] putative bHLH transcription factor bHLH027 [Arabidopsis thaliana]
  misc_feature (1)..(75): Homolog of NCBI NO: 7486225 NR Description: hypothetical protein F27B13.170 - Arabidopsis >gi|4914417|emb|CAB43668.1| putative protein [Arabidopsis >gi|7269892|emb|CAB79751.1| putative protein [Arabidopsis
  misc_feature (55)..(131): Homolog of NCBI NO: 7486225 NR Description: hypothetical protein F27B13.170 - Arabidopsis >gi|4914417|emb|CAB43668.1| putative protein [Arabidopsis >gi|7269892|emb|CAB79751.1| putative protein [Arabidopsis
  misc_feature (35)..(161): Homolog of NCBI NO: 29466635 NR Description: Transcription Factor [Oryza sativa]
  misc_feature (1)..(38): Homolog of NCBI NO: 29466635 NR Description: Transcription Factor [Oryza sativa]
  misc_feature (1)..(144): Homolog of NCBI NO: 23600383 NR Description: bHLH transcriptional regulator [Lycopersicon

SEQ ID NO: 101883 - DNA, 857 bp, Arabidopsis thaliana
  misc_feature (1)..(857): Ceres Seq. ID no. 13608909
  misc_feature: MA Experiment ID: 108434 Result: Down-regulated in Transcription
  misc_feature: MA Experiment 108434 PARAMETER Experiment Name: At_Root_Tips_cDNA_P Parameter: Tissue Value: Root Tips
  misc_feature: MA Experiment ID: 108488 Result: Down-regulated in Transcription
  misc_feature: MA Experiment ID: 108561 Result: Up-regulated in Transcription
  misc_feature: MA Experiment 108561 PARAMETER Experiment Name: At_100uM_ABA_cDNA_P Parameter: Timepoint (hr) Value: 6
  misc_feature: MA Experiment 108561 PARAMETER Experiment Name: At_100uM_ABA_cDNA_P Parameter: Tissue Value: Aerial
  misc_feature: MA Experiment 108561 PARAMETER Experiment Name: At_100uM_ABA_cDNA_P Parameter: Treatment Value: 100uM ABA vs. No Treatment
  misc_feature: MA Experiment ID: 108572 Result: Up-regulated in Transcription
  misc_feature: MA Experiment 108572 PARAMETER Experiment Name: At_Drought_cDNA_P Parameter: Timepoint (hr) Value: 1
  misc_feature: MA Experiment 108572 PARAMETER Experiment Name: At_Drought_cDNA_P Parameter: Tissue Value: Aerial
  misc_feature: MA Experiment 108572 PARAMETER Experiment Name: At_Drought_cDNA_P Parameter: Treatment Value: Drought vs. No Drought
  misc_feature: MA Experiment ID: 108573 Result: Up-regulated in Transcription
  misc_feature: MA Experiment 108573 PARAMETER Experiment Name: At_Drought_cDNA_P Parameter: Timepoint (hr) Value: 6
  misc_feature: MA Experiment 108573 PARAMETER Experiment Name: At_Drought_cDNA_P Parameter: Tissue Value: Aerial
  misc_feature: MA Experiment 108573 PARAMETER Experiment Name: At_Drought_cDNA_P Parameter: Treatment Value: Drought vs. No Drought
  misc_feature: MA Experiment ID: 108585 Result: Up-regulated in Transcription
  misc_feature: MA Experiment 108585 PARAMETER Experiment Name: At_5mM_NaNP_cDNA_P Parameter: Timepoint (hr) Value: 6
  misc_feature: MA Experiment 108585 PARAMETER Experiment Name: At_5mM_NaNP_cDNA_P Parameter: Tissue Value: Aerial
  misc_feature: MA Experiment 108585 PARAMETER Experiment Name: At_5mM_NaNP_cDNA_P Parameter: Treatment Value: null
  misc_feature: MA Experiment ID: 108605 Result: Up-regulated in Transcription
  misc_feature: MA Experiment 108605 PARAMETER Experiment Name: At_100uM_ABA_cDNA_P Parameter: Timepoint (hr) Value: 6
  misc_feature: MA Experiment 108605 PARAMETER Experiment Name: At_100uM_ABA_cDNA_P Parameter: Tissue Value: Aerial
  misc_feature: MA Experiment 108605 PARAMETER Experiment Name: At_100uM_ABA_cDNA_P Parameter: Treatment Value: 100uM ABA vs. No Treatment
  misc_feature: MA Experiment ID: 108607 Result: Up-regulated in Transcription
  misc_feature: MA Experiment 108607 PARAMETER Experiment Name: At_100uM_ABA_cDNA_P Parameter: Timepoint (hr) Value: 4
  misc_feature: MA Experiment 108607 PARAMETER Experiment Name: At_100uM_ABA_cDNA_P Parameter: Tissue Value: Aerial
  misc_feature: MA Experiment 108607 PARAMETER Experiment Name: At_100uM_ABA_cDNA_P Parameter: Treatment Value: 100uM ABA vs. No Treatment
  misc_feature: MA Experiment ID: 108608 Result: Up-regulated in Transcription
  misc_feature: MA Experiment 108608 PARAMETER Experiment Name: At_100uM_ABA_cDNA_P Parameter: Timepoint (hr) Value: 1
  misc_feature: MA Experiment 108608 PARAMETER Experiment Name: At_100uM_ABA_cDNA_P Parameter: Tissue Value: Aerial
  misc_feature: MA Experiment 108608 PARAMETER Experiment Name: At_100uM_ABA_cDNA_P Parameter: Treatment Value: 100uM ABA vs. No Treatment
  misc_feature: MA Experiment ID: 108609 Result: Up-regulated in Transcription
  misc_feature: MA Experiment 108609 PARAMETER Experiment Name: At_100uM_ABA_cDNA_P Parameter: Timepoint (hr) Value: 24
  misc_feature: MA Experiment 108609 PARAMETER Experiment Name: At_100uM_ABA_cDNA_P Parameter: Tissue Value: Aerial
  misc_feature: MA Experiment 108609 PARAMETER Experiment Name: At_100uM_ABA_cDNA_P Parameter: Treatment Value: 100uM ABA vs. No Treatment
  misc_feature: MA Experiment ID: 108668 Result: Up-regulated in Transcription
  misc_feature: MA Experiment 108668 PARAMETER Experiment Name: At_2mM_SA_cDNA_P Parameter: Plant Line Value: WS
  misc_feature: MA Experiment 108668 PARAMETER Experiment Name: At_2mM_SA_cDNA_P Parameter: Timepoint (hr) Value: 6
  misc_feature: MA Experiment 108668 PARAMETER Experiment Name: At_2mM_SA_cDNA_P Parameter: Treatment Value: 2mM SA vs. No Treatment
  misc_feature: MA Experiment ID: 20000069 Result: Up-regulated in Transcription
  misc_feature: MA Experiment 20000069 PARAMETER Experiment Name: At_100uM_ABA_Mutants_cDNA_P Parameter: Plant Line Value: CS23
  misc_feature: MA Experiment 20000069 PARAMETER Experiment Name: At_100uM_ABA_Mutants_cDNA_P Parameter: Timepoint (hr) Value: 6
  misc_feature: MA Experiment 20000069 PARAMETER Experiment Name: At_100uM_ABA_Mutants_cDNA_P Parameter: Tissue Value: Aerial
  misc_feature: MA Experiment 20000069 PARAMETER Experiment Name: At_100uM_ABA_Mutants_cDNA_P Parameter: Treatment Value: 100uM ABA vs. No Treatment
  misc_feature: MA Experiment ID: 20000070 Result: Up-regulated in Transcription
  misc_feature: MA Experiment 20000070 PARAMETER Experiment Name: At_100uM_ABA_Mutants_cDNA_P Parameter: Plant Line Value: CS24
  misc_feature: MA Experiment 20000070 PARAMETER Experiment Name: At_100uM_ABA_Mutants_cDNA_P Parameter: Timepoint (hr) Value: 6
  misc_feature: MA Experiment 20000070 PARAMETER Experiment Name: At_100uM_ABA_Mutants_cDNA_P Parameter: Tissue Value: Aerial
  misc_feature: MA Experiment 20000070 PARAMETER Experiment Name: At_100uM_ABA_Mutants_cDNA_P Parameter: Treatment Value: 100uM ABA vs. No Treatment
  misc_feature: MA Experiment ID: 20000071 Result: Up-regulated in Transcription
  misc_feature: MA Experiment 20000071 PARAMETER Experiment Name: At_100uM_ABA_Mutants_cDNA_P Parameter: Plant Line Value: CS8104
  misc_feature: MA Experiment 20000071 PARAMETER Experiment Name: At_100uM_ABA_Mutants_cDNA_P Parameter: Timepoint (hr) Value: 6
  misc_feature: MA Experiment 20000071 PARAMETER Experiment Name: At_100uM_ABA_Mutants_cDNA_P Parameter: Tissue Value: Aerial
  misc_feature: MA Experiment 20000071 PARAMETER Experiment Name: At_100uM_ABA_Mutants_cDNA_P Parameter: Treatment Value: 100uM ABA vs. No Treatment
  misc_feature: MA Experiment ID: 20000072 Result: Up-regulated in Transcription
  misc_feature: MA Experiment 20000072 PARAMETER Experiment Name: At_100uM_ABA_Mutants_cDNA_P Parameter: Plant Line Value: CS8105
  misc_feature: MA Experiment 20000072 PARAMETER Experiment Name: At_100uM_ABA_Mutants_cDNA_P Parameter: Timepoint (hr) Value: 6
  misc_feature: MA Experiment 20000072 PARAMETER Experiment Name: At_100uM_ABA_Mutants_cDNA_P Parameter: Tissue Value: Aerial
  misc_feature: MA Experiment 20000072 PARAMETER Experiment Name: At_100uM_ABA_Mutants_cDNA_P Parameter: Treatment Value: 100uM ABA vs. No Treatment
  misc_feature: MA Experiment ID: 20000086 Result: Up-regulated in Transcription
  misc_feature: MA Experiment 20000086 PARAMETER Experiment Name: At_100uM_ABA_Mutants_cDNA_P Parameter: Plant Line Value: CS22
  misc_feature: MA Experiment 20000086 PARAMETER Experiment Name: At_100uM_ABA_Mutants_cDNA_P Parameter: Timepoint (hr) Value: 6
  misc_feature: MA Experiment 20000086 PARAMETER Experiment Name: At_100uM_ABA_Mutants_cDNA_P Parameter: Tissue Value: Aerial
  misc_feature: MA Experiment 20000086 PARAMETER Experiment Name: At_100uM_ABA_Mutants_cDNA_P Parameter: Treatment Value: 100uM ABA vs. No Treatment
  misc_feature: MA Experiment ID: 20000088 Result: Up-regulated in Transcription
  misc_feature: MA Experiment 20000088 PARAMETER Experiment Name: At_100uM_ABA_Mutants_cDNA_P Parameter: Plant Line Value: Landsberg
  misc_feature: MA Experiment 20000088 PARAMETER Experiment Name: At_100uM_ABA_Mutants_cDNA_P Parameter: Timepoint (hr) Value: 6
  misc_feature: MA Experiment 20000088 PARAMETER Experiment Name: At_100uM_ABA_Mutants_cDNA_P Parameter: Tissue Value: Aerial
  misc_feature: MA Experiment 20000088 PARAMETER Experiment Name: At_100uM_ABA_Mutants_cDNA_P Parameter: Treatment Value: 100uM ABA vs. No Treatment
  misc_feature: MA Experiment ID: 20000111 Result: Down-regulated in Transcription
  misc_feature: MA Experiment 20000111 PARAMETER Experiment Name: At_42deg_Heat_cDNA_P Parameter: Temperature (deg C) Value: 42 vs. 22
  misc_feature: MA Experiment 20000111 PARAMETER Experiment Name: At_42deg_Heat_cDNA_P Parameter: Timepoint (hr) Value: 6
  misc_feature: MA Experiment 20000111 PARAMETER Experiment Name: At_42deg_Heat_cDNA_P Parameter: Tissue Value: Aerial
  misc_feature: MA Experiment ID: 20000117 Result: Up-regulated in Transcription
  misc_feature: MA Experiment 20000117 PARAMETER Experiment Name: At_100uM_ABA_Mutants_cDNA_P Parameter: Plant Line Value: Columbia
  misc_feature: MA Experiment 20000117 PARAMETER Experiment Name: At_100uM_ABA_Mutants_cDNA_P Parameter: Timepoint (hr) Value: 6
  misc_feature: MA Experiment 20000117 PARAMETER Experiment Name: At_100uM_ABA_Mutants_cDNA_P Parameter: Tissue Value: Aerial
  misc_feature: MA Experiment 20000117 PARAMETER Experiment Name: At_100uM_ABA_Mutants_cDNA_P Parameter: Treatment Value: 100uM ABA vs. No Treatment
  misc_feature: MA Experiment ID: 20000166 Result: Up-regulated in Transcription
  misc_feature: MA Experiment 20000166 PARAMETER Experiment Name: At_100uM_ABA_P Parameter: Age (day) Value: 14
  misc_feature: MA Experiment 20000166 PARAMETER Experiment Name: At_100uM_ABA_P Parameter: Organism Value: A. thaliana
  misc_feature: MA Experiment 20000166 PARAMETER Experiment Name: At_100uM_ABA_P Parameter: Plant Line Value: WS
  misc_feature: MA Experiment 20000166 PARAMETER Experiment Name: At_100uM_ABA_P Parameter: Timepoint (hr) Value: 1
  misc_feature: MA Experiment 20000166 PARAMETER Experiment Name: At_100uM_ABA_P Parameter: Tissue Value: Aerial
  misc_feature: MA Experiment 20000166 PARAMETER Experiment Name: At_100uM_ABA_P Parameter: Treatment Value: 100uM ABA vs. No Treatment
  misc_feature: MA Experiment ID: 20000169 Result: Up-regulated in Transcription
  misc_feature: MA Experiment 20000169 PARAMETER Experiment Name: At_100uM_ABA_P Parameter: Age (day) Value: 14
  misc_feature: MA Experiment 20000169 PARAMETER Experiment Name: At_100uM_ABA_P Parameter: Organism Value: A. thaliana
  misc_feature: MA Experiment 20000169 PARAMETER Experiment Name: At_100uM_ABA_P Parameter: Plant Line Value: WS
  misc_feature: MA Experiment 20000169 PARAMETER Experiment Name: At_100uM_ABA_P Parameter: Timepoint (hr) Value: 6
  misc_feature: MA Experiment 20000169 PARAMETER Experiment Name: At_100uM_ABA_P Parameter: Tissue Value: Aerial
  misc_feature: MA Experiment 20000169 PARAMETER Experiment Name: At_100uM_ABA_P Parameter: Treatment Value: 100uM ABA vs. No Treatment
  misc_feature: MA Experiment ID: 20000179 Result: Up-regulated in Transcription
  misc_feature: MA Experiment 20000179 PARAMETER Experiment Name: At_Germinating_Seeds_P Parameter: Age (hr) Value: 6 vs. 0
  misc_feature: MA Experiment 20000179 PARAMETER Experiment Name: At_Germinating_Seeds_P Parameter: Tissue Value: Germinating Seeds
  misc_feature: MA Experiment ID: 20000182 Result: Up-regulated in Transcription
  misc_feature: MA Experiment 20000182 PARAMETER Experiment Name: At_2mM_SA_P Parameter: Age (day) Value: 14
  misc_feature: MA Experiment 20000182 PARAMETER Experiment Name: At_2mM_SA_P Parameter: Organism Value: A. thaliana
  misc_feature: MA Experiment 20000182 PARAMETER Experiment Name: At_2mM_SA_P Parameter: Plant Line Value: WS
  misc_feature: MA Experiment 20000182 PARAMETER Experiment Name: At_2mM_SA_P Parameter: Timepoint (hr) Value: 6
  misc_feature: MA Experiment 20000182 PARAMETER Experiment Name: At_2mM_SA_P Parameter: Tissue Value: Aerial
  misc_feature: MA Experiment 20000182 PARAMETER Experiment Name: At_2mM_SA_P Parameter: Treatment Value: 2mM SA vs. No Treatment
  misc_feature: MA Experiment ID: 20000224 Result: Down-regulated in Transcription
  misc_feature: MA Experiment ID: 20000265 Result: Down-regulated in Transcription
  misc_feature: MA Experiment 20000265 PARAMETER Experiment Name: At_Open_Flower_P Parameter: Age (day) Value: 21
  misc_feature: MA Experiment 20000265 PARAMETER Experiment Name: At_Open_Flower_P Parameter: Plant Line Value: WS
  misc_feature: MA Experiment 20000265 PARAMETER Experiment Name: At_Open_Flower_P Parameter: Tissue Value: Closed Flower vs. Whole Plant
  misc_feature: MA Experiment ID: 20000267 Result: Up-regulated in Transcription
  misc_feature: MA Experiment 20000267 PARAMETER Experiment Name: At_Drought_P Parameter: Age (day) Value: 7
  misc_feature: MA Experiment 20000267 PARAMETER Experiment Name: At_Drought_P Parameter: Organism Value: A. thaliana
  misc_feature: MA Experiment 20000267 PARAMETER Experiment Name: At_Drought_P Parameter: Plant Line Value: WS
  misc_feature: MA Experiment 20000267 PARAMETER Experiment Name: At_Drought_P Parameter: Timepoint (hr) Value: 6
  misc_feature: MA Experiment 20000267 PARAMETER Experiment Name: At_Drought_P Parameter: Tissue Value: Whole Plant
  misc_feature: MA Experiment 20000267 PARAMETER Experiment Name: At_Drought_P Parameter: Treatment Value: Drought vs. No Drought
  misc_feature: MA Experiment ID: 20000436 Result: Up-regulated in Transcription
  misc_feature: MA Experiment 20000436 PARAMETER Experiment Name: At_Drought_P Parameter: Age (day) Value: 7
  misc_feature: MA Experiment 20000436 PARAMETER Experiment Name: At_Drought_P Parameter: Organism Value: A. thaliana
  misc_feature: MA Experiment 20000436 PARAMETER Experiment Name: At_Drought_P Parameter: Plant Line Value: WS
  misc_feature: MA Experiment 20000436 PARAMETER Experiment Name: At_Drought_P Parameter: Timepoint (hr) Value: 12
  misc_feature: MA Experiment 20000436 PARAMETER Experiment Name: At_Drought_P Parameter: Tissue Value: Whole Plant
  misc_feature: MA Experiment 20000436 PARAMETER Experiment Name: At_Drought_P Parameter: Treatment Value: Drought vs. No Drought
  misc_feature: MA Experiment ID: 20000437 Result: Up-regulated in Transcription
  misc_feature: MA Experiment 20000437 PARAMETER Experiment Name: At_Drought_P Parameter: Age (day) Value: 8
  misc_feature: MA Experiment 20000437 PARAMETER Experiment Name: At_Drought_P Parameter: Organism Value: A. thaliana
  misc_feature: MA Experiment 20000437 PARAMETER Experiment Name: At_Drought_P Parameter: Plant Line Value: WS
  misc_feature: MA Experiment 20000437 PARAMETER Experiment Name: At_Drought_P Parameter: Timepoint (hr) Value: 24
  misc_feature: MA Experiment 20000437 PARAMETER Experiment Name: At_Drought_P Parameter: Tissue Value: Whole Plant
  misc_feature: MA Experiment 20000437 PARAMETER Experiment Name: At_Drought_P Parameter: Treatment Value: Drought vs. No Drought
  misc_feature: MA Experiment ID: 20000453 Result: Up-regulated in Transcription
  misc_feature: MA Experiment 20000453 PARAMETER Experiment Name: At_100uM_ABA_P Parameter: Age (day) Value: 15
  misc_feature: MA Experiment 20000453 PARAMETER Experiment Name: At_100uM_ABA_P Parameter: Organism Value: A. thaliana
  misc_feature: MA Experiment 20000453 PARAMETER Experiment Name: At_100uM_ABA_P Parameter: Plant Line Value: WS
  misc_feature: MA Experiment 20000453 PARAMETER Experiment Name: At_100uM_ABA_P Parameter: Timepoint (hr) Value: 24
  misc_feature: MA Experiment 20000453 PARAMETER Experiment Name: At_100uM_ABA_P Parameter: Tissue Value: Aerial
  misc_feature: MA Experiment 20000453 PARAMETER Experiment Name: At_100uM_ABA_P Parameter: Treatment Value: 100uM ABA vs. No Treatment
  misc_feature: MA Experiment ID: 20001554 Result: Up-regulated in Transcription
  misc_feature: MA Experiment 20001554 PARAMETER Experiment Name: At_Drought_Soil_Dry_P Parameter: Age (day) Value: 21
  misc_feature: MA Experiment 20001554 PARAMETER Experiment Name: At_Drought_Soil_Dry_P Parameter: Organism Value: A. thaliana
  misc_feature: MA Experiment 20001554 PARAMETER Experiment Name: At_Drought_Soil_Dry_P Parameter: Plant Line Value: WS
  misc_feature: MA Experiment 20001554 PARAMETER Experiment Name: At_Drought_Soil_Dry_P Parameter: Post Timepoint (hr) Value: None
  misc_feature: MA Experiment 20001554 PARAMETER Experiment Name: At_Drought_Soil_Dry_P Parameter: Post-Treatment Value: None
  misc_feature: MA Experiment 20001554 PARAMETER Experiment Name: At_Drought_Soil_Dry_P Parameter: Timepoint (day) Value: 7
  misc_feature: MA Experiment 20001554 PARAMETER Experiment Name: At_Drought_Soil_Dry_P Parameter: Treatment Value: Drought vs. No Drought
  misc_feature: MA Experiment ID: 20001555 Result: Up-regulated in Transcription
  misc_feature: MA Experiment 20001555 PARAMETER Experiment Name: At_Drought_Soil_Dry_P Parameter: Age (day) Value: 24
  misc_feature: MA Experiment 20001555 PARAMETER Experiment Name: At_Drought_Soil_Dry_P Parameter: Organism Value: A. thaliana
  misc_feature: MA Experiment 20001555 PARAMETER Experiment Name: At_Drought_Soil_Dry_P Parameter: Plant Line Value: WS
  misc_feature: MA Experiment 20001555 PARAMETER Experiment Name: At_Drought_Soil_Dry_P Parameter: Post Timepoint (hr) Value: None
  misc_feature: MA Experiment 20001555 PARAMETER Experiment Name: At_Drought_Soil_Dry_P Parameter: Post-Treatment Value: None
  misc_feature: MA Experiment 20001555 PARAMETER Experiment Name: At_Drought_Soil_Dry_P Parameter: Timepoint (day) Value: 10
  misc_feature: MA Experiment 20001555 PARAMETER Experiment Name: At_Drought_Soil_Dry_P Parameter: Treatment Value: Drought vs. No Drought
  misc_feature: MA Experiment ID: 20001904 Result: Up-regulated in Transcription
  misc_feature: MA Experiment 20001904 PARAMETER Experiment Name: At_Drought_Reproduction_P Parameter: Age (day) Value: 37
  misc_feature: MA Experiment 20001904 PARAMETER Experiment Name: At_Drought_Reproduction_P Parameter: Organism Value: A. thaliana
  misc_feature: MA Experiment 20001904 PARAMETER Experiment Name: At_Drought_Reproduction_P Parameter: Plant Line Value: WS
  misc_feature: MA Experiment 20001904 PARAMETER Experiment Name: At_Drought_Reproduction_P Parameter: Timepoint (day) Value: 7
  misc_feature: MA Experiment 20001904 PARAMETER Experiment Name: At_Drought_Reproduction_P Parameter: Tissue Value: Rosettes
  misc_feature: MA Experiment 20001904 PARAMETER Experiment Name: At_Drought_Reproduction_P Parameter: Treatment Value: Drought vs. No Drought
  misc_feature: MA Experiment ID: 20001905 Result: Up-regulated in Transcription
  misc_feature: MA Experiment 20001905 PARAMETER Experiment Name: At_Drought_Reproduction_P Parameter: Age (day) Value: 40
  misc_feature: MA Experiment 20001905 PARAMETER Experiment Name: At_Drought_Reproduction_P Parameter: Organism Value: A. thaliana
  misc_feature: MA Experiment 20001905 PARAMETER Experiment Name: At_Drought_Reproduction_P Parameter: Plant Line Value: WS
  misc_feature: MA Experiment 20001905 PARAMETER Experiment Name: At_Drought_Reproduction_P Parameter: Timepoint (day) Value: 10
  misc_feature: MA Experiment 20001905 PARAMETER Experiment Name: At_Drought_Reproduction_P Parameter: Tissue Value: Rosettes
  misc_feature: MA Experiment 20001905 PARAMETER Experiment Name: At_Drought_Reproduction_P Parameter: Treatment Value: Drought vs. No Drought
  misc_feature: MA Experiment ID: 20001911 Result: Up-regulated in Transcription
  misc_feature: MA Experiment 20001911 PARAMETER Experiment Name: At_Drought_Reproduction_P Parameter: Age (day) Value: 40
  misc_feature: MA Experiment 20001911 PARAMETER Experiment Name: At_Drought_Reproduction_P Parameter: Organism Value: A. thaliana
  misc_feature: MA Experiment 20001911 PARAMETER Experiment Name: At_Drought_Reproduction_P Parameter: Plant Line Value: WS
  misc_feature: MA Experiment 20001911 PARAMETER Experiment Name: At_Drought_Reproduction_P Parameter: Timepoint (day) Value: 10
  misc_feature: MA Experiment 20001911 PARAMETER Experiment Name: At_Drought_Reproduction_P Parameter: Tissue Value: Flowers
  misc_feature: MA Experiment 20001911 PARAMETER Experiment Name: At_Drought_Reproduction_P Parameter: Treatment Value: Drought vs. No Drought
acgtgtttctgtttttctctaatttttctcttgttgttctcgattaacgaaaaagacttgtcgttctcaattcttatcgatttaagaacaaatcatctaacgaagattacttccgaagatcagaaacaaacacaaactgtgaatcgttgtttgttaattctctttaaaatcgccagaagaaagagatctccgttttctacagaagaaaagcaagagagtaagaatgggatcggaacaaaacgatagcacaagcttcacgcaatcgcaagcttcagagccaaagctatgtgttaaaggatgtggtttctttggatcaccatcaaacatggatctctgttctaaatgttacagaggcatttgtgctgaggaagctcaaacagcagttgctaaagctgctgttgaaaaatctttcaagccttctcctcctcgtagtctcttcatagcagaacctcctgctgttgttgtggaacccaaacccgaaaaggcggcagttgttgttgtctcggccgagccatcttcctcggcggttcctgaggcgaacgagccatcgagacctgcacgaaccaaccggtgtttgtgttgtaacaagaaggttgggatcatggggtttaagtgcaaatgcgggagcactttctgcggcgaacatcggtacccggagactcatgattgcagctttgatttcaaagaagttggacgtggagagattgccaaagctaatcctgtggttaaggctgataaaattcaaaggttctgaaatatggaagttttttctaagtattttggtggtaattactcatttgtatttgaaccgatttgggggttgtcttggatggttttaatggattgtttccaaaggg

SEQ ID NO: 101884 - protein, 176 aa, Arabidopsis thaliana
  peptide (1)..(176): Ceres Seq. ID no. 13608910
  misc_feature (117)..(157): Pfam Name: AN1-like Zinc finger Pfam Description: AN1-like Zinc finger
  misc_feature (1)..(176): Homolog of NCBI NO: 15235819 NR Description: zinc finger -related protein [Arabidopsis
  misc_feature (1)..(175): Homolog of NCBI NO: 15234402 NR Description: expressed protein [Arabidopsis thaliana]
  misc_feature (1)..(175): Homolog of NCBI NO: 8778645 NR Description: F5O11.17 [Arabidopsis thaliana]
  misc_feature (1)..(175): Homolog of NCBI NO: 15221329 NR Description: expressed protein [Arabidopsis thaliana]
  misc_feature (20)..(175): Homolog of NCBI NO: 15231686 NR Description: zinc finger - like protein [Arabidopsis thaliana]
  misc_feature (13)..(175): Homolog of NCBI NO: 15225894 NR Description: zinc finger protein -related [Arabidopsis
  misc_feature (20)..(175): Homolog of NCBI NO: 18404102 NR Description: expressed protein [Arabidopsis thaliana]
  misc_feature (20)..(175): Homolog of NCBI NO: 14596167 NR Description: zinc finger-like protein [Arabidopsis thaliana]
  misc_feature (6)..(175): Homolog of NCBI NO: 18403408 NR Description: expressed protein [Arabidopsis thaliana]
  misc_feature (6)..(175): Homolog of NCBI NO: 25082726 NR Description: expressed protein [Arabidopsis thaliana]
MGSEQNDSTSFTQSQASEPKLCVKGCGFFGSPSNMDLCSKCYRGICAEEAQTAVAKAAVEKSFKPSPPRSLFIAEPPAVVVEPKPEKAAVVVVSAEPSSSAVPEANEPSRPARTNRCLCCNKKVGIMGFKCKCGSTFCGEHRYPETHDCSFDFKEVGRGEIAKANPVVKADKIQRF

SEQ ID NO: 101885 - protein, 142 aa, Arabidopsis thaliana
  peptide (1)..(142): Ceres Seq. ID no. 13608911
  misc_feature (83)..(123): Pfam Name: AN1-like Zinc finger Pfam Description: AN1-like Zinc finger
  misc_feature (1)..(142): Homolog of NCBI NO: 15235819 NR Description: zinc finger -related protein [Arabidopsis
  misc_feature (1)..(141): Homolog of NCBI NO: 15234402 NR Description: expressed protein [Arabidopsis thaliana]
  misc_feature (1)..(141): Homolog of NCBI NO: 8778645 NR Description: F5O11.17 [Arabidopsis thaliana]
  misc_feature (1)..(141): Homolog of NCBI NO: 15221329 NR Description: expressed protein [Arabidopsis thaliana]
  misc_feature (1)..(141): Homolog of NCBI NO: 15231686 NR Description: zinc finger - like protein [Arabidopsis thaliana]
  misc_feature (1)..(141): Homolog of NCBI NO: 15225894 NR Description: zinc finger protein -related [Arabidopsis
  misc_feature (1)..(141): Homolog of NCBI NO: 18404102 NR Description: expressed protein [Arabidopsis thaliana]
  misc_feature (1)..(141): Homolog of NCBI NO: 14596167 NR Description: zinc finger-like protein [Arabidopsis thaliana]
  misc_feature (1)..(141): Homolog of NCBI NO: 18403408 NR Description: expressed protein [Arabidopsis thaliana]
  misc_feature (1)..(141): Homolog of NCBI NO: 25082726 NR Description: expressed protein [Arabidopsis thaliana]
MDLCSKCYRGICAEEAQTAVAKAAVEKSFKPSPPRSLFIAEPPAVVVEPKPEKAAVVVVSAEPSSSAVPEANEPSRPARTNRCLCCNKKVGIMGFKCKCGSTFCGEHRYPETHDCSFDFKEVGRGEIAKANPVVKADKIQRF

SEQ ID NO: 101886 - DNA, 1302 bp, Arabidopsis thaliana
  misc_feature (1)..(1302): Ceres Seq. ID no. 13608912
  misc_feature: MA Experiment ID: 108434 Result: Down-regulated in Transcription
  misc_feature: MA Experiment 108434 PARAMETER Experiment Name: At_Root_Tips_cDNA_P Parameter: Tissue Value: Root Tips
  misc_feature: MA Experiment ID: 108464 Result: Up-regulated in Transcription
  misc_feature: MA Experiment 108464 PARAMETER Experiment Name: At_Germinating_Seeds_cDNA_P Parameter: Age (day) Value: 4 vs. 0
  misc_feature: MA Experiment 108464 PARAMETER Experiment Name: At_Germinating_Seeds_cDNA_P Parameter: Tissue Value: Germinating Seeds
  misc_feature: MA Experiment ID: 108474 Result: Down-regulated in Transcription
  misc_feature: MA Experiment 108474 PARAMETER Experiment Name: At_Drought_Flowers_cDNA_P Parameter: Timepoint (hr) Value: null
  misc_feature: MA Experiment 108474 PARAMETER Experiment Name: At_Drought_Flowers_cDNA_P Parameter: Treatment Value: Drought vs. No Drought
  misc_feature: MA Experiment ID: 108488 Result: Down-regulated in Transcription
  misc_feature: MA Experiment ID: 108489 Result: Up-regulated in Transcription
  misc_feature: MA Experiment ID: 108561 Result: Up-regulated in Transcription
  misc_feature: MA Experiment 108561 PARAMETER Experiment Name: At_100uM_ABA_cDNA_P Parameter: Timepoint (hr) Value: 6
  misc_feature: MA Experiment 108561 PARAMETER Experiment Name: At_100uM_ABA_cDNA_P Parameter: Tissue Value: Aerial
  misc_feature: MA Experiment 108561 PARAMETER Experiment Name: At_100uM_ABA_cDNA_P Parameter: Treatment Value: 100uM ABA vs. No Treatment
  misc_feature: MA Experiment ID: 108569 Result: Up-regulated in Transcription
  misc_feature: MA Experiment 108569 PARAMETER Experiment Name: At_0.001%_MeJA__cDNA_P Parameter: Timepoint (hr) Value: 6
  misc_feature: MA Experiment 108569 PARAMETER Experiment Name: At_0.001%_MeJA__cDNA_P Parameter: Tissue Value: Aerial
  misc_feature: MA Experiment 108569 PARAMETER Experiment Name: At_0.001%_MeJA__cDNA_P Parameter: Treatment Value: 0.001% MeJA vs. No Treatment
  misc_feature: MA Experiment ID: 108572 Result: Up-regulated in Transcription
  misc_feature: MA Experiment 108572 PARAMETER Experiment Name: At_Drought_cDNA_P Parameter: Timepoint (hr) Value: 1
  misc_feature: MA Experiment 108572 PARAMETER Experiment Name: At_Drought_cDNA_P Parameter: Tissue Value: Aerial
  misc_feature: MA Experiment 108572 PARAMETER Experiment Name: At_Drought_cDNA_P Parameter: Treatment Value: Drought vs. No Drought
  misc_feature: MA Experiment ID: 108573 Result: Up-regulated in Transcription
  misc_feature: MA Experiment 108573 PARAMETER Experiment Name: At_Drought_cDNA_P Parameter: Timepoint (hr) Value: 6
  misc_feature: MA Experiment 108573 PARAMETER Experiment Name: At_Drought_cDNA_P Parameter: Tissue Value: Aerial
  misc_feature: MA Experiment 108573 PARAMETER Experiment Name: At_Drought_cDNA_P Parameter: Treatment Value: Drought vs. No Drought
  misc_feature: MA Experiment ID: 108585 Result: Up-regulated in Transcription
  misc_feature: MA Experiment 108585 PARAMETER Experiment Name: At_5mM_NaNP_cDNA_P Parameter: Timepoint (hr) Value: 6
  misc_feature: MA Experiment 108585 PARAMETER Experiment Name: At_5mM_NaNP_cDNA_P Parameter: Tissue Value: Aerial
  misc_feature: MA Experiment 108585 PARAMETER Experiment Name: At_5mM_NaNP_cDNA_P Parameter: Treatment Value: null
  misc_feature: MA Experiment ID: 108605 Result: Up-regulated in Transcription
  misc_feature: MA Experiment 108605 PARAMETER Experiment Name: At_100uM_ABA_cDNA_P Parameter: Timepoint (hr) Value: 6
  misc_feature: MA Experiment 108605 PARAMETER Experiment Name: At_100uM_ABA_cDNA_P Parameter: Tissue Value: Aerial
  misc_feature: MA Experiment 108605 PARAMETER Experiment Name: At_100uM_ABA_cDNA_P Parameter: Treatment Value: 100uM ABA vs. No Treatment
  misc_feature: MA Experiment ID: 108607 Result: Up-regulated in Transcription
  misc_feature: MA Experiment 108607 PARAMETER Experiment Name: At_100uM_ABA_cDNA_P Parameter: Timepoint (hr) Value: 4
  misc_feature: MA Experiment 108607 PARAMETER Experiment Name: At_100uM_ABA_cDNA_P Parameter: Tissue Value: Aerial
  misc_feature: MA Experiment 108607 PARAMETER Experiment Name: At_100uM_ABA_cDNA_P Parameter: Treatment Value: 100uM ABA vs. No Treatment
  misc_feature: MA Experiment ID: 108608 Result: Up-regulated in Transcription
  misc_feature: MA Experiment 108608 PARAMETER Experiment Name: At_100uM_ABA_cDNA_P Parameter: Timepoint (hr) Value: 1
  misc_feature: MA Experiment 108608 PARAMETER Experiment Name: At_100uM_ABA_cDNA_P Parameter: Tissue Value: Aerial
  misc_feature: MA Experiment 108608 PARAMETER Experiment Name: At_100uM_ABA_cDNA_P Parameter: Treatment Value: 100uM ABA vs. No Treatment
  misc_feature: MA Experiment ID: 20000069 Result: Up-regulated in Transcription
  misc_feature: MA Experiment 20000069 PARAMETER Experiment Name: At_100uM_ABA_Mutants_cDNA_P Parameter: Plant Line Value: CS23
  misc_feature: MA Experiment 20000069 PARAMETER Experiment Name: At_100uM_ABA_Mutants_cDNA_P Parameter: Timepoint (hr) Value: 6
  misc_feature: MA Experiment 20000069 PARAMETER Experiment Name: At_100uM_ABA_Mutants_cDNA_P Parameter: Tissue Value: Aerial
  misc_feature: MA Experiment 20000069 PARAMETER Experiment Name: At_100uM_ABA_Mutants_cDNA_P Parameter: Treatment Value: 100uM ABA vs. No Treatment
  misc_feature: MA Experiment ID: 20000070 Result: Up-regulated in Transcription
  misc_feature: MA Experiment 20000070 PARAMETER Experiment Name: At_100uM_ABA_Mutants_cDNA_P Parameter: Plant Line Value: CS24
  misc_feature: MA Experiment 20000070 PARAMETER Experiment Name: At_100uM_ABA_Mutants_cDNA_P Parameter: Timepoint (hr) Value: 6
  misc_feature: MA Experiment 20000070 PARAMETER Experiment Name: At_100uM_ABA_Mutants_cDNA_P Parameter: Tissue Value: Aerial
  misc_feature: MA Experiment 20000070 PARAMETER Experiment Name: At_100uM_ABA_Mutants_cDNA_P Parameter: Treatment Value: 100uM ABA vs. No Treatment
  misc_feature: MA Experiment ID: 20000071 Result: Up-regulated in Transcription
  misc_feature: MA Experiment 20000071 PARAMETER Experiment Name: At_100uM_ABA_Mutants_cDNA_P Parameter: Plant Line Value: CS8104
  misc_feature: MA Experiment 20000071 PARAMETER Experiment Name: At_100uM_ABA_Mutants_cDNA_P Parameter: Timepoint (hr) Value: 6
  misc_feature: MA Experiment 20000071 PARAMETER Experiment Name: At_100uM_ABA_Mutants_cDNA_P Parameter: Tissue Value: Aerial
  misc_feature: MA Experiment 20000071 PARAMETER Experiment Name: At_100uM_ABA_Mutants_cDNA_P Parameter: Treatment Value: 100uM ABA vs. No Treatment
  misc_feature: MA Experiment ID: 20000072 Result: Up-regulated in Transcription
  misc_feature: MA Experiment 20000072 PARAMETER Experiment Name: At_100uM_ABA_Mutants_cDNA_P Parameter: Plant Line Value: CS8105
  misc_feature: MA Experiment 20000072 PARAMETER Experiment Name: At_100uM_ABA_Mutants_cDNA_P Parameter: Timepoint (hr) Value: 6
  misc_feature: MA Experiment 20000072 PARAMETER Experiment Name: At_100uM_ABA_Mutants_cDNA_P Parameter: Tissue Value: Aerial
  misc_feature: MA Experiment 20000072 PARAMETER Experiment Name: At_100uM_ABA_Mutants_cDNA_P Parameter: Treatment Value: 100uM ABA vs. No Treatment
  misc_feature: MA Experiment ID: 20000086 Result: Up-regulated in Transcription
  misc_feature: MA Experiment 20000086 PARAMETER Experiment Name: At_100uM_ABA_Mutants_cDNA_P Parameter: Plant Line Value: CS22
  misc_feature: MA Experiment 20000086 PARAMETER Experiment Name: At_100uM_ABA_Mutants_cDNA_P Parameter: Timepoint (hr) Value: 6
  misc_feature: MA Experiment 20000086 PARAMETER Experiment Name: At_100uM_ABA_Mutants_cDNA_P Parameter: Tissue Value: Aerial
  misc_feature: MA Experiment 20000086 PARAMETER Experiment Name: At_100uM_ABA_Mutants_cDNA_P Parameter: Treatment Value: 100uM ABA vs. No Treatment
  misc_feature: MA Experiment ID: 20000088 Result: Up-regulated in Transcription
  misc_feature: MA Experiment 20000088 PARAMETER Experiment Name: At_100uM_ABA_Mutants_cDNA_P Parameter: Plant Line Value: Landsberg
  misc_feature: MA Experiment 20000088 PARAMETER Experiment Name: At_100uM_ABA_Mutants_cDNA_P Parameter: Timepoint (hr) Value: 6
  misc_feature: MA Experiment 20000088 PARAMETER Experiment Name: At_100uM_ABA_Mutants_cDNA_P Parameter: Tissue Value: Aerial
  misc_feature: MA Experiment 20000088 PARAMETER Experiment Name: At_100uM_ABA_Mutants_cDNA_P Parameter: Treatment Value: 100uM ABA vs. No Treatment
  misc_feature: MA Experiment ID: 20000090 Result: Down-regulated in Transcription
  misc_feature: MA Experiment ID: 20000117 Result: Up-regulated in Transcription
  misc_feature: MA Experiment 20000117 PARAMETER Experiment Name: At_100uM_ABA_Mutants_cDNA_P Parameter: Plant Line Value: Columbia
  misc_feature: MA Experiment 20000117 PARAMETER Experiment Name: At_100uM_ABA_Mutants_cDNA_P Parameter: Timepoint (hr) Value: 6
  misc_feature: MA Experiment 20000117 PARAMETER Experiment Name: At_100uM_ABA_Mutants_cDNA_P Parameter: Tissue Value: Aerial
  misc_feature: MA Experiment 20000117 PARAMETER Experiment Name: At_100uM_ABA_Mutants_cDNA_P Parameter: Treatment Value: 100uM ABA vs. No Treatment
  misc_feature: MA Experiment ID: 20000166 Result: Up-regulated in Transcription
  misc_feature: MA Experiment 20000166 PARAMETER Experiment Name: At_100uM_ABA_P Parameter: Age (day) Value: 14
  misc_feature: MA Experiment 20000166 PARAMETER Experiment Name: At_100uM_ABA_P Parameter: Organism Value: A. thaliana
  misc_feature: MA Experiment 20000166 PARAMETER Experiment Name: At_100uM_ABA_P Parameter: Plant Line Value: WS
  misc_feature: MA Experiment 20000166 PARAMETER Experiment Name: At_100uM_ABA_P Parameter: Timepoint (hr) Value: 1
  misc_feature: MA Experiment 20000166 PARAMETER Experiment Name: At_100uM_ABA_P Parameter: Tissue Value: Aerial
  misc_feature: MA Experiment 20000166 PARAMETER Experiment Name: At_100uM_ABA_P Parameter: Treatment Value: 100uM ABA vs. No Treatment
  misc_feature: MA Experiment ID: 20000169 Result: Up-regulated in Transcription
  misc_feature: MA Experiment 20000169 PARAMETER Experiment Name: At_100uM_ABA_P Parameter: Age (day) Value: 14
  misc_feature: MA Experiment 20000169 PARAMETER Experiment Name: At_100uM_ABA_P Parameter: Organism Value: A. thaliana
  misc_feature: MA Experiment 20000169 PARAMETER Experiment Name: At_100uM_ABA_P Parameter: Plant Line Value: WS
  misc_feature: MA Experiment 20000169 PARAMETER Experiment Name: At_100uM_ABA_P Parameter: Timepoint (hr) Value: 6
  misc_feature: MA Experiment 20000169 PARAMETER Experiment Name: At_100uM_ABA_P Parameter: Tissue Value: Aerial
  misc_feature: MA Experiment 20000169 PARAMETER Experiment Name: At_100uM_ABA_P Parameter: Treatment Value: 100uM ABA vs. No Treatment
  misc_feature: MA Experiment ID: 20000182 Result: Up-regulated in Transcription
  misc_feature: MA Experiment 20000182 PARAMETER Experiment Name: At_2mM_SA_P Parameter: Age (day) Value: 14
  misc_feature: MA Experiment 20000182 PARAMETER Experiment Name: At_2mM_SA_P Parameter: Organism Value: A. thaliana
  misc_feature: MA Experiment 20000182 PARAMETER Experiment Name: At_2mM_SA_P Parameter: Plant Line Value: WS
  misc_feature: MA Experiment 20000182 PARAMETER Experiment Name: At_2mM_SA_P Parameter: Timepoint (hr) Value: 6
  misc_feature: MA Experiment 20000182 PARAMETER Experiment Name: At_2mM_SA_P Parameter: Tissue Value: Aerial
  misc_feature: MA Experiment 20000182 PARAMETER Experiment Name: At_2mM_SA_P Parameter: Treatment Value: 2mM SA vs. No Treatment
  misc_feature: MA Experiment ID: 20000184 Result: Down-regulated in Transcription
  misc_feature: MA Experiment 20000184 PARAMETER Experiment Name: At_Shoots__P Parameter: Age (day) Value: 7
  misc_feature: MA Experiment 20000184 PARAMETER Experiment Name: At_Shoots__P Parameter: Tissue Value: Shoots vs. Whole Plant
  misc_feature: MA Experiment ID: 20000185 Result: Down-regulated in Transcription
  misc_feature: MA Experiment 20000185 PARAMETER Experiment Name: At_Roots__P Parameter: Age (day) Value: 7 vs. 21
  misc_feature: MA Experiment 20000185 PARAMETER Experiment Name: At_Roots__P Parameter: Organism Value: A. thaliana
  misc_feature: MA Experiment 20000185 PARAMETER Experiment Name: At_Roots__P Parameter: Tissue Value: Roots vs. Whole Plant
  misc_feature: MA Experiment ID: 20000227 Result: Down-regulated in Transcription
  misc_feature: MA Experiment 20000227 PARAMETER Experiment Name: At_Root-Tips-vs-Tops_P Parameter: Tissue Value: Root Tips vs. Root Tops
  misc_feature: MA Experiment ID: 20000234 Result: Down-regulated in Transcription
  misc_feature: MA Experiment 20000234 PARAMETER Experiment Name: At_Siliques_P Parameter: Age (day) Value: 21
  misc_feature: MA Experiment 20000234 PARAMETER Experiment Name: At_Siliques_P Parameter: Organism Value: A. thaliana
  misc_feature: MA Experiment 20000234 PARAMETER Experiment Name: At_Siliques_P Parameter: Plant Line Value: WS
  misc_feature: MA Experiment 20000234 PARAMETER Experiment Name: At_Siliques_P Parameter: Tissue Value: Less Than 5mm Siliques vs. Whole Plant
  misc_feature: MA Experiment ID: 20000437 Result: Up-regulated in Transcription
  misc_feature: MA Experiment 20000437 PARAMETER Experiment Name: At_Drought_P Parameter: Age (day) Value: 8
  misc_feature: MA Experiment 20000437 PARAMETER Experiment Name: At_Drought_P Parameter: Organism Value: A. thaliana
  misc_feature: MA Experiment 20000437 PARAMETER Experiment Name: At_Drought_P Parameter: Plant Line Value: WS
  misc_feature: MA Experiment 20000437 PARAMETER Experiment Name: At_Drought_P Parameter: Timepoint (hr) Value: 24
  misc_feature: MA Experiment 20000437 PARAMETER Experiment Name: At_Drought_P Parameter: Tissue Value: Whole Plant
  misc_feature: MA Experiment 20000437 PARAMETER Experiment Name: At_Drought_P Parameter: Treatment Value: Drought vs. No Drought
  misc_feature: MA Experiment ID: 20000438 Result: Down-regulated in Transcription
  misc_feature: MA Experiment 20000438 PARAMETER Experiment Name: At_Shoots__P Parameter: Age (day) Value: 14
  misc_feature: MA Experiment 20000438 PARAMETER Experiment Name: At_Shoots__P Parameter: Tissue Value: Shoots vs. Whole Plant
  misc_feature: MA Experiment ID: 20000439 Result: Down-regulated in Transcription
  misc_feature: MA Experiment 20000439 PARAMETER Experiment Name: At_Roots__P Parameter: Age (day) Value: 14 vs. 21
  misc_feature: MA Experiment 20000439 PARAMETER Experiment Name: At_Roots__P Parameter: Organism Value: A. thaliana
  misc_feature: MA Experiment 20000439 PARAMETER Experiment Name: At_Roots__P Parameter: Tissue Value: Roots vs. Whole Plant
  misc_feature: MA Experiment ID: 20000527 Result: Down-regulated in Transcription
  misc_feature: MA Experiment 20000527 PARAMETER Experiment Name: At_10percent_PEG_P Parameter: Age (day) Value: 20
  misc_feature: MA Experiment 20000527 PARAMETER Experiment Name: At_10percent_PEG_P Parameter: Organism Value: A. thaliana
  misc_feature: MA Experiment 20000527 PARAMETER Experiment Name: At_10percent_PEG_P Parameter: Plant Line Value: WS
  misc_feature: MA Experiment 20000527 PARAMETER Experiment Name: At_10percent_PEG_P Parameter: Timepoint (day) Value: 20
  misc_feature: MA Experiment 20000527 PARAMETER Experiment Name: At_10percent_PEG_P Parameter: Tissue Value: Whole Plant
  misc_feature: MA Experiment 20000527 PARAMETER Experiment Name: At_10percent_PEG_P Parameter: Treatment Value: 10percent PEG vs. No Treatment
  misc_feature: MA Experiment ID: 20000794 Result: Up-regulated in Transcription
  misc_feature: MA Experiment 20000794 PARAMETER Experiment Name: At_Petals_P Parameter: Age (day) Value: 23-25 days
  misc_feature: MA Experiment 20000794 PARAMETER Experiment Name: At_Petals_P Parameter: Plant Line Value: WS
  misc_feature: MA Experiment 20000794 PARAMETER Experiment Name: At_Petals_P Parameter: Tissue Value: Petals vs. Whole plant
  misc_feature: MA Experiment ID: 20001451 Result: Up-regulated in Transcription
  misc_feature: MA Experiment 20001451 PARAMETER Experiment Name: At_Far-red-induction_P Parameter: Age (day) Value: 7
  misc_feature: MA Experiment 20001451 PARAMETER Experiment Name: At_Far-red-induction_P Parameter: Light Value: Far-red vs. White
  misc_feature: MA Experiment 20001451 PARAMETER Experiment Name: At_Far-red-induction_P Parameter: Organism Value: A. thaliana
  misc_feature: MA Experiment 20001451 PARAMETER Experiment Name: At_Far-red-induction_P Parameter: Plant Line Value: Columbia
  misc_feature: MA Experiment 20001451 PARAMETER Experiment Name: At_Far-red-induction_P Parameter: Timepoint (hr) Value: 24
  misc_feature: MA Experiment 20001451 PARAMETER Experiment Name: At_Far-red-induction_P Parameter: Tissue Value: Whole Plant
  misc_feature: MA Experiment ID: 20001554 Result: Up-regulated in Transcription
  misc_feature: MA Experiment 20001554 PARAMETER Experiment Name: At_Drought_Soil_Dry_P Parameter: Age (day) Value: 21
  misc_feature: MA Experiment 20001554 PARAMETER Experiment Name: At_Drought_Soil_Dry_P Parameter: Organism Value: A. thaliana
  misc_feature: MA Experiment 20001554 PARAMETER Experiment Name: At_Drought_Soil_Dry_P Parameter: Plant Line Value: WS
  misc_feature: MA Experiment 20001554 PARAMETER Experiment Name: At_Drought_Soil_Dry_P Parameter: Post Timepoint (hr) Value: None
  misc_feature: MA Experiment 20001554 PARAMETER Experiment Name: At_Drought_Soil_Dry_P Parameter: Post-Treatment Value: None
  misc_feature: MA Experiment 20001554 PARAMETER Experiment Name: At_Drought_Soil_Dry_P Parameter: Timepoint (day) Value: 7
  misc_feature: MA Experiment 20001554 PARAMETER Experiment Name: At_Drought_Soil_Dry_P Parameter: Treatment Value: Drought vs. No Drought
  misc_feature: MA Experiment ID: 20001555 Result: Up-regulated in Transcription
  misc_feature: MA Experiment 20001555 PARAMETER Experiment Name: At_Drought_Soil_Dry_P Parameter: Age (day) Value: 24
  misc_feature: MA Experiment 20001555 PARAMETER Experiment Name: At_Drought_Soil_Dry_P Parameter: Organism Value: A. thaliana
  misc_feature: MA Experiment 20001555 PARAMETER Experiment Name: At_Drought_Soil_Dry_P Parameter: Plant Line Value: WS
  misc_feature: MA Experiment 20001555 PARAMETER Experiment Name: At_Drought_Soil_Dry_P Parameter: Post Timepoint (hr) Value: None
  misc_feature: MA Experiment 20001555 PARAMETER Experiment Name: At_Drought_Soil_Dry_P Parameter: Post-Treatment Value: None
  misc_feature: MA Experiment 20001555 PARAMETER Experiment Name: At_Drought_Soil_Dry_P Parameter: Timepoint (day) Value: 10
  misc_feature: MA Experiment 20001555 PARAMETER Experiment Name: At_Drought_Soil_Dry_P Parameter: Treatment Value: Drought vs. No Drought
  misc_feature: MA Experiment ID: 20001558 Result: Down-regulated in Transcription
  misc_feature: MA Experiment 20001558 PARAMETER Experiment Name: At_Drought_Soil_Dry_P Parameter: Age (day) Value: 27
  misc_feature: MA Experiment 20001558 PARAMETER Experiment Name: At_Drought_Soil_Dry_P Parameter: Organism Value: A. thaliana
  misc_feature: MA Experiment 20001558 PARAMETER Experiment Name: At_Drought_Soil_Dry_P Parameter: Plant Line Value: WS
  misc_feature: MA Experiment 20001558 PARAMETER Experiment Name: At_Drought_Soil_Dry_P Parameter: Post Timepoint (hr) Value: 6
  misc_feature: MA Experiment 20001558 PARAMETER Experiment Name: At_Drought_Soil_Dry_P Parameter: Post-Treatment Value: Re-Water vs. No Drought
  misc_feature: MA Experiment 20001558 PARAMETER Experiment Name: At_Drought_Soil_Dry_P Parameter: Timepoint (day) Value: 13
  misc_feature: MA Experiment 20001558 PARAMETER Experiment Name: At_Drought_Soil_Dry_P Parameter: Treatment Value: Drought vs. No Drought
  misc_feature: MA Experiment ID: 20001757 Result: Down-regulated in Transcription
  misc_feature: MA Experiment 20001757 PARAMETER Experiment Name: At_50mM_NH4NO3_L-to-H_P Parameter: Timepoint (hr) Value: 6
  misc_feature: MA Experiment 20001757 PARAMETER Experiment Name: At_50mM_NH4NO3_L-to-H_P Parameter: Tissue Value: Leaf
  misc_feature: MA Experiment 20001757 PARAMETER Experiment Name: At_50mM_NH4NO3_L-to-H_P Parameter: Treatment Value: 50mM NH4NO3 vs 100mM Mannitol
aagaaccaactcaatacgcatcacaaagaaccctaaattcctggaagatctcaaaaggaaaattcaaaaccaaagcttcaagcaatcatcaagcaaaggaaaagctcaaattttgggtcttttatatatttatttcttaaagttacaatctttttgattgtggtttcagtgtacgaacacgcaagaactcgcgtgaaaaaattgtatccaagcttcgtgaaaggagtctctctgtatttagtggcgttttgttctgttgttatttctgaaatattgaagcttttgatttgggtttcaagagagcagagatgtgtagtttgtcggcgattatgttgttaccaacgaagctgaaaccagcttattcagacaaacggagtaacagtagcagcagcagctcactcttcttcaacaatagaagatccaagaagaagaaccaatcgattgttcccgttgcaaggttgtttggaccggcgattttcgaatcatccaaattgaaagtactcttcttaggggttgatgagaagaagcatccttcaacgctccctaggacttacacactcactcacagtgacattacagctaaactaaccttagctatttctcaatccataaacaactctcagttgcaaggatgggcaaataggctataccgggatgaagttgtggcagaatggaagaaagtgaaagggaaaatgtcgcttcacgttcattgtcacataagcggtggccatttccttttagatctctttgcaaagtttcgatatttcatcttttgcaaagaactacctgtggtgttgaaggcttttgtgcatggagatgggaacttgttgaacaactatcctgagctacaagaagctcttgtttgggtctatttccattctaatgtcaatgagttcaacaaagtcgagtgttggggtccgctttgggaagctgtttcgcctgatggtcacaagactgagactcttcccgaggctcggtgtgcggacgagtgtagttgttgttttccaaccgttagctcgattccatggtctcatagtcttagtaatgaaggtgtaaatggttactctgggactcagactgagggaattgctactccaaatccggagaaactctagtgactaaatatcaaattacaagtttttcttttggtagtttgtacaaagtgaaaaggaaatggcaggactttccttttggtggatctaaatattggtttggtttggtgtacataatgtggtataggaaaataatgattatttgtaggttaaatacagattttaaagtttcaaatggtattttgtgtct

SEQ ID NO: 101887 - protein, 268 aa, Arabidopsis thaliana; identical to SEQ ID NO: 21256
  peptide (1)..(268): Ceres Seq. ID no. 13608913
  misc_feature (1)..(268): Homolog of NCBI NO: 18416035 NR Description: expressed protein [Arabidopsis thaliana]
  misc_feature (1)..(268): Homolog of NCBI NO: 21592527 NR Description: unknown [Arabidopsis thaliana]
  misc_feature (1)..(238): Homolog of NCBI NO: 15234348 NR Description: expressed protein [Arabidopsis thaliana]
  misc_feature (48)..(243): Homolog of NCBI NO: 15234348 NR Description: expressed protein [Arabidopsis thaliana]
  misc_feature (42)..(208): Homolog of NCBI NO: 8778672 NR Description: F9C16.20 [Arabidopsis thaliana]
  misc_feature (42)..(208): Homolog of NCBI NO: 18401163 NR Description: expressed protein [Arabidopsis thaliana] unknown protein [Arabidopsis thaliana]
  misc_feature (49)..(183): Homolog of NCBI NO: 38567838 NR Description: OSJNBb0020J19.16 [Oryza sativa (japonica
  misc_feature (56)..(203): Homolog of NCBI NO: 15896657 NR Description: Uncharacterized protein, homolog of YYBI fused to uncharacterized domain similar to A.thaliana (gi:3292817
  misc_feature (56)..(210): Homolog of NCBI NO: 18311568 NR Description: hypothetical protein [Clostridium perfringens]

SEQ ID NO: 101888 - protein, 261 aa, Arabidopsis thaliana; identical to SEQ ID NO: 21257
  peptide (1)..(261): Ceres Seq. ID no. 13608914
  misc_feature (1)..(261): Homolog of NCBI NO: 18416035 NR Description: expressed protein [Arabidopsis thaliana]
  misc_feature (1)..(261): Homolog of NCBI NO: 21592527 NR Description: unknown [Arabidopsis thaliana]
  misc_feature (1)..(231): Homolog of NCBI NO: 15234348 NR Description: expressed protein [Arabidopsis thaliana]
  misc_feature (41)..(236): Homolog of NCBI NO: 15234348 NR Description: expressed protein [Arabidopsis thaliana]
  misc_feature (35)..(201): Homolog of NCBI NO: 8778672 NR Description: F9C16.20 [Arabidopsis thaliana]
  misc_feature (35)..(201): Homolog of NCBI NO: 18401163 NR Description: expressed protein [Arabidopsis thaliana] unknown protein [Arabidopsis thaliana]
  misc_feature (42)..(176): Homolog of NCBI NO: 38567838 NR Description: OSJNBb0020J19.16 [Oryza sativa (japonica
  misc_feature (49)..(196): Homolog of NCBI NO: 15896657 NR Description: Uncharacterized protein, homolog of YYBI fused to uncharacterized domain similar to A.thaliana (gi:3292817
  misc_feature (49)..(203): Homolog of NCBI NO: 18311568 NR Description: hypothetical protein [Clostridium perfringens]

SEQ ID NO: 101889 - protein, 140 aa, Arabidopsis thaliana; identical to SEQ ID NO: 21258
  peptide (1)..(140): Ceres Seq. ID no. 13608915
  misc_feature (1)..(140): Homolog of NCBI NO: 18416035 NR Description: expressed protein [Arabidopsis thaliana]
  misc_feature (1)..(140): Homolog of NCBI NO: 21592527 NR Description: unknown [Arabidopsis thaliana]
  misc_feature (1)..(110): Homolog of NCBI NO: 15234348 NR Description: expressed protein [Arabidopsis thaliana]
  misc_feature (1)..(115): Homolog of NCBI NO: 15234348 NR Description: expressed protein [Arabidopsis thaliana]
  misc_feature (1)..(80): Homolog of NCBI NO: 8778672 NR Description: F9C16.20 [Arabidopsis thaliana]
  misc_feature (1)..(80): Homolog of NCBI NO: 18401163 NR Description: expressed protein [Arabidopsis thaliana] unknown protein [Arabidopsis thaliana]
  misc_feature (1)..(55): Homolog of NCBI NO: 38567838 NR Description: OSJNBb0020J19.16 [Oryza sativa (japonica
  misc_feature (1)..(75): Homolog of NCBI NO: 15896657 NR Description: Uncharacterized protein, homolog of YYBI fused to uncharacterized domain similar to A.thaliana (gi:3292817
  misc_feature (1)..(82): Homolog of NCBI NO: 18311568 NR Description: hypothetical protein [Clostridium perfringens]

SEQ ID NO: 101890 - DNA, 558 bp, Arabidopsis thaliana
  misc_feature (1)..(558): Ceres Seq. ID no. 13608924
  misc_feature: MA Experiment ID: 20000184 Result: Down-regulated in Transcription
  misc_feature: MA Experiment 20000184 PARAMETER Experiment Name: At_Shoots__P Parameter: Age (day) Value: 7
  misc_feature: MA Experiment 20000184 PARAMETER Experiment Name: At_Shoots__P Parameter: Tissue Value: Shoots vs. Whole Plant
  misc_feature: MA Experiment ID: 20000264 Result: Down-regulated in Transcription
  misc_feature: MA Experiment 20000264 PARAMETER Experiment Name: At_Open_Flower_P Parameter: Age (day) Value: 21
  misc_feature: MA Experiment 20000264 PARAMETER Experiment Name: At_Open_Flower_P Parameter: Plant Line Value: WS
  misc_feature: MA Experiment 20000264 PARAMETER Experiment Name: At_Open_Flower_P Parameter: Tissue Value: Open Flower vs. Whole Plant
  misc_feature: MA Experiment ID: 20000265 Result: Down-regulated in Transcription
  misc_feature: MA Experiment 20000265 PARAMETER Experiment Name: At_Open_Flower_P Parameter: Age (day) Value: 21
  misc_feature: MA Experiment 20000265 PARAMETER Experiment Name: At_Open_Flower_P Parameter: Plant Line Value: WS
  misc_feature: MA Experiment 20000265 PARAMETER Experiment Name: At_Open_Flower_P Parameter: Tissue Value: Closed Flower vs. Whole Plant
  misc_feature: MA Experiment ID: 20000267 Result: Up-regulated in Transcription
  misc_feature: MA Experiment 20000267 PARAMETER Experiment Name: At_Drought_P Parameter: Age (day) Value: 7
  misc_feature: MA Experiment 20000267 PARAMETER Experiment Name: At_Drought_P Parameter: Organism Value: A. thaliana
  misc_feature: MA Experiment 20000267 PARAMETER Experiment Name: At_Drought_P Parameter: Plant Line Value: WS
  misc_feature: MA Experiment 20000267 PARAMETER Experiment Name: At_Drought_P Parameter: Timepoint (hr) Value: 6
  misc_feature: MA Experiment 20000267 PARAMETER Experiment Name: At_Drought_P Parameter: Tissue Value: Whole Plant
  misc_feature: MA Experiment 20000267 PARAMETER Experiment Name: At_Drought_P Parameter: Treatment Value: Drought vs. No Drought
  misc_feature: MA Experiment ID: 20000286 Result: Down-regulated in Transcription
  misc_feature: MA Experiment 20000286 PARAMETER Experiment Name: At_Open_Flower_P Parameter: Age (day) Value: 21
  misc_feature: MA Experiment 20000286 PARAMETER Experiment Name: At_Open_Flower_P Parameter: Plant Line Value: WS
  misc_feature: MA Experiment 20000286 PARAMETER Experiment Name: At_Open_Flower_P Parameter: Tissue Value: Half Open vs. Whole Plant
  misc_feature: MA Experiment ID: 20000527 Result: Up-regulated in Transcription
  misc_feature: MA Experiment 20000527 PARAMETER Experiment Name: At_10percent_PEG_P Parameter: Age (day) Value: 20
  misc_feature: MA Experiment 20000527 PARAMETER Experiment Name: At_10percent_PEG_P Parameter: Organism Value: A. thaliana
  misc_feature: MA Experiment 20000527 PARAMETER Experiment Name: At_10percent_PEG_P Parameter: Plant Line Value: WS
  misc_feature: MA Experiment 20000527 PARAMETER Experiment Name: At_10percent_PEG_P Parameter: Timepoint (day) Value: 20
  misc_feature: MA Experiment 20000527 PARAMETER Experiment Name: At_10percent_PEG_P Parameter: Tissue Value: Whole Plant
  misc_feature: MA Experiment 20000527 PARAMETER Experiment Name: At_10percent_PEG_P Parameter: Treatment Value: 10percent PEG vs. No Treatment
  misc_feature: MA Experiment ID: 20001773 Result: Down-regulated in Transcription
  misc_feature: MA Experiment 20001773 PARAMETER Experiment Name: At_Far-red-enriched-adult_P Parameter: Age (day) Value: 30
  misc_feature: MA Experiment 20001773 PARAMETER Experiment Name: At_Far-red-enriched-adult_P Parameter: Light Value: Far-red enriched vs. White
  misc_feature: MA Experiment 20001773 PARAMETER Experiment Name: At_Far-red-enriched-adult_P Parameter: Organism Value: A. thaliana
  misc_feature: MA Experiment 20001773 PARAMETER Experiment Name: At_Far-red-enriched-adult_P Parameter: Plant Line Value: Columbia
  misc_feature: MA Experiment 20001773 PARAMETER Experiment Name: At_Far-red-enriched-adult_P Parameter: Timepoint (hr) Value: 48
  misc_feature: MA Experiment 20001773 PARAMETER Experiment Name: At_Far-red-enriched-adult_P Parameter: Tissue Value: Aerial
atggaagggtcgtcttcttcgatgcagtcaaagtacaaaggagtgaggaagaggaaatggggaaaatgggtttcagagatcagacttcccaacagcagagaacgtatttggttgggctcttacgatactcctgagaaggcggcgcgtgctttcgacgcggctctttattgtctccgtggcaacaacgcaaagttcaatttccctgataatcctccggtgatctccggcggacgtaacttgtcgcgatctgagataagagaagctgctgcgaggttcgctaattcggcggaggatgattcaagtggcggagcaggatacgagatacggcaagaatctgcttcaacatcgatggacgttgattcggagtttttgagtatgcttccgacggttggttcgggtaacttcgcttcggagtttgggttattccctgggtttgatgatttctccgatgaatactccggtgatcgtttcagagagcagctttcgcctacacaagattattatcagcttggagaagagacttacgccgatggttccatgtttctttggaatttttga

SEQ ID NO: 101891 - protein, 185 aa, Arabidopsis thaliana
  peptide (1)..(185): Ceres Seq. ID no. 13608925
  misc_feature (9)..(73): Pfam Name: AP2 domain Pfam Description: AP2 domain
  misc_feature (1)..(185): Homolog of NCBI NO: 29893536 NR Description: putative AP2 domain transcription factor
  misc_feature (8)..(185): Homolog of NCBI NO: 22329667 NR Description: AP2 domain transcription factor, putative
  misc_feature (5)..(185): Homolog of NCBI NO: 15222040 NR Description: AP2 domain transcription factor, putative
  misc_feature (11)..(97): Homolog of NCBI NO: 22326940 NR Description: AP2 domain transcription factor, putative thaliana] >gi|13374855|emb|CAC34489.1| putative protein thaliana] >gi|29294061|gb|AAO73898.1| AP2 domain transcription
  misc_feature (1)..(95): Homolog of NCBI NO: 18417729 NR Description: AP2 domain transcription factor, putative
  misc_feature (4)..(185): Homolog of NCBI NO: 15219452 NR Description: AP2 domain transcription factor TINY, putative
  misc_feature (14)..(95): Homolog of NCBI NO: 25407707 NR Description: hypothetical protein AT4g31060 [imported] - thaliana >gi|2980760|emb|CAA18187.1| putative protein thaliana] >gi|7270008|emb|CAB79824.1| putative protein
  misc_feature (12)..(105): Homolog of NCBI NO: 15234561 NR Description: AP2 domain protein RAP2.10 [Arabidopsis thaliana]
  misc_feature (12)..(105): Homolog of NCBI NO: 25456718 NR Description: TINY-like protein [imported] - Arabidopsis (fragment) >gi|2281645|gb|AAC49776.1| AP2 domain containing
  misc_feature (11)..(98): Homolog of NCBI NO: 15224024 NR Description: AP2 domain transcription factor, putative
MEGSSSSMQSKYKGVRKRKWGKWVSEIRLPNSRERIWLGSYDTPEKAARAFDAALYCLRGNNAKFNFPDNPPVISGGRNLSRSEIREAAARFANSAEDDSSGGAGYEIRQESASTSMDVDSEFLSMLPTVGSGNFASEFGLFPGFDDFSDEYSGDRFREQLSPTQDYYQLGEETYADGSMFLWNF

SEQ ID NO: 101892 - protein, 178 aa, Arabidopsis thaliana; identical to SEQ ID NO: 91672
  peptide (1)..(178): Ceres Seq. ID no. 13608926
  misc_feature (2)..(66): Pfam Name: AP2 domain Pfam Description: AP2 domain
  misc_feature (1)..(178): Homolog of NCBI NO: 29893536 NR Description: putative AP2 domain transcription factor
  misc_feature (1)..(178): Homolog of NCBI NO: 22329667 NR Description: AP2 domain transcription factor, putative
  misc_feature (1)..(178): Homolog of NCBI NO: 15222040 NR Description: AP2 domain transcription factor, putative
  misc_feature (4)..(90): Homolog of NCBI NO: 22326940 NR Description: AP2 domain transcription factor, putative thaliana] >gi|13374855|emb|CAC34489.1| putative protein thaliana] >gi|29294061|gb|AAO73898.1| AP2 domain transcription
  misc_feature (1)..(88): Homolog of NCBI NO: 18417729 NR Description: AP2 domain transcription factor, putative
  misc_feature (1)..(178): Homolog of NCBI NO: 15219452 NR Description: AP2 domain transcription factor TINY, putative
  misc_feature (7)..(88): Homolog of NCBI NO: 25407707 NR Description: hypothetical protein AT4g31060 [imported] - thaliana >gi|2980760|emb|CAA18187.1| putative protein thaliana] >gi|7270008|emb|CAB79824.1| putative protein
  misc_feature (5)..(98): Homolog of NCBI NO: 15234561 NR Description: AP2 domain protein RAP2.10 [Arabidopsis thaliana]
  misc_feature (5)..(98): Homolog of NCBI NO: 25456718 NR Description: TINY-like protein [imported] - Arabidopsis (fragment) >gi|2281645|gb|AAC49776.1| AP2 domain containing
  misc_feature (4)..(91): Homolog of NCBI NO: 15224024 NR Description: AP2 domain transcription factor, putative

SEQ ID NO: 101893 - DNA, 905 bp, Arabidopsis thaliana
  misc_feature (1)..(905): Ceres Seq. ID no. 13608935
  misc_feature: MA Experiment ID: 108434 Result: Down-regulated in Transcription
  misc_feature: MA Experiment 108434 PARAMETER Experiment Name: At_Root_Tips_cDNA_P Parameter: Tissue Value: Root Tips
  misc_feature: MA Experiment ID: 108461 Result: Up-regulated in Transcription
  misc_feature: MA Experiment 108461 PARAMETER Experiment Name: At_Germinating_Seeds_cDNA_P Parameter: Age (day) Value: 1 vs. 0
  misc_feature: MA Experiment 108461 PARAMETER Experiment Name: At_Germinating_Seeds_cDNA_P Parameter: Tissue Value: Germinating Seeds
  misc_feature: MA Experiment ID: 108462 Result: Up-regulated in Transcription
  misc_feature: MA Experiment 108462 PARAMETER Experiment Name: At_Germinating_Seeds_cDNA_P Parameter: Age (day) Value: 2 vs. 0
  misc_feature: MA Experiment 108462 PARAMETER Experiment Name: At_Germinating_Seeds_cDNA_P Parameter: Tissue Value: Germinating Seeds
  misc_feature: MA Experiment ID: 108464 Result: Up-regulated in Transcription
  misc_feature: MA Experiment 108464 PARAMETER Experiment Name: At_Germinating_Seeds_cDNA_P Parameter: Age (day) Value: 4 vs. 0
  misc_feature: MA Experiment 108464 PARAMETER Experiment Name: At_Germinating_Seeds_cDNA_P Parameter: Tissue Value: Germinating Seeds
  misc_feature: MA Experiment ID: 108605 Result: Up-regulated in Transcription
  misc_feature: MA Experiment 108605 PARAMETER Experiment Name: At_100uM_ABA_cDNA_P Parameter: Timepoint (hr) Value: 6
  misc_feature: MA Experiment 108605 PARAMETER Experiment Name: At_100uM_ABA_cDNA_P Parameter: Tissue Value: Aerial
  misc_feature: MA Experiment 108605 PARAMETER Experiment Name: At_100uM_ABA_cDNA_P Parameter: Treatment Value: 100uM ABA vs. No Treatment
  misc_feature: MA Experiment ID: 108607 Result: Up-regulated in Transcription
  misc_feature: MA Experiment 108607 PARAMETER Experiment Name: At_100uM_ABA_cDNA_P Parameter: Timepoint (hr) Value: 4
  misc_feature: MA Experiment 108607 PARAMETER Experiment Name: At_100uM_ABA_cDNA_P Parameter: Tissue Value: Aerial
  misc_feature: MA Experiment 108607 PARAMETER Experiment Name: At_100uM_ABA_cDNA_P Parameter: Treatment Value: 100uM ABA vs. No Treatment
  misc_feature: MA Experiment ID: 108609 Result: Up-regulated in Transcription
  misc_feature: MA Experiment 108609 PARAMETER Experiment Name: At_100uM_ABA_cDNA_P Parameter: Timepoint (hr) Value: 24
  misc_feature: MA Experiment 108609 PARAMETER Experiment Name: At_100uM_ABA_cDNA_P Parameter: Tissue Value: Aerial
  misc_feature: MA Experiment 108609 PARAMETER Experiment Name: At_100uM_ABA_cDNA_P Parameter: Treatment Value: 100uM ABA vs. No Treatment
  misc_feature: MA Experiment ID: 20000069 Result: Up-regulated in Transcription
  misc_feature: MA Experiment 20000069 PARAMETER Experiment Name: At_100uM_ABA_Mutants_cDNA_P Parameter: Plant Line Value: CS23
  misc_feature: MA Experiment 20000069 PARAMETER Experiment Name: At_100uM_ABA_Mutants_cDNA_P Parameter: Timepoint (hr) Value: 6
  misc_feature: MA Experiment 20000069 PARAMETER Experiment Name: At_100uM_ABA_Mutants_cDNA_P Parameter: Tissue Value: Aerial
  misc_feature: MA Experiment 20000069 PARAMETER Experiment Name: At_100uM_ABA_Mutants_cDNA_P Parameter: Treatment Value: 100uM ABA vs. No Treatment
  misc_feature: MA Experiment ID: 20000070 Result: Up-regulated in Transcription
  misc_feature: MA Experiment 20000070 PARAMETER Experiment Name: At_100uM_ABA_Mutants_cDNA_P Parameter: Plant Line Value: CS24
  misc_feature: MA Experiment 20000070 PARAMETER Experiment Name: At_100uM_ABA_Mutants_cDNA_P Parameter: Timepoint (hr) Value: 6
  misc_feature: MA Experiment 20000070 PARAMETER Experiment Name: At_100uM_ABA_Mutants_cDNA_P Parameter: Tissue Value: Aerial
  misc_feature: MA Experiment 20000070 PARAMETER Experiment Name: At_100uM_ABA_Mutants_cDNA_P Parameter: Treatment Value: 100uM ABA vs. No Treatment
  misc_feature: MA Experiment ID: 20000071 Result: Up-regulated in Transcription
  misc_feature: MA Experiment 20000071 PARAMETER Experiment Name: At_100uM_ABA_Mutants_cDNA_P Parameter: Plant Line Value: CS8104
  misc_feature: MA Experiment 20000071 PARAMETER Experiment Name: At_100uM_ABA_Mutants_cDNA_P Parameter: Timepoint (hr) Value: 6
  misc_feature: MA Experiment 20000071 PARAMETER Experiment Name: At_100uM_ABA_Mutants_cDNA_P Parameter: Tissue Value: Aerial
  misc_feature: MA Experiment 20000071 PARAMETER Experiment Name: At_100uM_ABA_Mutants_cDNA_P Parameter: Treatment Value: 100uM ABA vs. No Treatment
  misc_feature: MA Experiment ID: 20000086 Result: Up-regulated in Transcription
  misc_feature: MA Experiment 20000086 PARAMETER Experiment Name: At_100uM_ABA_Mutants_cDNA_P Parameter: Plant Line Value: CS22
  misc_feature: MA Experiment 20000086 PARAMETER Experiment Name: At_100uM_ABA_Mutants_cDNA_P Parameter: Timepoint (hr) Value: 6
  misc_feature: MA Experiment 20000086 PARAMETER Experiment Name: At_100uM_ABA_Mutants_cDNA_P Parameter: Tissue Value: Aerial
  misc_feature: MA Experiment 20000086 PARAMETER Experiment Name: At_100uM_ABA_Mutants_cDNA_P Parameter: Treatment Value: 100uM ABA vs. No Treatment
  misc_feature: MA Experiment ID: 20000087 Result: Up-regulated in Transcription
  misc_feature: MA Experiment 20000087 PARAMETER Experiment Name: At_100uM_ABA_Mutants_cDNA_P Parameter: Plant Line Value: WS
  misc_feature: MA Experiment 20000087 PARAMETER Experiment Name: At_100uM_ABA_Mutants_cDNA_P Parameter: Timepoint (hr) Value: 6
  misc_feature: MA Experiment 20000087 PARAMETER Experiment Name: At_100uM_ABA_Mutants_cDNA_P Parameter: Tissue Value: Aerial
  misc_feature: MA Experiment 20000087 PARAMETER Experiment Name: At_100uM_ABA_Mutants_cDNA_P Parameter: Treatment Value: 100uM ABA vs. No Treatment
  misc_feature: MA Experiment ID: 20000088 Result: Up-regulated in Transcription
  misc_feature: MA Experiment 20000088 PARAMETER Experiment Name: At_100uM_ABA_Mutants_cDNA_P Parameter: Plant Line Value: Landsberg
  misc_feature: MA Experiment 20000088 PARAMETER Experiment Name: At_100uM_ABA_Mutants_cDNA_P Parameter: Timepoint (hr) Value: 6
  misc_feature: MA Experiment 20000088 PARAMETER Experiment Name: At_100uM_ABA_Mutants_cDNA_P Parameter: Tissue Value: Aerial
  misc_feature: MA Experiment 20000088 PARAMETER Experiment Name: At_100uM_ABA_Mutants_cDNA_P Parameter: Treatment Value: 100uM ABA vs. No Treatment
  misc_feature: MA Experiment ID: 20000113 Result: Down-regulated in Transcription
  misc_feature: MA Experiment 20000113 PARAMETER Experiment Name: At_42deg_Heat_cDNA_P Parameter: Temperature (deg C) Value: 42 vs. 22
  misc_feature: MA Experiment 20000113 PARAMETER Experiment Name: At_42deg_Heat_cDNA_P Parameter: Timepoint (hr) Value: 8
  misc_feature: MA Experiment 20000113 PARAMETER Experiment Name: At_42deg_Heat_cDNA_P Parameter: Tissue Value: Aerial
  misc_feature: MA Experiment ID: 20000117 Result: Up-regulated in Transcription
  misc_feature: MA Experiment 20000117 PARAMETER Experiment Name: At_100uM_ABA_Mutants_cDNA_P Parameter: Plant Line Value: Columbia
  misc_feature: MA Experiment 20000117 PARAMETER Experiment Name: At_100uM_ABA_Mutants_cDNA_P Parameter: Timepoint (hr) Value: 6
  misc_feature: MA Experiment 20000117 PARAMETER Experiment Name: At_100uM_ABA_Mutants_cDNA_P Parameter: Tissue Value: Aerial
  misc_feature: MA Experiment 20000117 PARAMETER Experiment Name: At_100uM_ABA_Mutants_cDNA_P Parameter: Treatment Value: 100uM ABA vs. No Treatment
  misc_feature: MA Experiment ID: 20000169 Result: Up-regulated in Transcription
  misc_feature: MA Experiment 20000169 PARAMETER Experiment Name: At_100uM_ABA_P Parameter: Age (day) Value: 14
  misc_feature: MA Experiment 20000169 PARAMETER Experiment Name: At_100uM_ABA_P Parameter: Organism Value: A. thaliana
  misc_feature: MA Experiment 20000169 PARAMETER Experiment Name: At_100uM_ABA_P Parameter: Plant Line Value: WS
  misc_feature: MA Experiment 20000169 PARAMETER Experiment Name: At_100uM_ABA_P Parameter: Timepoint (hr) Value: 6
  misc_feature: MA Experiment 20000169 PARAMETER Experiment Name: At_100uM_ABA_P Parameter: Tissue Value: Aerial
  misc_feature: MA Experiment 20000169 PARAMETER Experiment Name: At_100uM_ABA_P Parameter: Treatment Value: 100uM ABA vs. No Treatment
  misc_feature: MA Experiment ID: 20000180 Result: Up-regulated in Transcription
  misc_feature: MA Experiment 20000180 PARAMETER Experiment Name: At_Germinating_Seeds_P Parameter: Age (hr) Value: 24 vs. 0
  misc_feature: MA Experiment 20000180 PARAMETER Experiment Name: At_Germinating_Seeds_P Parameter: Tissue Value: Germinating Seeds
  misc_feature: MA Experiment ID: 20000211 Result: Up-regulated in Transcription
  misc_feature: MA Experiment 20000211 PARAMETER Experiment Name: At_0.001percent_MeJA__P Parameter: Age (day) Value: 14
  misc_feature: MA Experiment 20000211 PARAMETER Experiment Name: At_0.001percent_MeJA__P Parameter: Organism Value: A. thaliana
  misc_feature: MA Experiment 20000211 PARAMETER Experiment Name: At_0.001percent_MeJA__P Parameter: Plant Line Value: WS
  misc_feature: MA Experiment 20000211 PARAMETER Experiment Name: At_0.001percent_MeJA__P Parameter: Timepoint (hr) Value: 1
  misc_feature: MA Experiment 20000211 PARAMETER Experiment Name: At_0.001percent_MeJA__P Parameter: Tissue Value: Aerial
  misc_feature: MA Experiment 20000211 PARAMETER Experiment Name: At_0.001percent_MeJA__P Parameter: Treatment Value: 0.001percent MeJA vs. No Treatment
  misc_feature: MA Experiment ID: 20000227 Result: Down-regulated in Transcription
  misc_feature: MA Experiment 20000227 PARAMETER Experiment Name: At_Root-Tips-vs-Tops_P Parameter: Tissue Value: Root Tips vs. Root Tops
  misc_feature: MA Experiment ID: 20000265 Result: Up-regulated in Transcription
  misc_feature: MA Experiment 20000265 PARAMETER Experiment Name: At_Open_Flower_P Parameter: Age (day) Value: 21
  misc_feature: MA Experiment 20000265 PARAMETER Experiment Name: At_Open_Flower_P Parameter: Plant Line Value: WS
  misc_feature: MA Experiment 20000265 PARAMETER Experiment Name: At_Open_Flower_P Parameter: Tissue Value: Closed Flower vs. Whole Plant
  misc_feature: MA Experiment ID: 20000436 Result: Up-regulated in Transcription
  misc_feature: MA Experiment 20000436 PARAMETER Experiment Name: At_Drought_P Parameter: Age (day) Value: 7
  misc_feature: MA Experiment 20000436 PARAMETER Experiment Name: At_Drought_P Parameter: Organism Value: A. thaliana
  misc_feature: MA Experiment 20000436 PARAMETER Experiment Name: At_Drought_P Parameter: Plant Line Value: WS
  misc_feature: MA Experiment 20000436 PARAMETER Experiment Name: At_Drought_P Parameter: Timepoint (hr) Value: 12
  misc_feature: MA Experiment 20000436 PARAMETER Experiment Name: At_Drought_P Parameter: Tissue Value: Whole Plant
  misc_feature: MA Experiment 20000436 PARAMETER Experiment Name: At_Drought_P Parameter: Treatment Value: Drought vs. No Drought
  misc_feature: MA Experiment ID: 20000451 Result: Down-regulated in Transcription
  misc_feature: MA Experiment 20000451 PARAMETER Experiment Name: At_CS6879_Shoots-Roots_P Parameter: Age (day) Value: 14
  misc_feature: MA Experiment 20000451 PARAMETER Experiment Name: At_CS6879_Shoots-Roots_P Parameter: Organism Value: A. thaliana
  misc_feature: MA Experiment 20000451 PARAMETER Experiment Name: At_CS6879_Shoots-Roots_P Parameter: Plant Line Value: CS6879 vs. WS
  misc_feature: MA Experiment 20000451 PARAMETER Experiment Name: At_CS6879_Shoots-Roots_P Parameter: Tissue Value: Roots
  misc_feature: MA Experiment ID: 20000453 Result: Up-regulated in Transcription
  misc_feature: MA Experiment 20000453 PARAMETER Experiment Name: At_100uM_ABA_P Parameter: Age (day) Value: 15
  misc_feature: MA Experiment 20000453 PARAMETER Experiment Name: At_100uM_ABA_P Parameter: Organism Value: A. thaliana
  misc_feature: MA Experiment 20000453 PARAMETER Experiment Name: At_100uM_ABA_P Parameter: Plant Line Value: WS
  misc_feature: MA Experiment 20000453 PARAMETER Experiment Name: At_100uM_ABA_P Parameter: Timepoint (hr) Value: 24
  misc_feature: MA Experiment 20000453 PARAMETER Experiment Name: At_100uM_ABA_P Parameter: Tissue Value: Aerial
  misc_feature: MA Experiment 20000453 PARAMETER Experiment Name: At_100uM_ABA_P Parameter: Treatment Value: 100uM ABA vs. No Treatment
  misc_feature: MA Experiment ID: 20001451 Result: Down-regulated in Transcription
  misc_feature: MA Experiment 20001451 PARAMETER Experiment Name: At_Far-red-induction_P Parameter: Age (day) Value: 7
  misc_feature: MA Experiment 20001451 PARAMETER Experiment Name: At_Far-red-induction_P Parameter: Light Value: Far-red vs. White
  misc_feature: MA Experiment 20001451 PARAMETER Experiment Name: At_Far-red-induction_P Parameter: Organism Value: A. thaliana
  misc_feature: MA Experiment 20001451 PARAMETER Experiment Name: At_Far-red-induction_P Parameter: Plant Line Value: Columbia
  misc_feature: MA Experiment 20001451 PARAMETER Experiment Name: At_Far-red-induction_P Parameter: Timepoint (hr) Value: 24
  misc_feature: MA Experiment 20001451 PARAMETER Experiment Name: At_Far-red-induction_P Parameter: Tissue Value: Whole Plant
  misc_feature: MA Experiment ID: 20001554 Result: Up-regulated in Transcription
  misc_feature: MA Experiment 20001554 PARAMETER Experiment Name: At_Drought_Soil_Dry_P Parameter: Age (day) Value: 21
  misc_feature: MA Experiment 20001554 PARAMETER Experiment Name: At_Drought_Soil_Dry_P Parameter: Organism Value: A. thaliana
  misc_feature: MA Experiment 20001554 PARAMETER Experiment Name: At_Drought_Soil_Dry_P Parameter: Plant Line Value: WS
  misc_feature: MA Experiment 20001554 PARAMETER Experiment Name: At_Drought_Soil_Dry_P Parameter: Post Timepoint (hr) Value: None
  misc_feature: MA Experiment 20001554 PARAMETER Experiment Name: At_Drought_Soil_Dry_P Parameter: Post-Treatment Value: None
  misc_feature: MA Experiment 20001554 PARAMETER Experiment Name: At_Drought_Soil_Dry_P Parameter: Timepoint (day) Value: 7
  misc_feature: MA Experiment 20001554 PARAMETER Experiment Name: At_Drought_Soil_Dry_P Parameter: Treatment Value: Drought vs. No Drought
  misc_feature: MA Experiment ID: 20001555 Result: Up-regulated in Transcription
  misc_feature: MA Experiment 20001555 PARAMETER Experiment Name: At_Drought_Soil_Dry_P Parameter: Age (day) Value: 24
  misc_feature: MA Experiment 20001555 PARAMETER Experiment Name: At_Drought_Soil_Dry_P Parameter: Organism Value: A. thaliana
  misc_feature: MA Experiment 20001555 PARAMETER Experiment Name: At_Drought_Soil_Dry_P Parameter: Plant Line Value: WS
  misc_feature: MA Experiment 20001555 PARAMETER Experiment Name: At_Drought_Soil_Dry_P Parameter: Post Timepoint (hr) Value: None
  misc_feature: MA Experiment 20001555 PARAMETER Experiment Name: At_Drought_Soil_Dry_P Parameter: Post-Treatment Value: None
  misc_feature: MA Experiment 20001555 PARAMETER Experiment Name: At_Drought_Soil_Dry_P Parameter: Timepoint (day) Value: 10
  misc_feature: MA Experiment 20001555 PARAMETER Experiment Name: At_Drought_Soil_Dry_P Parameter: Treatment Value: Drought vs. No Drought
  misc_feature: MA Experiment ID: 20001558 Result: Down-regulated in Transcription
  misc_feature: MA Experiment 20001558 PARAMETER Experiment Name: At_Drought_Soil_Dry_P Parameter: Age (day) Value: 27
  misc_feature: MA Experiment 20001558 PARAMETER Experiment Name: At_Drought_Soil_Dry_P Parameter: Organism Value: A. thaliana
  misc_feature: MA Experiment 20001558 PARAMETER Experiment Name: At_Drought_Soil_Dry_P Parameter: Plant Line Value: WS
  misc_feature: MA Experiment 20001558 PARAMETER Experiment Name: At_Drought_Soil_Dry_P Parameter: Post Timepoint (hr) Value: 6
  misc_feature: MA Experiment 20001558 PARAMETER Experiment Name: At_Drought_Soil_Dry_P Parameter: Post-Treatment Value: Re-Water vs. No Drought
  misc_feature: MA Experiment 20001558 PARAMETER Experiment Name: At_Drought_Soil_Dry_P Parameter: Timepoint (day) Value: 13
  misc_feature: MA Experiment 20001558 PARAMETER Experiment Name: At_Drought_Soil_Dry_P Parameter: Treatment Value: Drought vs. No Drought
  misc_feature: MA Experiment ID: 20001559 Result: Up-regulated in Transcription
  misc_feature: MA Experiment 20001559 PARAMETER Experiment Name: At_Drought_Soil_Dry_P Parameter: Age (day) Value: 28
  misc_feature: MA Experiment 20001559 PARAMETER Experiment Name: At_Drought_Soil_Dry_P Parameter: Organism Value: A. thaliana
  misc_feature: MA Experiment 20001559 PARAMETER Experiment Name: At_Drought_Soil_Dry_P Parameter: Plant Line Value: WS
  misc_feature: MA Experiment 20001559 PARAMETER Experiment Name: At_Drought_Soil_Dry_P Parameter: Post Timepoint (hr) Value: 29
  misc_feature: MA Experiment 20001559 PARAMETER Experiment Name: At_Drought_Soil_Dry_P Parameter: Post-Treatment Value: Re-Water vs. No Drought
  misc_feature: MA Experiment 20001559 PARAMETER Experiment Name: At_Drought_Soil_Dry_P Parameter: Timepoint (day) Value: 14
  misc_feature: MA Experiment 20001559 PARAMETER Experiment Name: At_Drought_Soil_Dry_P Parameter: Treatment Value: Drought vs. No Drought
aaaaatggcccactggtgggtggagaatggtaataattcagtttaaaagctaagccttctcactgattaactcaatcattcatccgtctctgcaaacaaaggaagaagaatcaagatggctctggaaatctgtgtgaaagctgctgttggtgctcctgatcatctcggcgactgtccgttcagccaacgggctcttctcacactcgaggagaagagtcttacctacaaaatccatctgattaacctctctgacaaaccccagtggttcttggacattagtcctcaagggaaagtaccagtgcttaagatcgacgacaagtgggtgactgattccgacgtcatcgttggtatactcgaggagaagtatcctgatccaccactcaagactcctgctgaatttgcctctgttggatccaacatttttggtacttttgggacattcttgaagagcaaagactccaatgacggatctgaacatgccttgcttgttgagctagaagctttggaaaaccatcttaagagtcacgatggcccttttatcgccggagaaagagtttccgcagtggatctaagcttagcaccaaagctttaccaccttcaagttgctcttggccatttcaaaagctggtctgtccctgagagctttccccatgtccataactacatgaagactctgttctcgctcgactcttttgagaaaactaagaccgaggaaaagtatgtgatctctggatgggctcccaaggttaacccttgaaactatgcaccgttatgagatcgttggtgtggtaatgttgttcaaggtctctctcttatatcagtcaaataatgtacttggacctttttatgtaatgtactgtatcaatcaaataagaagcctattttgaaataagatttgcctccat

SEQ ID NO: 101894 - protein, 213 aa, Arabidopsis thaliana; identical to SEQ ID NO: 29716
  peptide (1)..(213): Ceres Seq. ID no. 13608936
  misc_feature (119)..(191): Pfam Name: Glutathione S-transferase, C-terminal domain Pfam Description: Glutathione S-transferase, C-terminal domain
  misc_feature (1)..(213): Homolog of NCBI NO: 15223576 NR Description: dehydroascorbate reductase, putative [Arabidopsis
  misc_feature (1)..(201): Homolog of NCBI NO: 25402899 NR Description: protein F18O14.33 [imported] - Arabidopsis >gi|8778432|gb|AAF79440.1|AC025808_22 F18O14.33 [Arabidopsis
  misc_feature (1)..(212): Homolog of NCBI NO: 21593056 NR Description: GSH-dependent dehydroascorbate reductase 1,
  misc_feature (1)..(212): Homolog of NCBI NO: 15222163 NR Description: dehydroascorbate reductase, putative [Arabidopsis
  misc_feature (1)..(213): Homolog of NCBI NO: 28192427 NR Description: dehydroascorbate reductase [Nicotiana tabacum]
  misc_feature (1)..(212): Homolog of NCBI NO: 15239354 NR Description: dehydroascorbate reductase, putative [Arabidopsis
  misc_feature (1)..(212): Homolog of NCBI NO: 28192425 NR Description: dehydroascorbate reductase [Oryza sativa]
  misc_feature (4)..(213): Homolog of NCBI NO: 28192421 NR Description: dehydroascorbate reductase [Triticum aestivum]
  misc_feature (1)..(212): Homolog of NCBI NO: 6939839 NR Description: GSH-dependent dehydroascorbate reductase 1 [Oryza
  misc_feature (128)..(213): Homolog of NCBI NO: 15223575 NR Description: dehydroascorbate reductase, putative [Arabidopsis

SEQ ID NO: 101895 - DNA, 1271 bp, Arabidopsis thaliana
  misc_feature (1)..(1271): Ceres Seq. ID no. 13608953
  misc_feature: MA Experiment ID: 108573 Result: Down-regulated in Transcription
  misc_feature: MA Experiment 108573 PARAMETER Experiment Name: At_Drought_cDNA_P Parameter: Timepoint (hr) Value: 6
  misc_feature: MA Experiment 108573 PARAMETER Experiment Name: At_Drought_cDNA_P Parameter: Tissue Value: Aerial
  misc_feature: MA Experiment 108573 PARAMETER Experiment Name: At_Drought_cDNA_P Parameter: Treatment Value: Drought vs. No Drought
  misc_feature: MA Experiment ID: 108576 Result: Down-regulated in Transcription
  misc_feature: MA Experiment 108576 PARAMETER Experiment Name: At_42deg_Heat_cDNA_P Parameter: Temperature (deg C) Value: 42 vs. 22
  misc_feature: MA Experiment 108576 PARAMETER Experiment Name: At_42deg_Heat_cDNA_P Parameter: Timepoint (hr) Value: 1
  misc_feature: MA Experiment 108576 PARAMETER Experiment Name: At_42deg_Heat_cDNA_P Parameter: Tissue Value: Aerial
  misc_feature: MA Experiment ID: 108577 Result: Down-regulated in Transcription
  misc_feature: MA Experiment 108577 PARAMETER Experiment Name: At_42deg_Heat_cDNA_P Parameter: Temperature (deg C) Value: 42 vs. 22
  misc_feature: MA Experiment 108577 PARAMETER Experiment Name: At_42deg_Heat_cDNA_P Parameter: Timepoint (hr) Value: 6
  misc_feature: MA Experiment 108577 PARAMETER Experiment Name: At_42deg_Heat_cDNA_P Parameter: Tissue Value: Aerial
  misc_feature: MA Experiment ID: 20000173 Result: Down-regulated in Transcription
  misc_feature: MA Experiment 20000173 PARAMETER Experiment Name: At_42deg_Heat_P Parameter: Age (day) Value: 14
  misc_feature: MA Experiment 20000173 PARAMETER Experiment Name: At_42deg_Heat_P Parameter: Organism Value: A. thaliana
  misc_feature: MA Experiment 20000173 PARAMETER Experiment Name: At_42deg_Heat_P Parameter: Plant Line Value: WS
  misc_feature: MA Experiment 20000173 PARAMETER Experiment Name: At_42deg_Heat_P Parameter: Temperature (deg C) Value: 42 vs. 22
  misc_feature: MA Experiment 20000173 PARAMETER Experiment Name: At_42deg_Heat_P Parameter: Timepoint (hr) Value: 6
  misc_feature: MA Experiment 20000173 PARAMETER Experiment Name: At_42deg_Heat_P Parameter: Tissue Value: Aerial
  misc_feature: MA Experiment ID: 20000180 Result: Down-regulated in Transcription
  misc_feature: MA Experiment 20000180 PARAMETER Experiment Name: At_Germinating_Seeds_P Parameter: Age (hr) Value: 24 vs. 0
  misc_feature: MA Experiment 20000180 PARAMETER Experiment Name: At_Germinating_Seeds_P Parameter: Tissue Value: Germinating Seeds
  misc_feature: MA Experiment ID: 20000182 Result: Down-regulated in Transcription
  misc_feature: MA Experiment 20000182 PARAMETER Experiment Name: At_2mM_SA_P Parameter: Age (day) Value: 14
  misc_feature: MA Experiment 20000182 PARAMETER Experiment Name: At_2mM_SA_P Parameter: Organism Value: A. thaliana
  misc_feature: MA Experiment 20000182 PARAMETER Experiment Name: At_2mM_SA_P Parameter: Plant Line Value: WS
  misc_feature: MA Experiment 20000182 PARAMETER Experiment Name: At_2mM_SA_P Parameter: Timepoint (hr) Value: 6
  misc_feature: MA Experiment 20000182 PARAMETER Experiment Name: At_2mM_SA_P Parameter: Tissue Value: Aerial
  misc_feature: MA Experiment 20000182 PARAMETER Experiment Name: At_2mM_SA_P Parameter: Treatment Value: 2mM SA vs. No Treatment
  misc_feature: MA Experiment ID: 20000185 Result: Down-regulated in Transcription
  misc_feature: MA Experiment 20000185 PARAMETER Experiment Name: At_Roots__P Parameter: Age (day) Value: 7 vs. 21
  misc_feature: MA Experiment 20000185 PARAMETER Experiment Name: At_Roots__P Parameter: Organism Value: A. thaliana
  misc_feature: MA Experiment 20000185 PARAMETER Experiment Name: At_Roots__P Parameter: Tissue Value: Roots vs. Whole Plant
  misc_feature: MA Experiment ID: 20000227 Result: Down-regulated in Transcription
  misc_feature: MA Experiment 20000227 PARAMETER Experiment Name: At_Root-Tips-vs-Tops_P Parameter: Tissue Value: Root Tips vs. Root Tops
  misc_feature: MA Experiment ID: 20000268 Result: Down-regulated in Transcription
  misc_feature: MA Experiment 20000268 PARAMETER Experiment Name: At_100mM_NaCl__P Parameter: Age (day) Value: 14
  misc_feature: MA Experiment 20000268 PARAMETER Experiment Name: At_100mM_NaCl__P Parameter: Organism Value: A. thaliana
  misc_feature: MA Experiment 20000268 PARAMETER Experiment Name: At_100mM_NaCl__P Parameter: Plant Line Value: WS
  misc_feature: MA Experiment 20000268 PARAMETER Experiment Name: At_100mM_NaCl__P Parameter: Timepoint (hr) Value: 6
  misc_feature: MA Experiment 20000268 PARAMETER Experiment Name: At_100mM_NaCl__P Parameter: Tissue Value: Whole Plant
  misc_feature: MA Experiment 20000268 PARAMETER Experiment Name: At_100mM_NaCl__P Parameter: Treatment Value: 100mM NaCl vs. No Treatment
  misc_feature: MA Experiment ID: 20000437 Result: Down-regulated in Transcription
  misc_feature: MA Experiment 20000437 PARAMETER Experiment Name: At_Drought_P Parameter: Age (day) Value: 8
  misc_feature: MA Experiment 20000437 PARAMETER Experiment Name: At_Drought_P Parameter: Organism Value: A. thaliana
  misc_feature: MA Experiment 20000437 PARAMETER Experiment Name: At_Drought_P Parameter: Plant Line Value: WS
  misc_feature: MA Experiment 20000437 PARAMETER Experiment Name: At_Drought_P Parameter: Timepoint (hr) Value: 24
  misc_feature: MA Experiment 20000437 PARAMETER Experiment Name: At_Drought_P Parameter: Tissue Value: Whole Plant
  misc_feature: MA Experiment 20000437 PARAMETER Experiment Name: At_Drought_P Parameter: Treatment Value: Drought vs. No Drought
  misc_feature: MA Experiment ID: 20000438 Result: Down-regulated in Transcription
  misc_feature: MA Experiment 20000438 PARAMETER Experiment Name: At_Shoots__P Parameter: Age (day) Value: 14
  misc_feature: MA Experiment 20000438 PARAMETER Experiment Name: At_Shoots__P Parameter: Tissue Value: Shoots vs. Whole Plant
  misc_feature: MA Experiment ID: 20000439 Result: Down-regulated in Transcription
  misc_feature: MA Experiment 20000439 PARAMETER Experiment Name: At_Roots__P Parameter: Age (day) Value: 14 vs. 21
  misc_feature: MA Experiment 20000439 PARAMETER Experiment Name: At_Roots__P Parameter: Organism Value: A. thaliana
  misc_feature: MA Experiment 20000439 PARAMETER Experiment Name: At_Roots__P Parameter: Tissue Value: Roots vs. Whole Plant
  misc_feature: MA Experiment ID: 20000445 Result: Down-regulated in Transcription
  misc_feature: MA Experiment 20000445 PARAMETER Experiment Name: At_100uM_NAA__P Parameter: Age (day) Value: 14
  misc_feature: MA Experiment 20000445 PARAMETER Experiment Name: At_100uM_NAA__P Parameter: Organism Value: A. thaliana
  misc_feature: MA Experiment 20000445 PARAMETER Experiment Name: At_100uM_NAA__P Parameter: Plant Line Value: WS
  misc_feature: MA Experiment 20000445 PARAMETER Experiment Name: At_100uM_NAA__P Parameter: Timepoint (hr) Value: 6
  misc_feature: MA Experiment 20000445 PARAMETER Experiment Name: At_100uM_NAA__P Parameter: Tissue Value: Aerial
  misc_feature: MA Experiment 20000445 PARAMETER Experiment Name: At_100uM_NAA__P Parameter: Treatment Value: 100uM NAA vs. No Treatment
  misc_feature: MA Experiment ID: 20000606 Result: Up-regulated in Transcription
  misc_feature: MA Experiment 20000606 PARAMETER Experiment Name: At_CS8548_Mutant_P Parameter: Age (day) Value: 14
  misc_feature: MA Experiment 20000606 PARAMETER Experiment Name: At_CS8548_Mutant_P Parameter: Plant Line Value: CS8548 vs. wt
  misc_feature: MA Experiment 20000606 PARAMETER Experiment Name: At_CS8548_Mutant_P Parameter: Tissue Value: Whole Plant
  misc_feature: MA Experiment ID: 20000794 Result: Down-regulated in Transcription
  misc_feature: MA Experiment 20000794 PARAMETER Experiment Name: At_Petals_P Parameter: Age (day) Value: 23-25 days
  misc_feature: MA Experiment 20000794 PARAMETER Experiment Name: At_Petals_P Parameter: Plant Line Value: WS
  misc_feature: MA Experiment 20000794 PARAMETER Experiment Name: At_Petals_P Parameter: Tissue Value: Petals vs. Whole plant
  misc_feature: MA Experiment ID: 20001247 Result: Up-regulated in Transcription
  misc_feature: MA Experiment 20001247 PARAMETER Experiment Name: At_Far-red-induction_P Parameter: Age (day) Value: 7
  misc_feature: MA Experiment 20001247 PARAMETER Experiment Name: At_Far-red-induction_P Parameter: Light Value: Far-red vs. White
  misc_feature: MA Experiment 20001247 PARAMETER Experiment Name: At_Far-red-induction_P Parameter: Organism Value: A. thaliana
  misc_feature: MA Experiment 20001247 PARAMETER Experiment Name: At_Far-red-induction_P Parameter: Plant Line Value: Columbia
  misc_feature: MA Experiment 20001247 PARAMETER Experiment Name: At_Far-red-induction_P Parameter: Timepoint (hr) Value: 1
  misc_feature: MA Experiment 20001247 PARAMETER Experiment Name: At_Far-red-induction_P Parameter: Tissue Value: Whole Plant
  misc_feature: MA Experiment ID: 20001555 Result: Down-regulated in Transcription
  misc_feature: MA Experiment 20001555 PARAMETER Experiment Name: At_Drought_Soil_Dry_P Parameter: Age (day) Value: 24
  misc_feature: MA Experiment 20001555 PARAMETER Experiment Name: At_Drought_Soil_Dry_P Parameter: Organism Value: A. thaliana
  misc_feature: MA Experiment 20001555 PARAMETER Experiment Name: At_Drought_Soil_Dry_P Parameter: Plant Line Value: WS
  misc_feature: MA Experiment 20001555 PARAMETER Experiment Name: At_Drought_Soil_Dry_P Parameter: Post Timepoint (hr) Value: None
  misc_feature: MA Experiment 20001555 PARAMETER Experiment Name: At_Drought_Soil_Dry_P Parameter: Post-Treatment Value: None
  misc_feature: MA Experiment 20001555 PARAMETER Experiment Name: At_Drought_Soil_Dry_P Parameter: Timepoint (day) Value: 10
  misc_feature: MA Experiment 20001555 PARAMETER Experiment Name: At_Drought_Soil_Dry_P Parameter: Treatment Value: Drought vs. No Drought
  misc_feature: MA Experiment ID: 20001556 Result: Down-regulated in Transcription
  misc_feature: MA Experiment 20001556 PARAMETER Experiment Name: At_Drought_Soil_Dry_P Parameter: Age (day) Value: 26
  misc_feature: MA Experiment 20001556 PARAMETER Experiment Name: At_Drought_Soil_Dry_P Parameter: Organism Value: A. thaliana
  misc_feature: MA Experiment 20001556 PARAMETER Experiment Name: At_Drought_Soil_Dry_P Parameter: Plant Line Value: WS
  misc_feature: MA Experiment 20001556 PARAMETER Experiment Name: At_Drought_Soil_Dry_P Parameter: Post Timepoint (hr) Value: None
  misc_feature: MA Experiment 20001556 PARAMETER Experiment Name: At_Drought_Soil_Dry_P Parameter: Post-Treatment Value: None
  misc_feature: MA Experiment 20001556 PARAMETER Experiment Name: At_Drought_Soil_Dry_P Parameter: Timepoint (day) Value: 12
  misc_feature: MA Experiment 20001556 PARAMETER Experiment Name: At_Drought_Soil_Dry_P Parameter: Treatment Value: Drought vs. No Drought
  misc_feature: MA Experiment ID: 20001557 Result: Up-regulated in Transcription
  misc_feature: MA Experiment 20001557 PARAMETER Experiment Name: At_Drought_Soil_Dry_P Parameter: Age (day) Value: 27
  misc_feature: MA Experiment 20001557 PARAMETER Experiment Name: At_Drought_Soil_Dry_P Parameter: Organism Value: A. thaliana
  misc_feature: MA Experiment 20001557 PARAMETER Experiment Name: At_Drought_Soil_Dry_P Parameter: Plant Line Value: WS
  misc_feature: MA Experiment 20001557 PARAMETER Experiment Name: At_Drought_Soil_Dry_P Parameter: Post Timepoint (hr) Value: 3
  misc_feature: MA Experiment 20001557 PARAMETER Experiment Name: At_Drought_Soil_Dry_P Parameter: Post-Treatment Value: Re-Water vs. No Drought
  misc_feature: MA Experiment 20001557 PARAMETER Experiment Name: At_Drought_Soil_Dry_P Parameter: Timepoint (day) Value: 13
  misc_feature: MA Experiment 20001557 PARAMETER Experiment Name: At_Drought_Soil_Dry_P Parameter: Treatment Value: Drought vs. No Drought
  misc_feature: MA Experiment ID: 20001559 Result: Down-regulated in Transcription
  misc_feature: MA Experiment 20001559 PARAMETER Experiment Name: At_Drought_Soil_Dry_P Parameter: Age (day) Value: 28
  misc_feature: MA Experiment 20001559 PARAMETER Experiment Name: At_Drought_Soil_Dry_P Parameter: Organism Value: A. thaliana
  misc_feature: MA Experiment 20001559 PARAMETER Experiment Name: At_Drought_Soil_Dry_P Parameter: Plant Line Value: WS
  misc_feature: MA Experiment 20001559 PARAMETER Experiment Name: At_Drought_Soil_Dry_P Parameter: Post Timepoint (hr) Value: 29
  misc_feature: MA Experiment 20001559 PARAMETER Experiment Name: At_Drought_Soil_Dry_P Parameter: Post-Treatment Value: Re-Water vs. No Drought
  misc_feature: MA Experiment 20001559 PARAMETER Experiment Name: At_Drought_Soil_Dry_P Parameter: Timepoint (day) Value: 14
  misc_feature: MA Experiment 20001559 PARAMETER Experiment Name: At_Drought_Soil_Dry_P Parameter: Treatment Value: Drought vs. No Drought
  misc_feature: MA Experiment ID: 20001757 Result: Up-regulated in Transcription
  misc_feature: MA Experiment 20001757 PARAMETER Experiment Name: At_50mM_NH4NO3_L-to-H_P Parameter: Timepoint (hr) Value: 6
  misc_feature: MA Experiment 20001757 PARAMETER Experiment Name: At_50mM_NH4NO3_L-to-H_P Parameter: Tissue Value: Leaf
  misc_feature: MA Experiment 20001757 PARAMETER Experiment Name: At_50mM_NH4NO3_L-to-H_P Parameter: Treatment Value: 50mM NH4NO3 vs 100mM Mannitol
  misc_feature: MA Experiment ID: 20001904 Result: Down-regulated in Transcription
  misc_feature: MA Experiment 20001904 PARAMETER Experiment Name: At_Drought_Reproduction_P Parameter: Age (day) Value: 37
  misc_feature: MA Experiment 20001904 PARAMETER Experiment Name: At_Drought_Reproduction_P Parameter: Organism Value: A. thaliana
  misc_feature: MA Experiment 20001904 PARAMETER Experiment Name: At_Drought_Reproduction_P Parameter: Plant Line Value: WS
  misc_feature: MA Experiment 20001904 PARAMETER Experiment Name: At_Drought_Reproduction_P Parameter: Timepoint (day) Value: 7
  misc_feature: MA Experiment 20001904 PARAMETER Experiment Name: At_Drought_Reproduction_P Parameter: Tissue Value: Rosettes
  misc_feature: MA Experiment 20001904 PARAMETER Experiment Name: At_Drought_Reproduction_P Parameter: Treatment Value: Drought vs. No Drought
  misc_feature: MA Experiment ID: 20001905 Result: Down-regulated in Transcription
  misc_feature: MA Experiment 20001905 PARAMETER Experiment Name: At_Drought_Reproduction_P Parameter: Age (day) Value: 40
  misc_feature: MA Experiment 20001905 PARAMETER Experiment Name: At_Drought_Reproduction_P Parameter: Organism Value: A. thaliana
  misc_feature: MA Experiment 20001905 PARAMETER Experiment Name: At_Drought_Reproduction_P Parameter: Plant Line Value: WS
  misc_feature: MA Experiment 20001905 PARAMETER Experiment Name: At_Drought_Reproduction_P Parameter: Timepoint (day) Value: 10
  misc_feature: MA Experiment 20001905 PARAMETER Experiment Name: At_Drought_Reproduction_P Parameter: Tissue Value: Rosettes
  misc_feature: MA Experiment 20001905 PARAMETER Experiment Name: At_Drought_Reproduction_P Parameter: Treatment Value: Drought vs. No Drought
  misc_feature: MA Experiment ID: 20001906 Result: Down-regulated in Transcription
  misc_feature: MA Experiment 20001906 PARAMETER Experiment Name: At_Drought_Reproduction_P Parameter: Age (day) Value: 35
  misc_feature: MA Experiment 20001906 PARAMETER Experiment Name: At_Drought_Reproduction_P Parameter: Organism Value: A. thaliana
  misc_feature: MA Experiment 20001906 PARAMETER Experiment Name: At_Drought_Reproduction_P Parameter: Plant Line Value: WS
  misc_feature: MA Experiment 20001906 PARAMETER Experiment Name: At_Drought_Reproduction_P Parameter: Timepoint (day) Value: 5
  misc_feature: MA Experiment 20001906 PARAMETER Experiment Name: At_Drought_Reproduction_P Parameter: Tissue Value: Siliques
  misc_feature: MA Experiment 20001906 PARAMETER Experiment Name: At_Drought_Reproduction_P Parameter: Treatment Value: Drought vs. No Drought
  misc_feature: MA Experiment ID: 20001908 Result: Down-regulated in Transcription
  misc_feature: MA Experiment 20001908 PARAMETER Experiment Name: At_Drought_Reproduction_P Parameter: Age (day) Value: 40
  misc_feature: MA Experiment 20001908 PARAMETER Experiment Name: At_Drought_Reproduction_P Parameter: Organism Value: A. thaliana
  misc_feature: MA Experiment 20001908 PARAMETER Experiment Name: At_Drought_Reproduction_P Parameter: Plant Line Value: WS
  misc_feature: MA Experiment 20001908 PARAMETER Experiment Name: At_Drought_Reproduction_P Parameter: Timepoint (day) Value: 10
  misc_feature: MA Experiment 20001908 PARAMETER Experiment Name: At_Drought_Reproduction_P Parameter: Tissue Value: Siliques
  misc_feature: MA Experiment 20001908 PARAMETER Experiment Name: At_Drought_Reproduction_P Parameter: Treatment Value: Drought vs. No Drought
  misc_feature: MA Experiment ID: 20001911 Result: Down-regulated in Transcription
  misc_feature: MA Experiment 20001911 PARAMETER Experiment Name: At_Drought_Reproduction_P Parameter: Age (day) Value: 40
  misc_feature: MA Experiment 20001911 PARAMETER Experiment Name: At_Drought_Reproduction_P Parameter: Organism Value: A. thaliana
  misc_feature: MA Experiment 20001911 PARAMETER Experiment Name: At_Drought_Reproduction_P Parameter: Plant Line Value: WS
  misc_feature: MA Experiment 20001911 PARAMETER Experiment Name: At_Drought_Reproduction_P Parameter: Timepoint (day) Value: 10
  misc_feature: MA Experiment 20001911 PARAMETER Experiment Name: At_Drought_Reproduction_P Parameter: Tissue Value: Flowers
  misc_feature: MA Experiment 20001911 PARAMETER Experiment Name: At_Drought_Reproduction_P Parameter: Treatment Value: Drought vs. No Drought
cttcagacaagtcggtccactaattcaaattttctccattctctcgttccaattattatttacttttttcacccaataaaaaaaaaaccatgcattcacttccggtgaatctcgtcctcaccgtacttacggtgttcctaacatcaccggcgcaagttatcggataccgtccatatccaccaaaaaccaacggctccgatcaaatcttcgacgcttcaaaaaaattcgaaggctcatcgaatctcgtccgcctccgttaccacatgggtccagtcttaaccaacaacatcaccgttcacccaatctggtacggcacgtggcaaaaatcccagaagaaaatcatccgtgagttcattaactcaatctcagccgttggatctaaacacccttcagtctccggttggtggaaaaccgtacagctttacactgaccaaactggatctaacattaccggtacggttcgtctcggtgaagagaaaaacgaccggttttattctcatggtaaatcacttacccggttatcgattcaatccgtgataaaatccgccgtcacttctaggtctcgcccgttgccggttaatcccaaaagcggtttatatcttctcctcaccgccgatgatgtctacgtgcaagatttttgcggccaggtttgtggatttcactatttcacgtttccgtcgattgttggattcacgttaccgtacgcttgggttggaaactcggcgaagctttgtcccggagtttgtgcttatccgttcgccgtaccggcgtttataccgggattaaaaccggttaaatcgcctaacggagatgttggagtagatgggatgataagtgtgatagctcacgagattgctgagctggcgacgaatccgttggttaatgcttggtacgcaggacccgacccggtagctccggttgagatagcggatctttgtgagggtatttatggaacaggaggtggtggttcgtacacaggacagatgttgaacgatcatagtggtgccacgtataatgttaatgggatccgacggcggtatttgatccagtggttatggagccacgttgttagttactgtaccggacccaatgcgcttgattagtgaatgaatggtatggtttgtgtttaaatttgggaagggtaattttgtcttttggaatttgagctcgacattgtggaattattatgatcaagaatgggtttgttgtgtcgatgcataattaaaattagttaatgatagttatgaggaaagtcacgtatgttgcttatc

SEQ ID NO: 101896 - protein, 337 aa, Arabidopsis thaliana; identical to SEQ ID NO: 22402
  peptide (1)..(337): Ceres Seq. ID no. 13608954
  misc_feature (55)..(334): Pfam Name: Phosphate-induced protein 1 conserved region Pfam Description: Phosphate-induced protein 1 conserved region
  misc_feature (1)..(337): Homolog of NCBI NO: 15242118 NR Description: expressed protein [Arabidopsis thaliana] gb|AAD25141.1~gene_id:K17N15.10~similar to unknown protein thaliana] >gi|16226762|gb|AAL16255.1|AF428325_1
  misc_feature (1)..(337): Homolog of NCBI NO: 16604527 NR Description: AT5g51550/K17N15_10 [Arabidopsis thaliana]
  misc_feature (1)..(337): Homolog of NCBI NO: 21592873 NR Description: unknown [Arabidopsis thaliana]
  misc_feature (10)..(337): Homolog of NCBI NO: 11875173 NR Description: contains ESTs
  misc_feature (1)..(337): Homolog of NCBI NO: 18398352 NR Description: expressed protein [Arabidopsis thaliana]
  misc_feature (1)..(337): Homolog of NCBI NO: 21594010 NR Description: unknown [Arabidopsis thaliana]
  misc_feature (33)..(337): Homolog of NCBI NO: 18403760 NR Description: expressed protein [Arabidopsis thaliana] Expressed protein [Arabidopsis thaliana] unknown protein [Arabidopsis thaliana]
  misc_feature (33)..(337): Homolog of NCBI NO: 25408357 NR Description: hypothetical protein At2g35150 [imported] -
  misc_feature (33)..(335): Homolog of NCBI NO: 34901824 NR Description: putative phi-1(phosphate-induced protein 1)
  misc_feature (56)..(331): Homolog of NCBI NO: 15219504 NR Description: phosphate-induced (phi-1) protein -related

SEQ ID NO: 101897 - protein, 279 aa, Arabidopsis thaliana; identical to SEQ ID NO: 22403
  peptide (1)..(279): Ceres Seq. ID no. 13608955
  misc_feature (1)..(276): Pfam Name: Phosphate-induced protein 1 conserved region Pfam Description: Phosphate-induced protein 1 conserved region
  misc_feature (1)..(279): Homolog of NCBI NO: 15242118 NR Description: expressed protein [Arabidopsis thaliana] gb|AAD25141.1~gene_id:K17N15.10~similar to unknown protein thaliana] >gi|16226762|gb|AAL16255.1|AF428325_1
  misc_feature (1)..(279): Homolog of NCBI NO: 16604527 NR Description: AT5g51550/K17N15_10 [Arabidopsis thaliana]
  misc_feature (1)..(279): Homolog of NCBI NO: 21592873 NR Description: unknown [Arabidopsis thaliana]
  misc_feature (1)..(279): Homolog of NCBI NO: 11875173 NR Description: contains ESTs
  misc_feature (1)..(279): Homolog of NCBI NO: 18398352 NR Description: expressed protein [Arabidopsis thaliana]
  misc_feature (1)..(279): Homolog of NCBI NO: 21594010 NR Description: unknown [Arabidopsis thaliana]
  misc_feature (1)..(279): Homolog of NCBI NO: 18403760 NR Description: expressed protein [Arabidopsis thaliana] Expressed protein [Arabidopsis thaliana] unknown protein [Arabidopsis thaliana]
  misc_feature (1)..(279): Homolog of NCBI NO: 25408357 NR Description: hypothetical protein At2g35150 [imported] -
  misc_feature (1)..(277): Homolog of NCBI NO: 34901824 NR Description: putative phi-1(phosphate-induced protein 1)
  misc_feature (1)..(273): Homolog of NCBI NO: 15219504 NR Description: phosphate-induced (phi-1) protein -related

SEQ ID NO: 101898 - DNA, 774 bp, Arabidopsis thaliana
  misc_feature (1)..(774): Ceres Seq. ID no. 13608976
  misc_feature: MA Experiment ID: 108434 Result: Down-regulated in Transcription
  misc_feature: MA Experiment 108434 PARAMETER Experiment Name: At_Root_Tips_cDNA_P Parameter: Tissue Value: Root Tips
  misc_feature: MA Experiment ID: 108462 Result: Up-regulated in Transcription
  misc_feature: MA Experiment 108462 PARAMETER Experiment Name: At_Germinating_Seeds_cDNA_P Parameter: Age (day) Value: 2 vs. 0
  misc_feature: MA Experiment 108462 PARAMETER Experiment Name: At_Germinating_Seeds_cDNA_P Parameter: Tissue Value: Germinating Seeds
  misc_feature: MA Experiment ID: 108464 Result: Up-regulated in Transcription
  misc_feature: MA Experiment 108464 PARAMETER Experiment Name: At_Germinating_Seeds_cDNA_P Parameter: Age (day) Value: 4 vs. 0
  misc_feature: MA Experiment 108464 PARAMETER Experiment Name: At_Germinating_Seeds_cDNA_P Parameter: Tissue Value: Germinating Seeds
  misc_feature: MA Experiment ID: 108488 Result: Down-regulated in Transcription
  misc_feature: MA Experiment ID: 108561 Result: Up-regulated in Transcription
  misc_feature: MA Experiment 108561 PARAMETER Experiment Name: At_100uM_ABA_cDNA_P Parameter: Timepoint (hr) Value: 6
  misc_feature: MA Experiment 108561 PARAMETER Experiment Name: At_100uM_ABA_cDNA_P Parameter: Tissue Value: Aerial
  misc_feature: MA Experiment 108561 PARAMETER Experiment Name: At_100uM_ABA_cDNA_P Parameter: Treatment Value: 100uM ABA vs. No Treatment
  misc_feature: MA Experiment ID: 108573 Result: Up-regulated in Transcription
  misc_feature: MA Experiment 108573 PARAMETER Experiment Name: At_Drought_cDNA_P Parameter: Timepoint (hr) Value: 6
  misc_feature: MA Experiment 108573 PARAMETER Experiment Name: At_Drought_cDNA_P Parameter: Tissue Value: Aerial
  misc_feature: MA Experiment 108573 PARAMETER Experiment Name: At_Drought_cDNA_P Parameter: Treatment Value: Drought vs. No Drought
  misc_feature: MA Experiment ID: 108585 Result: Up-regulated in Transcription
  misc_feature: MA Experiment 108585 PARAMETER Experiment Name: At_5mM_NaNP_cDNA_P Parameter: Timepoint (hr) Value: 6
  misc_feature: MA Experiment 108585 PARAMETER Experiment Name: At_5mM_NaNP_cDNA_P Parameter: Tissue Value: Aerial
  misc_feature: MA Experiment 108585 PARAMETER Experiment Name: At_5mM_NaNP_cDNA_P Parameter: Treatment Value: null
  misc_feature: MA Experiment ID: 108594 Result: Down-regulated in Transcription
  misc_feature: MA Experiment 108594 PARAMETER Experiment Name: At_Ler-rhl_Root_cDNA_P Parameter: Plant Line Value: null
  misc_feature: MA Experiment ID: 108595 Result: Down-regulated in Transcription
  misc_feature: MA Experiment 108595 PARAMETER Experiment Name: At_Ler-pi_Ovule_cDNA_P Parameter: Plant Line Value: null
  misc_feature: MA Experiment ID: 108605 Result: Up-regulated in Transcription
  misc_feature: MA Experiment 108605 PARAMETER Experiment Name: At_100uM_ABA_cDNA_P Parameter: Timepoint (hr) Value: 6
  misc_feature: MA Experiment 108605 PARAMETER Experiment Name: At_100uM_ABA_cDNA_P Parameter: Tissue Value: Aerial
  misc_feature: MA Experiment 108605 PARAMETER Experiment Name: At_100uM_ABA_cDNA_P Parameter: Treatment Value: 100uM ABA vs. No Treatment
  misc_feature: MA Experiment ID: 108607 Result: Up-regulated in Transcription
  misc_feature: MA Experiment 108607 PARAMETER Experiment Name: At_100uM_ABA_cDNA_P Parameter: Timepoint (hr) Value: 4
  misc_feature: MA Experiment 108607 PARAMETER Experiment Name: At_100uM_ABA_cDNA_P Parameter: Tissue Value: Aerial
  misc_feature: MA Experiment 108607 PARAMETER Experiment Name: At_100uM_ABA_cDNA_P Parameter: Treatment Value: 100uM ABA vs. No Treatment
  misc_feature: MA Experiment ID: 108668 Result: Up-regulated in Transcription
  misc_feature: MA Experiment 108668 PARAMETER Experiment Name: At_2mM_SA_cDNA_P Parameter: Plant Line Value: WS
  misc_feature: MA Experiment 108668 PARAMETER Experiment Name: At_2mM_SA_cDNA_P Parameter: Timepoint (hr) Value: 6
  misc_feature: MA Experiment 108668 PARAMETER Experiment Name: At_2mM_SA_cDNA_P Parameter: Treatment Value: 2mM SA vs. No Treatment
  misc_feature: MA Experiment ID: 20000070 Result: Up-regulated in Transcription
  misc_feature: MA Experiment 20000070 PARAMETER Experiment Name: At_100uM_ABA_Mutants_cDNA_P Parameter: Plant Line Value: CS24
  misc_feature: MA Experiment 20000070 PARAMETER Experiment Name: At_100uM_ABA_Mutants_cDNA_P Parameter: Timepoint (hr) Value: 6
  misc_feature: MA Experiment 20000070 PARAMETER Experiment Name: At_100uM_ABA_Mutants_cDNA_P Parameter: Tissue Value: Aerial
  misc_feature: MA Experiment 20000070 PARAMETER Experiment Name: At_100uM_ABA_Mutants_cDNA_P Parameter: Treatment Value: 100uM ABA vs. No Treatment
  misc_feature: MA Experiment ID: 20000071 Result: Up-regulated in Transcription
  misc_feature: MA Experiment 20000071 PARAMETER Experiment Name: At_100uM_ABA_Mutants_cDNA_P Parameter: Plant Line Value: CS8104
  misc_feature: MA Experiment 20000071 PARAMETER Experiment Name: At_100uM_ABA_Mutants_cDNA_P Parameter: Timepoint (hr) Value: 6
  misc_feature: MA Experiment 20000071 PARAMETER Experiment Name: At_100uM_ABA_Mutants_cDNA_P Parameter: Tissue Value: Aerial
  misc_feature: MA Experiment 20000071 PARAMETER Experiment Name: At_100uM_ABA_Mutants_cDNA_P Parameter: Treatment Value: 100uM ABA vs. No Treatment
  misc_feature: MA Experiment ID: 20000072 Result: Up-regulated in Transcription
  misc_feature: MA Experiment 20000072 PARAMETER Experiment Name: At_100uM_ABA_Mutants_cDNA_P Parameter: Plant Line Value: CS8105
  misc_feature: MA Experiment 20000072 PARAMETER Experiment Name: At_100uM_ABA_Mutants_cDNA_P Parameter: Timepoint (hr) Value: 6
  misc_feature: MA Experiment 20000072 PARAMETER Experiment Name: At_100uM_ABA_Mutants_cDNA_P Parameter: Tissue Value: Aerial
  misc_feature: MA Experiment 20000072 PARAMETER Experiment Name: At_100uM_ABA_Mutants_cDNA_P Parameter: Treatment Value: 100uM ABA vs. No Treatment
  misc_feature: MA Experiment ID: 20000117 Result: Up-regulated in Transcription
  misc_feature: MA Experiment 20000117 PARAMETER Experiment Name: At_100uM_ABA_Mutants_cDNA_P Parameter: Plant Line Value: Columbia
  misc_feature: MA Experiment 20000117 PARAMETER Experiment Name: At_100uM_ABA_Mutants_cDNA_P Parameter: Timepoint (hr) Value: 6
  misc_feature: MA Experiment 20000117 PARAMETER Experiment Name: At_100uM_ABA_Mutants_cDNA_P Parameter: Tissue Value: Aerial
  misc_feature: MA Experiment 20000117 PARAMETER Experiment Name: At_100uM_ABA_Mutants_cDNA_P Parameter: Treatment Value: 100uM ABA vs. No Treatment
  misc_feature: MA Experiment ID: 20000169 Result: Up-regulated in Transcription
  misc_feature: MA Experiment 20000169 PARAMETER Experiment Name: At_100uM_ABA_P Parameter: Age (day) Value: 14
  misc_feature: MA Experiment 20000169 PARAMETER Experiment Name: At_100uM_ABA_P Parameter: Organism Value: A. thaliana
  misc_feature: MA Experiment 20000169 PARAMETER Experiment Name: At_100uM_ABA_P Parameter: Plant Line Value: WS
  misc_feature: MA Experiment 20000169 PARAMETER Experiment Name: At_100uM_ABA_P Parameter: Timepoint (hr) Value: 6
  misc_feature: MA Experiment 20000169 PARAMETER Experiment Name: At_100uM_ABA_P Parameter: Tissue Value: Aerial
  misc_feature: MA Experiment 20000169 PARAMETER Experiment Name: At_100uM_ABA_P Parameter: Treatment Value: 100uM ABA vs. No Treatment
  misc_feature: MA Experiment ID: 20000180 Result: Up-regulated in Transcription
  misc_feature: MA Experiment 20000180 PARAMETER Experiment Name: At_Germinating_Seeds_P Parameter: Age (hr) Value: 24 vs. 0
  misc_feature: MA Experiment 20000180 PARAMETER Experiment Name: At_Germinating_Seeds_P Parameter: Tissue Value: Germinating Seeds
  misc_feature: MA Experiment ID: 20000182 Result: Up-regulated in Transcription
  misc_feature: MA Experiment 20000182 PARAMETER Experiment Name: At_2mM_SA_P Parameter: Age (day) Value: 14
  misc_feature: MA Experiment 20000182 PARAMETER Experiment Name: At_2mM_SA_P Parameter: Organism Value: A. thaliana
  misc_feature: MA Experiment 20000182 PARAMETER Experiment Name: At_2mM_SA_P Parameter: Plant Line Value: WS
  misc_feature: MA Experiment 20000182 PARAMETER Experiment Name: At_2mM_SA_P Parameter: Timepoint (hr) Value: 6
  misc_feature: MA Experiment 20000182 PARAMETER Experiment Name: At_2mM_SA_P Parameter: Tissue Value: Aerial
  misc_feature: MA Experiment 20000182 PARAMETER Experiment Name: At_2mM_SA_P Parameter: Treatment Value: 2mM SA vs. No Treatment
  misc_feature: MA Experiment ID: 20000185 Result: Up-regulated in Transcription
  misc_feature: MA Experiment 20000185 PARAMETER Experiment Name: At_Roots__P Parameter: Age (day) Value: 7 vs. 21
  misc_feature: MA Experiment 20000185 PARAMETER Experiment Name: At_Roots__P Parameter: Organism Value: A. thaliana
  misc_feature: MA Experiment 20000185 PARAMETER Experiment Name: At_Roots__P Parameter: Tissue Value: Roots vs. Whole Plant
  misc_feature: MA Experiment ID: 20000437 Result: Up-regulated in Transcription
  misc_feature: MA Experiment 20000437 PARAMETER Experiment Name: At_Drought_P Parameter: Age (day) Value: 8
  misc_feature: MA Experiment 20000437 PARAMETER Experiment Name: At_Drought_P Parameter: Organism Value: A. thaliana
  misc_feature: MA Experiment 20000437 PARAMETER Experiment Name: At_Drought_P Parameter: Plant Line Value: WS
  misc_feature: MA Experiment 20000437 PARAMETER Experiment Name: At_Drought_P Parameter: Timepoint (hr) Value: 24
  misc_feature: MA Experiment 20000437 PARAMETER Experiment Name: At_Drought_P Parameter: Tissue Value: Whole Plant
  misc_feature: MA Experiment 20000437 PARAMETER Experiment Name: At_Drought_P Parameter: Treatment Value: Drought vs. No Drought
  misc_feature: MA Experiment ID: 20000439 Result: Up-regulated in Transcription
  misc_feature: MA Experiment 20000439 PARAMETER Experiment Name: At_Roots__P Parameter: Age (day) Value: 14 vs. 21
  misc_feature: MA Experiment 20000439 PARAMETER Experiment Name: At_Roots__P Parameter: Organism Value: A. thaliana
  misc_feature: MA Experiment 20000439 PARAMETER Experiment Name: At_Roots__P Parameter: Tissue Value: Roots vs. Whole Plant
  misc_feature: MA Experiment ID: 20000794 Result: Up-regulated in Transcription
  misc_feature: MA Experiment 20000794 PARAMETER Experiment Name: At_Petals_P Parameter: Age (day) Value: 23-25 days
  misc_feature: MA Experiment 20000794 PARAMETER Experiment Name: At_Petals_P Parameter: Plant Line Value: WS
  misc_feature: MA Experiment 20000794 PARAMETER Experiment Name: At_Petals_P Parameter: Tissue Value: Petals vs. Whole plant
  misc_feature: MA Experiment ID: 20001905 Result: Up-regulated in Transcription
  misc_feature: MA Experiment 20001905 PARAMETER Experiment Name: At_Drought_Reproduction_P Parameter: Age (day) Value: 40
  misc_feature: MA Experiment 20001905 PARAMETER Experiment Name: At_Drought_Reproduction_P Parameter: Organism Value: A. thaliana
  misc_feature: MA Experiment 20001905 PARAMETER Experiment Name: At_Drought_Reproduction_P Parameter: Plant Line Value: WS
  misc_feature: MA Experiment 20001905 PARAMETER Experiment Name: At_Drought_Reproduction_P Parameter: Timepoint (day) Value: 10
  misc_feature: MA Experiment 20001905 PARAMETER Experiment Name: At_Drought_Reproduction_P Parameter: Tissue Value: Rosettes
  misc_feature: MA Experiment 20001905 PARAMETER Experiment Name: At_Drought_Reproduction_P Parameter: Treatment Value: Drought vs. No Drought
aaccatatatatacacacaaaatatttgttaacaaaaagatttatatttcttctcttctttgttcataactaagaactcagaaagagaccaacgacactgcaaatggcggatgaatctccaaagtctatctacgacttcaccgtcaaggatatcggaggtaacgatgtgagtttggaccaatacaaaggcaaaactcttttggttgtaaacgttgcttccaaatgtggtctgacggatgcgaactacaaggaactgaatgttctgtacgagaaatacaaggagcaagggttggagatattagcattcccgtgtaatcagttcttaggacaagaaccaggaaacaatgaagagattcaacaaactgtctgcaccaggttcaaagctgaattccccatctttgacaaggtggatgtgaacggtaagaacacggcaccattatacaagtacttgaaagcagagaaaggaggtttgctcattgatgctatcaaatggaacttcaccaaattcttggtttctcctgatggcaaggtcttacagagatattctcccagaacctctcctcttcaattcgagaaggacattcaaactgcgttgggacaggcctcttcttaatcaccagaagaagaagtttcaagaactttcgtttggtccaaattatgatcttagaatcatcaacattgcaaacttattttctttgaattctatcattcttgttttaaataattgatgtattcgatgtcttttcatgggatgatatatcatatattatcatg

SEQ ID NO: 101899 - protein, 169 aa, Arabidopsis thaliana; identical to SEQ ID NO: 35932
  peptide (1)..(169): Ceres Seq. ID no. 13608977
  misc_feature (8)..(117): Pfam Name: Glutathione peroxidase Pfam Description: Glutathione peroxidase
  misc_feature (1)..(169): Homolog of NCBI NO: 15225103 NR Description: glutathione peroxidase, putative [Arabidopsis >gi|20138142|sp|O04922|GSHX_ARATH Probable glutathione peroxidase >gi|25285635|pir||D84722 probable glutathione peroxidase
  misc_feature (1)..(167): Homolog of NCBI NO: 17646156 NR Description: phospholipid hydroperoxide glutathione peroxidase
  misc_feature (1)..(161): Homolog of NCBI NO: 21068666 NR Description: putative phospholipid hydroperoxide glutathione
  misc_feature (7)..(164): Homolog of NCBI NO: 22329066 NR Description: glutathione peroxidase, putative [Arabidopsis
  misc_feature (2)..(167): Homolog of NCBI NO: 21360380 NR Description: glutathione peroxidase 1 [Oryza sativa]
  misc_feature (1)..(165): Homolog of NCBI NO: 20138384 NR Description: Probable phospholipid hydroperoxide glutathione (PHGPx) >gi|8919668|emb|CAB96145.1| phospholipid hydroperoxide
  misc_feature (1)..(167): Homolog of NCBI NO: 232190 NR Description: Probable phospholipid hydroperoxide glutathione (PHGPx) (6P229) >gi|100291|pir||S20501 probable glutathione
  misc_feature (1)..(167): Homolog of NCBI NO: 20138338 NR Description: Probable phospholipid hydroperoxide glutathione
  misc_feature (1)..(167): Homolog of NCBI NO: 485512 NR Description: glutathione peroxidase (EC 1.11.1.9) - sweet
  misc_feature (1)..(167): Homolog of NCBI NO: 544437 NR Description: Probable phospholipid hydroperoxide glutathione

SEQ ID NO: 101900 - DNA, 1839 bp, Arabidopsis thaliana
  misc_feature (1)..(1839): Ceres Seq. ID no. 13608997
  misc_feature: MA Experiment ID: 20000185 Result: Down-regulated in Transcription
  misc_feature: MA Experiment 20000185 PARAMETER Experiment Name: At_Roots__P Parameter: Age (day) Value: 7 vs. 21
  misc_feature: MA Experiment 20000185 PARAMETER Experiment Name: At_Roots__P Parameter: Organism Value: A. thaliana
  misc_feature: MA Experiment 20000185 PARAMETER Experiment Name: At_Roots__P Parameter: Tissue Value: Roots vs. Whole Plant
  misc_feature: MA Experiment ID: 20000227 Result: Down-regulated in Transcription
  misc_feature: MA Experiment 20000227 PARAMETER Experiment Name: At_Root-Tips-vs-Tops_P Parameter: Tissue Value: Root Tips vs. Root Tops
  misc_feature: MA Experiment ID: 20000234 Result: Up-regulated in Transcription
  misc_feature: MA Experiment 20000234 PARAMETER Experiment Name: At_Siliques_P Parameter: Age (day) Value: 21
  misc_feature: MA Experiment 20000234 PARAMETER Experiment Name: At_Siliques_P Parameter: Organism Value: A. thaliana
  misc_feature: MA Experiment 20000234 PARAMETER Experiment Name: At_Siliques_P Parameter: Plant Line Value: WS
  misc_feature: MA Experiment 20000234 PARAMETER Experiment Name: At_Siliques_P Parameter: Tissue Value: Less Than 5mm Siliques vs. Whole Plant
  misc_feature: MA Experiment ID: 20000495 Result: Up-regulated in Transcription
  misc_feature: MA Experiment 20000495 PARAMETER Experiment Name: At_Guard_Cells_P Parameter: Harvest Date Value: 8/2/2002
  misc_feature: MA Experiment 20000495 PARAMETER Experiment Name: At_Guard_Cells_P Parameter: Organism Value: A. thaliana
  misc_feature: MA Experiment 20000495 PARAMETER Experiment Name: At_Guard_Cells_P Parameter: Tissue Value: Guard Cells vs. Leaves
  misc_feature: MA Experiment ID: 20001248 Result: Down-regulated in Transcription
  misc_feature: MA Experiment 20001248 PARAMETER Experiment Name: At_Far-red-induction_P Parameter: Age (day) Value: 7
  misc_feature: MA Experiment 20001248 PARAMETER Experiment Name: At_Far-red-induction_P Parameter: Light Value: Far-red vs. White
  misc_feature: MA Experiment 20001248 PARAMETER Experiment Name: At_Far-red-induction_P Parameter: Organism Value: A. thaliana
  misc_feature: MA Experiment 20001248 PARAMETER Experiment Name: At_Far-red-induction_P Parameter: Plant Line Value: Columbia
  misc_feature: MA Experiment 20001248 PARAMETER Experiment Name: At_Far-red-induction_P Parameter: Timepoint (hr) Value: 4
  misc_feature: MA Experiment 20001248 PARAMETER Experiment Name: At_Far-red-induction_P Parameter: Tissue Value: Whole Plant
  misc_feature: MA Experiment ID: 20001451 Result: Down-regulated in Transcription
  misc_feature: MA Experiment 20001451 PARAMETER Experiment Name: At_Far-red-induction_P Parameter: Age (day) Value: 7
  misc_feature: MA Experiment 20001451 PARAMETER Experiment Name: At_Far-red-induction_P Parameter: Light Value: Far-red vs. White
  misc_feature: MA Experiment 20001451 PARAMETER Experiment Name: At_Far-red-induction_P Parameter: Organism Value: A. thaliana
  misc_feature: MA Experiment 20001451 PARAMETER Experiment Name: At_Far-red-induction_P Parameter: Plant Line Value: Columbia
  misc_feature: MA Experiment 20001451 PARAMETER Experiment Name: At_Far-red-induction_P Parameter: Timepoint (hr) Value: 24
  misc_feature: MA Experiment 20001451 PARAMETER Experiment Name: At_Far-red-induction_P Parameter: Tissue Value: Whole Plant
  misc_feature: MA Experiment ID: 20001557 Result: Up-regulated in Transcription
  misc_feature: MA Experiment 20001557 PARAMETER Experiment Name: At_Drought_Soil_Dry_P Parameter: Age (day) Value: 27
  misc_feature: MA Experiment 20001557 PARAMETER Experiment Name: At_Drought_Soil_Dry_P Parameter: Organism Value: A. thaliana
  misc_feature: MA Experiment 20001557 PARAMETER Experiment Name: At_Drought_Soil_Dry_P Parameter: Plant Line Value: WS
  misc_feature: MA Experiment 20001557 PARAMETER Experiment Name: At_Drought_Soil_Dry_P Parameter: Post Timepoint (hr) Value: 3
  misc_feature: MA Experiment 20001557 PARAMETER Experiment Name: At_Drought_Soil_Dry_P Parameter: Post-Treatment Value: Re-Water vs. No Drought
  misc_feature: MA Experiment 20001557 PARAMETER Experiment Name: At_Drought_Soil_Dry_P Parameter: Timepoint (day) Value: 13
  misc_feature: MA Experiment 20001557 PARAMETER Experiment Name: At_Drought_Soil_Dry_P Parameter: Treatment Value: Drought vs. No Drought
  misc_feature: MA Experiment ID: 20001558 Result: Up-regulated in Transcription
  misc_feature: MA Experiment 20001558 PARAMETER Experiment Name: At_Drought_Soil_Dry_P Parameter: Age (day) Value: 27
  misc_feature: MA Experiment 20001558 PARAMETER Experiment Name: At_Drought_Soil_Dry_P Parameter: Organism Value: A. thaliana
  misc_feature: MA Experiment 20001558 PARAMETER Experiment Name: At_Drought_Soil_Dry_P Parameter: Plant Line Value: WS
  misc_feature: MA Experiment 20001558 PARAMETER Experiment Name: At_Drought_Soil_Dry_P Parameter: Post Timepoint (hr) Value: 6
  misc_feature: MA Experiment 20001558 PARAMETER Experiment Name: At_Drought_Soil_Dry_P Parameter: Post-Treatment Value: Re-Water vs. No Drought
  misc_feature: MA Experiment 20001558 PARAMETER Experiment Name: At_Drought_Soil_Dry_P Parameter: Timepoint (day) Value: 13
  misc_feature: MA Experiment 20001558 PARAMETER Experiment Name: At_Drought_Soil_Dry_P Parameter: Treatment Value: Drought vs. No Drought
  misc_feature: MA Experiment ID: 20001559 Result: Up-regulated in Transcription
  misc_feature: MA Experiment 20001559 PARAMETER Experiment Name: At_Drought_Soil_Dry_P Parameter: Age (day) Value: 28
  misc_feature: MA Experiment 20001559 PARAMETER Experiment Name: At_Drought_Soil_Dry_P Parameter: Organism Value: A. thaliana
  misc_feature: MA Experiment 20001559 PARAMETER Experiment Name: At_Drought_Soil_Dry_P Parameter: Plant Line Value: WS
  misc_feature: MA Experiment 20001559 PARAMETER Experiment Name: At_Drought_Soil_Dry_P Parameter: Post Timepoint (hr) Value: 29
  misc_feature: MA Experiment 20001559 PARAMETER Experiment Name: At_Drought_Soil_Dry_P Parameter: Post-Treatment Value: Re-Water vs. No Drought
  misc_feature: MA Experiment 20001559 PARAMETER Experiment Name: At_Drought_Soil_Dry_P Parameter: Timepoint (day) Value: 14
  misc_feature: MA Experiment 20001559 PARAMETER Experiment Name: At_Drought_Soil_Dry_P Parameter: Treatment Value: Drought vs. No Drought
agatctaaaaaaatccacaattttgttcaaatcttggagttaaatgctgaattttaggccttgttgcttagatttatggcttaaagtttcaaacttttcattggatatggtacaaatcttgtagttaaacactgaattgtgtccctcgtgggcgttgttgctttgatttatggccaaaagtttcaaacttggatatggtacaatcttgtagttatacactgcattgtctctcttgggtgttgttgttgctttgatttatggcttaaagtttcaaactttttcttggagatggttcaatcttgttgttgaaagttgaaacactgaattgtctctcttgtgcgtgttgttgcttagatttatggctaaaagtttcaaactttcttcacttcagagcttcttgaatggaaactatggttttgtggttttggttaatcttctgctaacactttttgccctgttttggtttgggaaagtgagaagaaaatgtcaggatctgagacgggtttaatggcggcgaccagagaatcaatgcaatttacaatggctctccaccagcagcagcaacacagtcaagctcaacctcagcagtctcagaacaggccattgtcattcggtggagacgacggaactgctctttacaagcagccgatgagatcagtatcaccaccgcagcagtaccaacccaactcagctggtgagaattctgtcttgaacatgaacttgcccggaggtgagtctggaggcatgactggaactggaagtgagccagtgaaaaagaggagaggtagaccgaggaaatatgggcctgatagtggtgaaatgtcacttggtttgaatcctggagctccttctttcactgtcagccaacctagtagcggcggcgatggaggagagaagaagagaggaagacctcctggttcttctagcaaaaggctcaagcttcaagctttaggctcgactggaatcggatttacgcctcatgtacttaccgtgctggctggagaggatgtatcatccaagataatggcgttaactcataatggaccccgtgctgtgtgtgtcttgtctgcaaatggagccatctccaatgtgactctccgccagtctgccacatccggtggaactgttacatatgaggggagatttgagattctgtctttatcgggatctttccatttgctggagaacaatggtcaaagaagcaggacgggaggtctaagcgtgtcattatcaagtccggatggtaatgtcctcggtggcagtgtagctggtcttcttatagcagcatcacctgttcagattgttgttgggagtttcttaccagacggagaaaaagaaccaaaacagcatgtgggacaaatgggactgtcgtcacccgtattaccgcgtgtggccccaacgcaggtgctgatgactccaagtagcccacaatctcgaggcacaatgagtgagtcatcttgtggaggaggacatggaagccctattcatcagagcactggaggaccttacaataacaccattaacatgccctggaagtagccaagtgatctgtgtcggcttaaaaccaacaacttcccgttattagagtgatttatttctacatttggtttagactttctagttctgatggttatttctacagttggtttagactttctagttctgttcagacaaaaggagtttgataaattgaccgacctattttgtgtgtttgaggtactttcagaaccataggtgttcagaaattagaatgttctgtttaaggtagatcttttattttatgttgaggtactttcggaaccataagttgttcagaaattggaatatcctgattaatgt

SEQ ID NO: 101901 - protein, 351 aa, Arabidopsis thaliana; identical to SEQ ID NO: 77688
  peptide (1)..(351): Ceres Seq. ID no. 13608998
  misc_feature (1)..(351): Homolog of NCBI NO: 18403332 NR Description: AT-hook DNA-binding protein (AHP1) [Arabidopsis
  misc_feature (1)..(351): Homolog of NCBI NO: 2598227 NR Description: AT-hook protein 1 [Arabidopsis thaliana]
  misc_feature (1)..(351): Homolog of NCBI NO: 14326504 NR Description: At2g33620/F4P9.39 [Arabidopsis thaliana]
  misc_feature (56)..(351): Homolog of NCBI NO: 25408293 NR Description: AT-hook DNA-binding protein (AHP1) [imported] -
  misc_feature (24)..(345): Homolog of NCBI NO: 37537056 NR Description: putative AT-Hook DNA-binding protein [Oryza
  misc_feature (81)..(345): Homolog of NCBI NO: 38346715 NR Description: OSJNBa0086O06.13 [Oryza sativa (japonica
  misc_feature (29)..(342): Homolog of NCBI NO: 15237481 NR Description: expressed protein [Arabidopsis thaliana]
  misc_feature (1)..(347): Homolog of NCBI NO: 18414996 NR Description: expressed protein [Arabidopsis thaliana] putative protein [Arabidopsis thaliana]
  misc_feature (1)..(347): Homolog of NCBI NO: 25456045 NR Description: probable DNA-binding protein AT-hook 2 [imported]
  misc_feature (38)..(322): Homolog of NCBI NO: 15235790 NR Description: DNA binding protein -related [Arabidopsis

SEQ ID NO: 101902 - protein, 343 aa, Arabidopsis thaliana; identical to SEQ ID NO: 77689
  peptide (1)..(343): Ceres Seq. ID no. 13608999
  misc_feature (1)..(343): Homolog of NCBI NO: 18403332 NR Description: AT-hook DNA-binding protein (AHP1) [Arabidopsis
  misc_feature (1)..(343): Homolog of NCBI NO: 2598227 NR Description: AT-hook protein 1 [Arabidopsis thaliana]
  misc_feature (1)..(343): Homolog of NCBI NO: 14326504 NR Description: At2g33620/F4P9.39 [Arabidopsis thaliana]
  misc_feature (48)..(343): Homolog of NCBI NO: 25408293 NR Description: AT-hook DNA-binding protein (AHP1) [imported] -
  misc_feature (16)..(337): Homolog of NCBI NO: 37537056 NR Description: putative AT-Hook DNA-binding protein [Oryza
  misc_feature (73)..(337): Homolog of NCBI NO: 38346715 NR Description: OSJNBa0086O06.13 [Oryza sativa (japonica
  misc_feature (21)..(334): Homolog of NCBI NO: 15237481 NR Description: expressed protein [Arabidopsis thaliana]
  misc_feature (1)..(339): Homolog of NCBI NO: 18414996 NR Description: expressed protein [Arabidopsis thaliana] putative protein [Arabidopsis thaliana]
  misc_feature (1)..(339): Homolog of NCBI NO: 25456045 NR Description: probable DNA-binding protein AT-hook 2 [imported]
  misc_feature (30)..(314): Homolog of NCBI NO: 15235790 NR Description: DNA binding protein -related [Arabidopsis

SEQ ID NO: 101903 - protein, 336 aa, Arabidopsis thaliana; identical to SEQ ID NO: 77690
  peptide (1)..(336): Ceres Seq. ID no. 13609000
  misc_feature (1)..(336): Homolog of NCBI NO: 18403332 NR Description: AT-hook DNA-binding protein (AHP1) [Arabidopsis
  misc_feature (1)..(336): Homolog of NCBI NO: 2598227 NR Description: AT-hook protein 1 [Arabidopsis thaliana]
  misc_feature (1)..(336): Homolog of NCBI NO: 14326504 NR Description: At2g33620/F4P9.39 [Arabidopsis thaliana]
  misc_feature (41)..(336): Homolog of NCBI NO: 25408293 NR Description: AT-hook DNA-binding protein (AHP1) [imported] -
  misc_feature (9)..(330): Homolog of NCBI NO: 37537056 NR Description: putative AT-Hook DNA-binding protein [Oryza
  misc_feature (66)..(330): Homolog of NCBI NO: 38346715 NR Description: OSJNBa0086O06.13 [Oryza sativa (japonica
  misc_feature (14)..(327): Homolog of NCBI NO: 15237481 NR Description: expressed protein [Arabidopsis thaliana]
  misc_feature (1)..(332): Homolog of NCBI NO: 18414996 NR Description: expressed protein [Arabidopsis thaliana] putative protein [Arabidopsis thaliana]
  misc_feature (1)..(332): Homolog of NCBI NO: 25456045 NR Description: probable DNA-binding protein AT-hook 2 [imported]
  misc_feature (23)..(307): Homolog of NCBI NO: 15235790 NR Description: DNA binding protein -related [Arabidopsis

SEQ ID NO: 101904 - DNA, 835 bp, Arabidopsis thaliana
  misc_feature (1)..(835): Ceres Seq. ID no. 13609005
  misc_feature: MA Experiment ID: 20000173 Result: Up-regulated in Transcription
  misc_feature: MA Experiment 20000173 PARAMETER Experiment Name: At_42deg_Heat_P Parameter: Age (day) Value: 14
  misc_feature: MA Experiment 20000173 PARAMETER Experiment Name: At_42deg_Heat_P Parameter: Organism Value: A. thaliana
  misc_feature: MA Experiment 20000173 PARAMETER Experiment Name: At_42deg_Heat_P Parameter: Plant Line Value: WS
  misc_feature: MA Experiment 20000173 PARAMETER Experiment Name: At_42deg_Heat_P Parameter: Temperature (deg C) Value: 42 vs. 22
  misc_feature: MA Experiment 20000173 PARAMETER Experiment Name: At_42deg_Heat_P Parameter: Timepoint (hr) Value: 6
  misc_feature: MA Experiment 20000173 PARAMETER Experiment Name: At_42deg_Heat_P Parameter: Tissue Value: Aerial
  misc_feature: MA Experiment ID: 20000179 Result: Up-regulated in Transcription
  misc_feature: MA Experiment 20000179 PARAMETER Experiment Name: At_Germinating_Seeds_P Parameter: Age (hr) Value: 6 vs. 0
  misc_feature: MA Experiment 20000179 PARAMETER Experiment Name: At_Germinating_Seeds_P Parameter: Tissue Value: Germinating Seeds
  misc_feature: MA Experiment ID: 20000184 Result: Down-regulated in Transcription
  misc_feature: MA Experiment 20000184 PARAMETER Experiment Name: At_Shoots__P Parameter: Age (day) Value: 7
  misc_feature: MA Experiment 20000184 PARAMETER Experiment Name: At_Shoots__P Parameter: Tissue Value: Shoots vs. Whole Plant
  misc_feature: MA Experiment ID: 20001558 Result: Down-regulated in Transcription
  misc_feature: MA Experiment 20001558 PARAMETER Experiment Name: At_Drought_Soil_Dry_P Parameter: Age (day) Value: 27
  misc_feature: MA Experiment 20001558 PARAMETER Experiment Name: At_Drought_Soil_Dry_P Parameter: Organism Value: A. thaliana
  misc_feature: MA Experiment 20001558 PARAMETER Experiment Name: At_Drought_Soil_Dry_P Parameter: Plant Line Value: WS
  misc_feature: MA Experiment 20001558 PARAMETER Experiment Name: At_Drought_Soil_Dry_P Parameter: Post Timepoint (hr) Value: 6
  misc_feature: MA Experiment 20001558 PARAMETER Experiment Name: At_Drought_Soil_Dry_P Parameter: Post-Treatment Value: Re-Water vs. No Drought
  misc_feature: MA Experiment 20001558 PARAMETER Experiment Name: At_Drought_Soil_Dry_P Parameter: Timepoint (day) Value: 13
  misc_feature: MA Experiment 20001558 PARAMETER Experiment Name: At_Drought_Soil_Dry_P Parameter: Treatment Value: Drought vs. No Drought
ccacgcgtccgtacacagtgatggcttcgtctctcaccactagattatcggcggtaatcggatctcgacggagttttccgatcgtcggagcgttttgcgttctgtcaactctctcaatctcttctctttcttcttcatctcccttcaaatcgggttgtgcacagtctttctctgttgttcctctcttaaggtctaagtttagcagtaaggctttttcttcgtcgatcagaatggaggagagcagcaaaactgtgcccagcattgttgtctatgtcactgttcctaacagagaagcagggaagaagttggctaacagcattgtccaggaaaagcttgcagcgtgtgtgaacattgtgcctggcattgaatcggtgtacgagtgggaggggaaggttcagagtgattcagaggagctcctgataatcaaaacaaggcaatcccttctagaacctctaaccgagcatgtcaatgcaaatcacgaatacgagtaagcattgttctatgacgtattctgcatataaaaacatgagtaatgcgagtgtcttgccttttctttagcaatcacacaagctaagttaataaatatggtttacttgttacctttagtgtgccagaagtaattgcgttgcccatcactggtgggagcgacaagtatttagaatggttgaaaaacagtacaaggaactgagatctcgacatctcgtagctgcccatcgtcaatggctttctagtattagtttcttttacatttcagtaacctctgtattaaagataaaacgtgtgaagtgtaatactggaccagttcgtcaaatgaaataaacaatgacattgttcc

SEQ ID NO: 101905 - protein, 162 aa, Arabidopsis thaliana
  peptide (1)..(162): Ceres Seq. ID no. 13609006
  misc_feature (86)..(162): Pfam Name: CutA1 divalent ion tolerance protein Pfam Description: CutA1 divalent ion tolerance protein
  misc_feature (7)..(162): Homolog of NCBI NO: 15226156 NR Description: putative related to microbial divalent cation proteins [Arabidopsis thaliana] >gi|25408304|pir||A84749
  misc_feature (7)..(162): Homolog of NCBI NO: 30685818 NR Description: putative related to microbial divalent cation proteins [Arabidopsis thaliana]
  misc_feature (64)..(162): Homolog of NCBI NO: 23509167 NR Description: cutA, putative [Plasmodium falciparum 3D7]
  misc_feature (88)..(161): Homolog of NCBI NO: 29726861 NR Description: Chain A, Divalent Cation Tolerance Protein (Cut
  misc_feature (88)..(162): Homolog of NCBI NO: 18313262 NR Description: divalent cation tolerance protein, conjectural aerophilum] >gi|18160783|gb|AAL64111.1| divalent cation tolerance
  misc_feature (88)..(161): Homolog of NCBI NO: 15606307 NR Description: periplasmic divalent cation tolerance protein aeolicus] >gi|7450416|pir||H70386 periplasmic divalent cation
  misc_feature (88)..(162): Homolog of NCBI NO: 15679506 NR Description: divalent cation tolerance protein
  misc_feature (4)..(161): Homolog of NCBI NO: 21430094 NR Description: GM24986p [Drosophila melanogaster]
  misc_feature (4)..(161): Homolog of NCBI NO: 24641937 NR Description: CG11590-PA [Drosophila melanogaster]
  misc_feature (60)..(162): Homolog of NCBI NO: 22962695 NR Description: hypothetical protein [Rhodopseudomonas palustris]
TRPYTVMASSLTTRLSAVIGSRRSFPIVGAFCVLSTLSISSLSSSSPFKSGCAQSFSVVPLLRSKFSSKAFSSSIRMEESSKTVPSIVVYVTVPNREAGKKLANSIVQEKLAACVNIVPGIESVYEWEGKVQSDSEELLIIKTRQSLLEPLTEHVNANHEYE

SEQ ID NO: 101906 - protein, 156 aa, Arabidopsis thaliana
  peptide (1)..(156): Ceres Seq. ID no. 13609007
  misc_feature (80)..(156): Pfam Name: CutA1 divalent ion tolerance protein Pfam Description: CutA1 divalent ion tolerance protein
  misc_feature (1)..(156): Homolog of NCBI NO: 15226156 NR Description: putative related to microbial divalent cation proteins [Arabidopsis thaliana] >gi|25408304|pir||A84749
  misc_feature (1)..(156): Homolog of NCBI NO: 30685818 NR Description: putative related to microbial divalent cation proteins [Arabidopsis thaliana]
  misc_feature (58)..(156): Homolog of NCBI NO: 23509167 NR Description: cutA, putative [Plasmodium falciparum 3D7]
  misc_feature (82)..(155): Homolog of NCBI NO: 29726861 NR Description: Chain A, Divalent Cation Tolerance Protein (Cut
  misc_feature (82)..(156): Homolog of NCBI NO: 18313262 NR Description: divalent cation tolerance protein, conjectural aerophilum] >gi|18160783|gb|AAL64111.1| divalent cation tolerance
  misc_feature (82)..(155): Homolog of NCBI NO: 15606307 NR Description: periplasmic divalent cation tolerance protein aeolicus] >gi|7450416|pir||H70386 periplasmic divalent cation
  misc_feature (82)..(156): Homolog of NCBI NO: 15679506 NR Description: divalent cation tolerance protein
  misc_feature (1)..(155): Homolog of NCBI NO: 21430094 NR Description: GM24986p [Drosophila melanogaster]
  misc_feature (1)..(155): Homolog of NCBI NO: 24641937 NR Description: CG11590-PA [Drosophila melanogaster]
  misc_feature (54)..(156): Homolog of NCBI NO: 22962695 NR Description: hypothetical protein [Rhodopseudomonas palustris]
MASSLTTRLSAVIGSRRSFPIVGAFCVLSTLSISSLSSSSPFKSGCAQSFSVVPLLRSKFSSKAFSSSIRMEESSKTVPSIVVYVTVPNREAGKKLANSIVQEKLAACVNIVPGIESVYEWEGKVQSDSEELLIIKTRQSLLEPLTEHVNANHEYE

SEQ ID NO: 101907 - protein, 86 aa, Arabidopsis thaliana
  peptide (1)..(86): Ceres Seq. ID no. 13609008
  misc_feature (10)..(86): Pfam Name: CutA1 divalent ion tolerance protein Pfam Description: CutA1 divalent ion tolerance protein
  misc_feature (1)..(86): Homolog of NCBI NO: 15226156 NR Description: putative related to microbial divalent cation proteins [Arabidopsis thaliana] >gi|25408304|pir||A84749
  misc_feature (1)..(86): Homolog of NCBI NO: 30685818 NR Description: putative related to microbial divalent cation proteins [Arabidopsis thaliana]
  misc_feature (1)..(86): Homolog of NCBI NO: 23509167 NR Description: cutA, putative [Plasmodium falciparum 3D7]
  misc_feature (12)..(85): Homolog of NCBI NO: 29726861 NR Description: Chain A, Divalent Cation Tolerance Protein (Cut
  misc_feature (12)..(86): Homolog of NCBI NO: 18313262 NR Description: divalent cation tolerance protein, conjectural aerophilum] >gi|18160783|gb|AAL64111.1| divalent cation tolerance
  misc_feature (12)..(85): Homolog of NCBI NO: 15606307 NR Description: periplasmic divalent cation tolerance protein aeolicus] >gi|7450416|pir||H70386 periplasmic divalent cation
  misc_feature (12)..(86): Homolog of NCBI NO: 15679506 NR Description: divalent cation tolerance protein
  misc_feature (1)..(85): Homolog of NCBI NO: 21430094 NR Description: GM24986p [Drosophila melanogaster]
  misc_feature (1)..(85): Homolog of NCBI NO: 24641937 NR Description: CG11590-PA [Drosophila melanogaster]
  misc_feature (1)..(86): Homolog of NCBI NO: 22962695 NR Description: hypothetical protein [Rhodopseudomonas palustris]
MEESSKTVPSIVVYVTVPNREAGKKLANSIVQEKLAACVNIVPGIESVYEWEGKVQSDSEELLIIKTRQSLLEPLTEHVNANHEYE

SEQ ID NO: 101908 - DNA, 1293 bp, Arabidopsis thaliana
  misc_feature (1)..(1293): Ceres Seq. ID no. 13609019
  misc_feature: MA Experiment ID: 108461 Result: Down-regulated in Transcription
  misc_feature: MA Experiment 108461 PARAMETER Experiment Name: At_Germinating_Seeds_cDNA_P Parameter: Age (day) Value: 1 vs. 0
  misc_feature: MA Experiment 108461 PARAMETER Experiment Name: At_Germinating_Seeds_cDNA_P Parameter: Tissue Value: Germinating Seeds
  misc_feature: MA Experiment ID: 108561 Result: Down-regulated in Transcription
  misc_feature: MA Experiment 108561 PARAMETER Experiment Name: At_100uM_ABA_cDNA_P Parameter: Timepoint (hr) Value: 6
  misc_feature: MA Experiment 108561 PARAMETER Experiment Name: At_100uM_ABA_cDNA_P Parameter: Tissue Value: Aerial
  misc_feature: MA Experiment 108561 PARAMETER Experiment Name: At_100uM_ABA_cDNA_P Parameter: Treatment Value: 100uM ABA vs. No Treatment
  misc_feature: MA Experiment ID: 108577 Result: Down-regulated in Transcription
  misc_feature: MA Experiment 108577 PARAMETER Experiment Name: At_42deg_Heat_cDNA_P Parameter: Temperature (deg C) Value: 42 vs. 22
  misc_feature: MA Experiment 108577 PARAMETER Experiment Name: At_42deg_Heat_cDNA_P Parameter: Timepoint (hr) Value: 6
  misc_feature: MA Experiment 108577 PARAMETER Experiment Name: At_42deg_Heat_cDNA_P Parameter: Tissue Value: Aerial
  misc_feature: MA Experiment ID: 108595 Result: Down-regulated in Transcription
  misc_feature: MA Experiment 108595 PARAMETER Experiment Name: At_Ler-pi_Ovule_cDNA_P Parameter: Plant Line Value: null
  misc_feature: MA Experiment ID: 20000069 Result: Down-regulated in Transcription
  misc_feature: MA Experiment 20000069 PARAMETER Experiment Name: At_100uM_ABA_Mutants_cDNA_P Parameter: Plant Line Value: CS23
  misc_feature: MA Experiment 20000069 PARAMETER Experiment Name: At_100uM_ABA_Mutants_cDNA_P Parameter: Timepoint (hr) Value: 6
  misc_feature: MA Experiment 20000069 PARAMETER Experiment Name: At_100uM_ABA_Mutants_cDNA_P Parameter: Tissue Value: Aerial
  misc_feature: MA Experiment 20000069 PARAMETER Experiment Name: At_100uM_ABA_Mutants_cDNA_P Parameter: Treatment Value: 100uM ABA vs. No Treatment
  misc_feature: MA Experiment ID: 20000070 Result: Down-regulated in Transcription
  misc_feature: MA Experiment 20000070 PARAMETER Experiment Name: At_100uM_ABA_Mutants_cDNA_P Parameter: Plant Line Value: CS24
  misc_feature: MA Experiment 20000070 PARAMETER Experiment Name: At_100uM_ABA_Mutants_cDNA_P Parameter: Timepoint (hr) Value: 6
  misc_feature: MA Experiment 20000070 PARAMETER Experiment Name: At_100uM_ABA_Mutants_cDNA_P Parameter: Tissue Value: Aerial
  misc_feature: MA Experiment 20000070 PARAMETER Experiment Name: At_100uM_ABA_Mutants_cDNA_P Parameter: Treatment Value: 100uM ABA vs. No Treatment
  misc_feature: MA Experiment ID: 20000071 Result: Down-regulated in Transcription
  misc_feature: MA Experiment 20000071 PARAMETER Experiment Name: At_100uM_ABA_Mutants_cDNA_P Parameter: Plant Line Value: CS8104
  misc_feature: MA Experiment 20000071 PARAMETER Experiment Name: At_100uM_ABA_Mutants_cDNA_P Parameter: Timepoint (hr) Value: 6
  misc_feature: MA Experiment 20000071 PARAMETER Experiment Name: At_100uM_ABA_Mutants_cDNA_P Parameter: Tissue Value: Aerial
  misc_feature: MA Experiment 20000071 PARAMETER Experiment Name: At_100uM_ABA_Mutants_cDNA_P Parameter: Treatment Value: 100uM ABA vs. No Treatment
  misc_feature: MA Experiment ID: 20000072 Result: Down-regulated in Transcription
  misc_feature: MA Experiment 20000072 PARAMETER Experiment Name: At_100uM_ABA_Mutants_cDNA_P Parameter: Plant Line Value: CS8105
  misc_feature: MA Experiment 20000072 PARAMETER Experiment Name: At_100uM_ABA_Mutants_cDNA_P Parameter: Timepoint (hr) Value: 6
  misc_feature: MA Experiment 20000072 PARAMETER Experiment Name: At_100uM_ABA_Mutants_cDNA_P Parameter: Tissue Value: Aerial
  misc_feature: MA Experiment 20000072 PARAMETER Experiment Name: At_100uM_ABA_Mutants_cDNA_P Parameter: Treatment Value: 100uM ABA vs. No Treatment
  misc_feature: MA Experiment ID: 20000086 Result: Down-regulated in Transcription
  misc_feature: MA Experiment 20000086 PARAMETER Experiment Name: At_100uM_ABA_Mutants_cDNA_P Parameter: Plant Line Value: CS22
  misc_feature: MA Experiment 20000086 PARAMETER Experiment Name: At_100uM_ABA_Mutants_cDNA_P Parameter: Timepoint (hr) Value: 6
  misc_feature: MA Experiment 20000086 PARAMETER Experiment Name: At_100uM_ABA_Mutants_cDNA_P Parameter: Tissue Value: Aerial
  misc_feature: MA Experiment 20000086 PARAMETER Experiment Name: At_100uM_ABA_Mutants_cDNA_P Parameter: Treatment Value: 100uM ABA vs. No Treatment
  misc_feature: MA Experiment ID: 20000087 Result: Down-regulated in Transcription
  misc_feature: MA Experiment 20000087 PARAMETER Experiment Name: At_100uM_ABA_Mutants_cDNA_P Parameter: Plant Line Value: WS
  misc_feature: MA Experiment 20000087 PARAMETER Experiment Name: At_100uM_ABA_Mutants_cDNA_P Parameter: Timepoint (hr) Value: 6
  misc_feature: MA Experiment 20000087 PARAMETER Experiment Name: At_100uM_ABA_Mutants_cDNA_P Parameter: Tissue Value: Aerial
  misc_feature: MA Experiment 20000087 PARAMETER Experiment Name: At_100uM_ABA_Mutants_cDNA_P Parameter: Treatment Value: 100uM ABA vs. No Treatment
  misc_feature: MA Experiment ID: 20000088 Result: Down-regulated in Transcription
  misc_feature: MA Experiment 20000088 PARAMETER Experiment Name: At_100uM_ABA_Mutants_cDNA_P Parameter: Plant Line Value: Landsberg
  misc_feature: MA Experiment 20000088 PARAMETER Experiment Name: At_100uM_ABA_Mutants_cDNA_P Parameter: Timepoint (hr) Value: 6
  misc_feature: MA Experiment 20000088 PARAMETER Experiment Name: At_100uM_ABA_Mutants_cDNA_P Parameter: Tissue Value: Aerial
  misc_feature: MA Experiment 20000088 PARAMETER Experiment Name: At_100uM_ABA_Mutants_cDNA_P Parameter: Treatment Value: 100uM ABA vs. No Treatment
  misc_feature: MA Experiment ID: 20000112 Result: Down-regulated in Transcription
  misc_feature: MA Experiment 20000112 PARAMETER Experiment Name: At_42deg_Heat_cDNA_P Parameter: Temperature (deg C) Value: 42 vs. 22
  misc_feature: MA Experiment 20000112 PARAMETER Experiment Name: At_42deg_Heat_cDNA_P Parameter: Timepoint (hr) Value: 2
  misc_feature: MA Experiment 20000112 PARAMETER Experiment Name: At_42deg_Heat_cDNA_P Parameter: Tissue Value: Aerial
  misc_feature: MA Experiment ID: 20000113 Result: Down-regulated in Transcription
  misc_feature: MA Experiment 20000113 PARAMETER Experiment Name: At_42deg_Heat_cDNA_P Parameter: Temperature (deg C) Value: 42 vs. 22
  misc_feature: MA Experiment 20000113 PARAMETER Experiment Name: At_42deg_Heat_cDNA_P Parameter: Timepoint (hr) Value: 8
  misc_feature: MA Experiment 20000113 PARAMETER Experiment Name: At_42deg_Heat_cDNA_P Parameter: Tissue Value: Aerial
  misc_feature: MA Experiment ID: 20000117 Result: Down-regulated in Transcription
  misc_feature: MA Experiment 20000117 PARAMETER Experiment Name: At_100uM_ABA_Mutants_cDNA_P Parameter: Plant Line Value: Columbia
  misc_feature: MA Experiment 20000117 PARAMETER Experiment Name: At_100uM_ABA_Mutants_cDNA_P Parameter: Timepoint (hr) Value: 6
  misc_feature: MA Experiment 20000117 PARAMETER Experiment Name: At_100uM_ABA_Mutants_cDNA_P Parameter: Tissue Value: Aerial
  misc_feature: MA Experiment 20000117 PARAMETER Experiment Name: At_100uM_ABA_Mutants_cDNA_P Parameter: Treatment Value: 100uM ABA vs. No Treatment
  misc_feature: MA Experiment ID: 20000166 Result: Down-regulated in Transcription
  misc_feature: MA Experiment 20000166 PARAMETER Experiment Name: At_100uM_ABA_P Parameter: Age (day) Value: 14
  misc_feature: MA Experiment 20000166 PARAMETER Experiment Name: At_100uM_ABA_P Parameter: Organism Value: A. thaliana
  misc_feature: MA Experiment 20000166 PARAMETER Experiment Name: At_100uM_ABA_P Parameter: Plant Line Value: WS
  misc_feature: MA Experiment 20000166 PARAMETER Experiment Name: At_100uM_ABA_P Parameter: Timepoint (hr) Value: 1
  misc_feature: MA Experiment 20000166 PARAMETER Experiment Name: At_100uM_ABA_P Parameter: Tissue Value: Aerial
  misc_feature: MA Experiment 20000166 PARAMETER Experiment Name: At_100uM_ABA_P Parameter: Treatment Value: 100uM ABA vs. No Treatment
  misc_feature: MA Experiment ID: 20000234 Result: Up-regulated in Transcription
  misc_feature: MA Experiment 20000234 PARAMETER Experiment Name: At_Siliques_P Parameter: Age (day) Value: 21
  misc_feature: MA Experiment 20000234 PARAMETER Experiment Name: At_Siliques_P Parameter: Organism Value: A. thaliana
  misc_feature: MA Experiment 20000234 PARAMETER Experiment Name: At_Siliques_P Parameter: Plant Line Value: WS
  misc_feature: MA Experiment 20000234 PARAMETER Experiment Name: At_Siliques_P Parameter: Tissue Value: Less Than 5mm Siliques vs. Whole Plant
  misc_feature: MA Experiment ID: 20000264 Result: Up-regulated in Transcription
  misc_feature: MA Experiment 20000264 PARAMETER Experiment Name: At_Open_Flower_P Parameter: Age (day) Value: 21
  misc_feature: MA Experiment 20000264 PARAMETER Experiment Name: At_Open_Flower_P Parameter: Plant Line Value: WS
  misc_feature: MA Experiment 20000264 PARAMETER Experiment Name: At_Open_Flower_P Parameter: Tissue Value: Open Flower vs. Whole Plant
  misc_feature: MA Experiment ID: 20000286 Result: Up-regulated in Transcription
  misc_feature: MA Experiment 20000286 PARAMETER Experiment Name: At_Open_Flower_P Parameter: Age (day) Value: 21
  misc_feature: MA Experiment 20000286 PARAMETER Experiment Name: At_Open_Flower_P Parameter: Plant Line Value: WS
  misc_feature: MA Experiment 20000286 PARAMETER Experiment Name: At_Open_Flower_P Parameter: Tissue Value: Half Open vs. Whole Plant
  misc_feature: MA Experiment ID: 20000439 Result: Down-regulated in Transcription
  misc_feature: MA Experiment 20000439 PARAMETER Experiment Name: At_Roots__P Parameter: Age (day) Value: 14 vs. 21
  misc_feature: MA Experiment 20000439 PARAMETER Experiment Name: At_Roots__P Parameter: Organism Value: A. thaliana
  misc_feature: MA Experiment 20000439 PARAMETER Experiment Name: At_Roots__P Parameter: Tissue Value: Roots vs. Whole Plant
  misc_feature: MA Experiment ID: 20000445 Result: Down-regulated in Transcription
  misc_feature: MA Experiment 20000445 PARAMETER Experiment Name: At_100uM_NAA__P Parameter: Age (day) Value: 14
  misc_feature: MA Experiment 20000445 PARAMETER Experiment Name: At_100uM_NAA__P Parameter: Organism Value: A. thaliana
  misc_feature: MA Experiment 20000445 PARAMETER Experiment Name: At_100uM_NAA__P Parameter: Plant Line Value: WS
  misc_feature: MA Experiment 20000445 PARAMETER Experiment Name: At_100uM_NAA__P Parameter: Timepoint (hr) Value: 6
  misc_feature: MA Experiment 20000445 PARAMETER Experiment Name: At_100uM_NAA__P Parameter: Tissue Value: Aerial
  misc_feature: MA Experiment 20000445 PARAMETER Experiment Name: At_100uM_NAA__P Parameter: Treatment Value: 100uM NAA vs. No Treatment
  misc_feature: MA Experiment ID: 20000452 Result: Up-regulated in Transcription
  misc_feature: MA Experiment 20000452 PARAMETER Experiment Name: At_CS6879_Shoots-Roots_P Parameter: Age (day) Value: 14
  misc_feature: MA Experiment 20000452 PARAMETER Experiment Name: At_CS6879_Shoots-Roots_P Parameter: Organism Value: A. thaliana
  misc_feature: MA Experiment 20000452 PARAMETER Experiment Name: At_CS6879_Shoots-Roots_P Parameter: Plant Line Value: CS6879 vs. WS
  misc_feature: MA Experiment 20000452 PARAMETER Experiment Name: At_CS6879_Shoots-Roots_P Parameter: Tissue Value: Shoots
  misc_feature: MA Experiment ID: 20000495 Result: Up-regulated in Transcription
  misc_feature: MA Experiment 20000495 PARAMETER Experiment Name: At_Guard_Cells_P Parameter: Harvest Date Value: 8/2/2002
  misc_feature: MA Experiment 20000495 PARAMETER Experiment Name: At_Guard_Cells_P Parameter: Organism Value: A. thaliana
  misc_feature: MA Experiment 20000495 PARAMETER Experiment Name: At_Guard_Cells_P Parameter: Tissue Value: Guard Cells vs. Leaves
  misc_feature: MA Experiment ID: 20000573 Result: Down-regulated in Transcription
  misc_feature: MA Experiment 20000573 PARAMETER Experiment Name: At_100uM_ABA_Mutants__P Parameter: Organism Value: A. thaliana
  misc_feature: MA Experiment 20000573 PARAMETER Experiment Name: At_100uM_ABA_Mutants__P Parameter: Plant Line Value: CS22 vs. Ler wt
  misc_feature: MA Experiment 20000573 PARAMETER Experiment Name: At_100uM_ABA_Mutants__P Parameter: Timepoint (hr) Value: N/A
  misc_feature: MA Experiment 20000573 PARAMETER Experiment Name: At_100uM_ABA_Mutants__P Parameter: Tissue Value: Whole Plant
  misc_feature: MA Experiment 20000573 PARAMETER Experiment Name: At_100uM_ABA_Mutants__P Parameter: Treatment Value: None
  misc_feature: MA Experiment ID: 20000574 Result: Down-regulated in Transcription
  misc_feature: MA Experiment 20000574 PARAMETER Experiment Name: At_100uM_ABA_Mutants__P Parameter: Organism Value: A. thaliana
  misc_feature: MA Experiment 20000574 PARAMETER Experiment Name: At_100uM_ABA_Mutants__P Parameter: Plant Line Value: CS23 vs. Ler wt
  misc_feature: MA Experiment 20000574 PARAMETER Experiment Name: At_100uM_ABA_Mutants__P Parameter: Timepoint (hr) Value: N/A
  misc_feature: MA Experiment 20000574 PARAMETER Experiment Name: At_100uM_ABA_Mutants__P Parameter: Tissue Value: Whole Plant
  misc_feature: MA Experiment 20000574 PARAMETER Experiment Name: At_100uM_ABA_Mutants__P Parameter: Treatment Value: None
  misc_feature: MA Experiment ID: 20000794 Result: Up-regulated in Transcription
  misc_feature: MA Experiment 20000794 PARAMETER Experiment Name: At_Petals_P Parameter: Age (day) Value: 23-25 days
  misc_feature: MA Experiment 20000794 PARAMETER Experiment Name: At_Petals_P Parameter: Plant Line Value: WS
  misc_feature: MA Experiment 20000794 PARAMETER Experiment Name: At_Petals_P Parameter: Tissue Value: Petals vs. Whole plant
  misc_feature: MA Experiment ID: 20001248 Result: Down-regulated in Transcription
  misc_feature: MA Experiment 20001248 PARAMETER Experiment Name: At_Far-red-induction_P Parameter: Age (day) Value: 7
  misc_feature: MA Experiment 20001248 PARAMETER Experiment Name: At_Far-red-induction_P Parameter: Light Value: Far-red vs. White
  misc_feature: MA Experiment 20001248 PARAMETER Experiment Name: At_Far-red-induction_P Parameter: Organism Value: A. thaliana
  misc_feature: MA Experiment 20001248 PARAMETER Experiment Name: At_Far-red-induction_P Parameter: Plant Line Value: Columbia
  misc_feature: MA Experiment 20001248 PARAMETER Experiment Name: At_Far-red-induction_P Parameter: Timepoint (hr) Value: 4
  misc_feature: MA Experiment 20001248 PARAMETER Experiment Name: At_Far-red-induction_P Parameter: Tissue Value: Whole Plant
  misc_feature: MA Experiment ID: 20001450 Result: Down-regulated in Transcription
  misc_feature: MA Experiment 20001450 PARAMETER Experiment Name: At_Far-red-induction_P Parameter: Age (day) Value: 7
  misc_feature: MA Experiment 20001450 PARAMETER Experiment Name: At_Far-red-induction_P Parameter: Light Value: Far-red vs. White
  misc_feature: MA Experiment 20001450 PARAMETER Experiment Name: At_Far-red-induction_P Parameter: Organism Value: A. thaliana
  misc_feature: MA Experiment 20001450 PARAMETER Experiment Name: At_Far-red-induction_P Parameter: Plant Line Value: Columbia
  misc_feature: MA Experiment 20001450 PARAMETER Experiment Name: At_Far-red-induction_P Parameter: Timepoint (hr) Value: 8
  misc_feature: MA Experiment 20001450 PARAMETER Experiment Name: At_Far-red-induction_P Parameter: Tissue Value: Whole Plant
  misc_feature: MA Experiment ID: 20001557 Result: Up-regulated in Transcription
  misc_feature: MA Experiment 20001557 PARAMETER Experiment Name: At_Drought_Soil_Dry_P Parameter: Age (day) Value: 27
  misc_feature: MA Experiment 20001557 PARAMETER Experiment Name: At_Drought_Soil_Dry_P Parameter: Organism Value: A. thaliana
  misc_feature: MA Experiment 20001557 PARAMETER Experiment Name: At_Drought_Soil_Dry_P Parameter: Plant Line Value: WS
  misc_feature: MA Experiment 20001557 PARAMETER Experiment Name: At_Drought_Soil_Dry_P Parameter: Post Timepoint (hr) Value: 3
  misc_feature: MA Experiment 20001557 PARAMETER Experiment Name: At_Drought_Soil_Dry_P Parameter: Post-Treatment Value: Re-Water vs. No Drought
  misc_feature: MA Experiment 20001557 PARAMETER Experiment Name: At_Drought_Soil_Dry_P Parameter: Timepoint (day) Value: 13
  misc_feature: MA Experiment 20001557 PARAMETER Experiment Name: At_Drought_Soil_Dry_P Parameter: Treatment Value: Drought vs. No Drought
  misc_feature: MA Experiment ID: 20001558 Result: Up-regulated in Transcription
  misc_feature: MA Experiment 20001558 PARAMETER Experiment Name: At_Drought_Soil_Dry_P Parameter: Age (day) Value: 27
  misc_feature: MA Experiment 20001558 PARAMETER Experiment Name: At_Drought_Soil_Dry_P Parameter: Organism Value: A. thaliana
  misc_feature: MA Experiment 20001558 PARAMETER Experiment Name: At_Drought_Soil_Dry_P Parameter: Plant Line Value: WS
  misc_feature: MA Experiment 20001558 PARAMETER Experiment Name: At_Drought_Soil_Dry_P Parameter: Post Timepoint (hr) Value: 6
  misc_feature: MA Experiment 20001558 PARAMETER Experiment Name: At_Drought_Soil_Dry_P Parameter: Post-Treatment Value: Re-Water vs. No Drought
  misc_feature: MA Experiment 20001558 PARAMETER Experiment Name: At_Drought_Soil_Dry_P Parameter: Timepoint (day) Value: 13
  misc_feature: MA Experiment 20001558 PARAMETER Experiment Name: At_Drought_Soil_Dry_P Parameter: Treatment Value: Drought vs. No Drought
aactcattttgacaatttttctttggtccaactcttacatattaacattcaccttcctttttgattttcgtcggttctacatgttaaacccttcaaaaattaaattataataagtatagtgaagaccaataagcagttgcatggaccctgattgattcattaccgctaaaactttgtctgaatccttcttcctatttataccactctcttcttcttctccagtttcatcacaccaaacttctcacatctcctcattctgtattttgacaaaaaaaaaacaccctttgttttttctctcctttgcatgttgtgattgtttttgcttcacaacatgggagttttagtaatctcgcttctcgtggttcatctcctagctttttccgtctgcgttcagggcggctaccgtcgtggcggacaccatcccggcggtcacatgggaccttggatcaacgctcatgccactttttacggcggcggtgatgcttccggcactatgggtggagcatgcgggtacggcaatctgtatagccaaggttatggactggagacggcagcgctgagcacagcgttattcgaccaaggacttagttgtggcgcatgttttgagctgatgtgtgtcaacgatcctcaatggtgcataaaaggccgatccattgtggtcactgccactaacttttgtcctcctggtggtgcatgcgaccctcccaaccaccatttcgatctttctcagccgatctacgagaaaattgctctctacaaatccggtatcattcccgttatgtatagaagggttcggtgcaagagaagtggtgggataaggttcacgatcaacggccactcatactttaacttggtgttggtcacaaacgtgggtggagccggggacgtacactcggtctcaatgaaagggtcgaggacaaaatggcaattaatgtcgagaaattgggggcaaaattggcaaagcaactcttatctcaatggtcaaagtctgtcgtttgttgttaccacaagtgatcgtcgaagtgtcgtctcttttaatgttgcaccacccacttggtcctttggccagacctacaccggagggcagtttcggtattaattatatataatcggttcggtttgttattgtgctttttttttttttttcggttccaagttggggactcttttttggtaaccaattgagattgggactgatagtgatatgtagcgaatatatgtgtgggaacgagaaaaagagaagttttattaattctcgttttataatataagaaaatgaaagtgatgttatgt

SEQ ID NO: 101909 - protein, 255 aa, Arabidopsis thaliana; identical to SEQ ID NO: 34839
  peptide (1)..(255): Ceres Seq. ID no. 13609020
  misc_feature (162)..(239): Pfam Name: Pollen allergen Pfam Description: Pollen allergen
  misc_feature (1)..(255): Homolog of NCBI NO: 15228564 NR Description: expansin, putative (EXP5) [Arabidopsis thaliana]
  misc_feature (33)..(253): Homolog of NCBI NO: 21314547 NR Description: alpha-expansin precursor [Gossypium hirsutum]
  misc_feature (28)..(255): Homolog of NCBI NO: 11932089 NR Description: expansin [Cicer arietinum]
  misc_feature (33)..(255): Homolog of NCBI NO: 22023949 NR Description: expansin 3 [Malus x domestica]
  misc_feature (6)..(254): Homolog of NCBI NO: 38046730 NR Description: alpha-expansin 3 [Populus tremula x Populus
  misc_feature (14)..(254): Homolog of NCBI NO: 17484121 NR Description: alpha-expansin [Prunus cerasus]
  misc_feature (5)..(254): Homolog of NCBI NO: 20502788 NR Description: expansin 13 precursor [Rumex palustris]
  misc_feature (14)..(254): Homolog of NCBI NO: 29466641 NR Description: expansin [Prunus persica]
  misc_feature (36)..(254): Homolog of NCBI NO: 20149054 NR Description: putative expansin [Capsicum annuum]
  misc_feature (6)..(254): Homolog of NCBI NO: 4138916 NR Description: expansin precursor [Lycopersicon esculentum]

SEQ ID NO: 101910 - protein, 221 aa, Arabidopsis thaliana; identical to SEQ ID NO: 34840
  peptide (1)..(221): Ceres Seq. ID no. 13609021
  misc_feature (128)..(205): Pfam Name: Pollen allergen Pfam Description: Pollen allergen
  misc_feature (1)..(221): Homolog of NCBI NO: 15228564 NR Description: expansin, putative (EXP5) [Arabidopsis thaliana]
  misc_feature (1)..(219): Homolog of NCBI NO: 21314547 NR Description: alpha-expansin precursor [Gossypium hirsutum]
  misc_feature (1)..(221): Homolog of NCBI NO: 11932089 NR Description: expansin [Cicer arietinum]
  misc_feature (1)..(221): Homolog of NCBI NO: 22023949 NR Description: expansin 3 [Malus x domestica]
  misc_feature (1)..(220): Homolog of NCBI NO: 38046730 NR Description: alpha-expansin 3 [Populus tremula x Populus
  misc_feature (1)..(220): Homolog of NCBI NO: 17484121 NR Description: alpha-expansin [Prunus cerasus]
  misc_feature (1)..(220): Homolog of NCBI NO: 20502788 NR Description: expansin 13 precursor [Rumex palustris]
  misc_feature (1)..(220): Homolog of NCBI NO: 29466641 NR Description: expansin [Prunus persica]
  misc_feature (2)..(220): Homolog of NCBI NO: 20149054 NR Description: putative expansin [Capsicum annuum]
  misc_feature (1)..(220): Homolog of NCBI NO: 4138916 NR Description: expansin precursor [Lycopersicon esculentum]

SEQ ID NO: 101911 - protein, 201 aa, Arabidopsis thaliana; identical to SEQ ID NO: 34841
  peptide (1)..(201): Ceres Seq. ID no. 13609022
  misc_feature (108)..(185): Pfam Name: Pollen allergen Pfam Description: Pollen allergen
  misc_feature (1)..(201): Homolog of NCBI NO: 15228564 NR Description: expansin, putative (EXP5) [Arabidopsis thaliana]
  misc_feature (1)..(199): Homolog of NCBI NO: 21314547 NR Description: alpha-expansin precursor [Gossypium hirsutum]
  misc_feature (1)..(201): Homolog of NCBI NO: 11932089 NR Description: expansin [Cicer arietinum]
  misc_feature (1)..(201): Homolog of NCBI NO: 22023949 NR Description: expansin 3 [Malus x domestica]
  misc_feature (1)..(200): Homolog of NCBI NO: 38046730 NR Description: alpha-expansin 3 [Populus tremula x Populus
  misc_feature (1)..(200): Homolog of NCBI NO: 17484121 NR Description: alpha-expansin [Prunus cerasus]
  misc_feature (1)..(200): Homolog of NCBI NO: 20502788 NR Description: expansin 13 precursor [Rumex palustris]
  misc_feature (1)..(200): Homolog of NCBI NO: 29466641 NR Description: expansin [Prunus persica]
  misc_feature (1)..(200): Homolog of NCBI NO: 20149054 NR Description: putative expansin [Capsicum annuum]
  misc_feature (1)..(200): Homolog of NCBI NO: 4138916 NR Description: expansin precursor [Lycopersicon esculentum]

SEQ ID NO: 101912 - DNA, 2729 bp, Arabidopsis thaliana
  misc_feature (1)..(2729): Ceres Seq. ID no. 13609035
  misc_feature: MA Experiment ID: 20000185 Result: Down-regulated in Transcription
  misc_feature: MA Experiment 20000185 PARAMETER Experiment Name: At_Roots__P Parameter: Age (day) Value: 7 vs. 21
  misc_feature: MA Experiment 20000185 PARAMETER Experiment Name: At_Roots__P Parameter: Organism Value: A. thaliana
  misc_feature: MA Experiment 20000185 PARAMETER Experiment Name: At_Roots__P Parameter: Tissue Value: Roots vs. Whole Plant
  misc_feature: MA Experiment ID: 20000234 Result: Down-regulated in Transcription
  misc_feature: MA Experiment 20000234 PARAMETER Experiment Name: At_Siliques_P Parameter: Age (day) Value: 21
  misc_feature: MA Experiment 20000234 PARAMETER Experiment Name: At_Siliques_P Parameter: Organism Value: A. thaliana
  misc_feature: MA Experiment 20000234 PARAMETER Experiment Name: At_Siliques_P Parameter: Plant Line Value: WS
  misc_feature: MA Experiment 20000234 PARAMETER Experiment Name: At_Siliques_P Parameter: Tissue Value: Less Than 5mm Siliques vs. Whole Plant
  misc_feature: MA Experiment ID: 20000286 Result: Down-regulated in Transcription
  misc_feature: MA Experiment 20000286 PARAMETER Experiment Name: At_Open_Flower_P Parameter: Age (day) Value: 21
  misc_feature: MA Experiment 20000286 PARAMETER Experiment Name: At_Open_Flower_P Parameter: Plant Line Value: WS
  misc_feature: MA Experiment 20000286 PARAMETER Experiment Name: At_Open_Flower_P Parameter: Tissue Value: Half Open vs. Whole Plant
  misc_feature: MA Experiment ID: 20000445 Result: Down-regulated in Transcription
  misc_feature: MA Experiment 20000445 PARAMETER Experiment Name: At_100uM_NAA__P Parameter: Age (day) Value: 14
  misc_feature: MA Experiment 20000445 PARAMETER Experiment Name: At_100uM_NAA__P Parameter: Organism Value: A. thaliana
  misc_feature: MA Experiment 20000445 PARAMETER Experiment Name: At_100uM_NAA__P Parameter: Plant Line Value: WS
  misc_feature: MA Experiment 20000445 PARAMETER Experiment Name: At_100uM_NAA__P Parameter: Timepoint (hr) Value: 6
  misc_feature: MA Experiment 20000445 PARAMETER Experiment Name: At_100uM_NAA__P Parameter: Tissue Value: Aerial
  misc_feature: MA Experiment 20000445 PARAMETER Experiment Name: At_100uM_NAA__P Parameter: Treatment Value: 100uM NAA vs. No Treatment
  misc_feature: MA Experiment ID: 20000496 Result: Up-regulated in Transcription
  misc_feature: MA Experiment 20000496 PARAMETER Experiment Name: At_Guard_Cells_P Parameter: Harvest Date Value: 7/19/2002
  misc_feature: MA Experiment 20000496 PARAMETER Experiment Name: At_Guard_Cells_P Parameter: Organism Value: Canola
  misc_feature: MA Experiment 20000496 PARAMETER Experiment Name: At_Guard_Cells_P Parameter: Tissue Value: Guard Cells vs. Leaves
  misc_feature: MA Experiment ID: 20000709 Result: Down-regulated in Transcription
  misc_feature: MA Experiment 20000709 PARAMETER Experiment Name: At_15mM_NH4NO3_L-to-H_P Parameter: Age (hr) Value: 14
  misc_feature: MA Experiment 20000709 PARAMETER Experiment Name: At_15mM_NH4NO3_L-to-H_P Parameter: Organism Value: A. thaliana
  misc_feature: MA Experiment 20000709 PARAMETER Experiment Name: At_15mM_NH4NO3_L-to-H_P Parameter: Plant Line Value: WS
  misc_feature: MA Experiment 20000709 PARAMETER Experiment Name: At_15mM_NH4NO3_L-to-H_P Parameter: Timepoint (hr) Value: 4
  misc_feature: MA Experiment 20000709 PARAMETER Experiment Name: At_15mM_NH4NO3_L-to-H_P Parameter: Tissue Value: Aerial
  misc_feature: MA Experiment 20000709 PARAMETER Experiment Name: At_15mM_NH4NO3_L-to-H_P Parameter: Treatment Value: 15mM NH4NO3 vs. 30mM Mannitol
  misc_feature: MA Experiment ID: 20001451 Result: Up-regulated in Transcription
  misc_feature: MA Experiment 20001451 PARAMETER Experiment Name: At_Far-red-induction_P Parameter: Age (day) Value: 7
  misc_feature: MA Experiment 20001451 PARAMETER Experiment Name: At_Far-red-induction_P Parameter: Light Value: Far-red vs. White
  misc_feature: MA Experiment 20001451 PARAMETER Experiment Name: At_Far-red-induction_P Parameter: Organism Value: A. thaliana
  misc_feature: MA Experiment 20001451 PARAMETER Experiment Name: At_Far-red-induction_P Parameter: Plant Line Value: Columbia
  misc_feature: MA Experiment 20001451 PARAMETER Experiment Name: At_Far-red-induction_P Parameter: Timepoint (hr) Value: 24
  misc_feature: MA Experiment 20001451 PARAMETER Experiment Name: At_Far-red-induction_P Parameter: Tissue Value: Whole Plant
  misc_feature: MA Experiment ID: 20001557 Result: Up-regulated in Transcription
  misc_feature: MA Experiment 20001557 PARAMETER Experiment Name: At_Drought_Soil_Dry_P Parameter: Age (day) Value: 27
  misc_feature: MA Experiment 20001557 PARAMETER Experiment Name: At_Drought_Soil_Dry_P Parameter: Organism Value: A. thaliana
  misc_feature: MA Experiment 20001557 PARAMETER Experiment Name: At_Drought_Soil_Dry_P Parameter: Plant Line Value: WS
  misc_feature: MA Experiment 20001557 PARAMETER Experiment Name: At_Drought_Soil_Dry_P Parameter: Post Timepoint (hr) Value: 3
  misc_feature: MA Experiment 20001557 PARAMETER Experiment Name: At_Drought_Soil_Dry_P Parameter: Post-Treatment Value: Re-Water vs. No Drought
  misc_feature: MA Experiment 20001557 PARAMETER Experiment Name: At_Drought_Soil_Dry_P Parameter: Timepoint (day) Value: 13
  misc_feature: MA Experiment 20001557 PARAMETER Experiment Name: At_Drought_Soil_Dry_P Parameter: Treatment Value: Drought vs. No Drought
  misc_feature: MA Experiment ID: 20001756 Result: Down-regulated in Transcription
  misc_feature: MA Experiment 20001756 PARAMETER Experiment Name: At_50mM_NH4NO3_L-to-H_P Parameter: Timepoint (hr) Value: 4
  misc_feature: MA Experiment 20001756 PARAMETER Experiment Name: At_50mM_NH4NO3_L-to-H_P Parameter: Tissue Value: Leaf
  misc_feature: MA Experiment 20001756 PARAMETER Experiment Name: At_50mM_NH4NO3_L-to-H_P Parameter: Treatment Value: 50mM NH4NO3 vs 100mM Mannitol
  misc_feature: MA Experiment ID: 20001757 Result: Up-regulated in Transcription
  misc_feature: MA Experiment 20001757 PARAMETER Experiment Name: At_50mM_NH4NO3_L-to-H_P Parameter: Timepoint (hr) Value: 6
  misc_feature: MA Experiment 20001757 PARAMETER Experiment Name: At_50mM_NH4NO3_L-to-H_P Parameter: Tissue Value: Leaf
  misc_feature: MA Experiment 20001757 PARAMETER Experiment Name: At_50mM_NH4NO3_L-to-H_P Parameter: Treatment Value: 50mM NH4NO3 vs 100mM Mannitol
  misc_feature: MA Experiment ID: 20001761 Result: Up-regulated in Transcription
  misc_feature: MA Experiment 20001761 PARAMETER Experiment Name: At_50mM_NH4NO3_L-to-H_P Parameter: Timepoint (hr) Value: 4
  misc_feature: MA Experiment 20001761 PARAMETER Experiment Name: At_50mM_NH4NO3_L-to-H_P Parameter: Tissue Value: Siliques
  misc_feature: MA Experiment 20001761 PARAMETER Experiment Name: At_50mM_NH4NO3_L-to-H_P Parameter: Treatment Value: 50mM NH4NO3 vs 100mM Mannitol
aacacggaccaaggagtctgacatgtgtgcgagtcaacgggtgagtaaacccgtaaggcgcaaggaagctgattggcgggatccctcgcgggtgcaccgccgaccgaccttgatcttctgagaagggttcgagtgtgagcatgcctgtcgggacccgaaagatggtgaactatgcctgagcggggtaaagccagaggaaactctggtggaagcccgcagcgatactgacgtgcaaatcgttcgtctgacttgggtataggggcgaaagactaatcgaaccatctagtagctggttccctccgaagtttccctcaggatagctggagctcggacgcgagttctatcgggtaaagccaatgattagaggcattgggggcgcaacgccctcgacctattctcaaactttaaataggtaggacgtgtcggctgctttgttgagccgtcacacggaatcgagagctccaagtgggccatttttggtaagcagaactggcgatgcgggatgaaccggaagccgggttacggtgcccaactgcgcgctaacctagaacccacaaagggtgttggtcgattaagacagcaggacggtggtcatggaagtcgaaatccgctaaggagtgtgtaacaactcacctgccgaatcaactagccccgaaaatggatggcgcttaagcgcgcgacctatacccggccgtcggggcaagagccaggcctcgatgagtaggagggcgcggcggtcgctgcaaaacctagggcgcgagcccgggcggagcggccgtcggtgcagatcttggtggtagtagcaaatattcaaatgagaactttgaaggccgaagaggggaaaggttccatgtgaacggcacttgcacatgggttagtcgatcctaagagtcgggggaaacccgtctgatagcgcttaagcgcgaacttcgaaaggggatccggttaaaattccggaaccgggacgtggcggttgacggcaacgttagggagtccggagacgtcggcgggggcctcgggaagagttatcttttctgtttaacagcctgcccaccctggaaacggctcagccggaggtagggtccagcggctggaagagcaccgcacgtcgcgtggtgtccggtgcgcccccggcggcccttgaaaatccggaggaccgagtgccgctcacgcccggtcgtactcataaccgcatcaggtctccaaggtgaacagcctctggtcgatggaacaatgtaggcaagggaagtcggcaaaatggatccgtaacttcgggaaaaggattggctctgagggctgggctcgggggtcccagttccgaacccgtcggctgtcagcggactgctcgagctgcttccgcggcgagagcgggtcgccgcgtgccggccgggggacggactgggaacggctctctcgggagctttccccgggcgtcgaacagtcagctcagaactggtacggacaaggggaatccgactgtttaattaaaacaaagcattgcgatggtccctgcggatgctaacgcaatgtgatttctgcccagtgctctgaatgtcaaagtgaagaaattcaaccaagcgcgggtaaacggcgggagtaactatgactctcttaaggtagccaaatgcctcgtcatctaattagtgacgcgcatgaatggattaacgagattcccactgtccctgtctactatccagcgaaaccacagccaagggaacgggcttggcagaatcagcggggaaagaagaccctgttgagcttgactctagtccgactttgtgaaatgacttgagaggtgtaggataagtgggagcttcggcgcaagtgaaataccactacttttaacgttattttacttactccgtgaatcggaggcggggtacaacccctgtttttggtcccaaggctcgcttcggcgggtcgatccgggcggaggacattgtcaggtggggagtttggctggggcggcacatctgttaaaagataacgcaggtgtcctaagatgagctcaacgagaacagaaatctcgtgtggaacaaaagggtaaaagctcgtttgattctgattttcagtacgaatacgaaccgtgaaagcgtggcctatcgatcctttagaccttcggaatttgaagctagaggtgtcagaaaagttaccacagggataactggcttgtggcagccaagcgttcatagcgacgttgctttttgatccttcgatgtcggctcttcctatcattgtgaagcagaattcaccaagtgttggattgttcacccaccaatagggaacgtgagctgggtttagaccgtcgtgagacaggttagttttaccctactgatgcccgcgtcgcgatagtaattcaacctagtacgagaggaaccgttgattcgcacaattggtcatcgcgcttggttgaaaagccagtggcgcgaagctaccgtgcgctggattatgactgaacgcctctaagtcagaatccgggctagaagcgacgcatgcgcccgccgcccgattgccgaccctcagtaggagcttaggctcccaaaggcacgtgtcgttggctaagtccgttcggcggaagcgtcgttcggaccgccttgaattataattaccaccgagcggcgggtagaatcctttgcagacgacttaaatacgcgacggggtattgtaagtggcagagtggccttgctgccacgatccactgagattcagccctttgtcgctaagattcg

SEQ ID NO: 101913 - protein, 98 aa, Arabidopsis thaliana
  peptide (1)..(98): Ceres Seq. ID no. 13609036
MEQCRQGKSAKWIRNFGKRIGSEGWARGSQFRTRRLSADCSSCFRGESGSPRAGRGTDWERLSRELSPGVEQSAQNWYGQGESDCLIKTKHCDGPCGC

SEQ ID NO: 101914 - protein, 55 aa, Arabidopsis thaliana; identical to SEQ ID NO: 45608
  peptide (1)..(55): Ceres Seq. ID no. 13609037
  misc_feature (1)..(39): Homolog of NCBI NO: 5531330 NR Description: putative transcription factor [Periplaneta
  misc_feature (1)..(41): Homolog of NCBI NO: 34876464 NR Description: similar to putative transcription factor [Rattus

SEQ ID NO: 101915 - DNA, 925 bp, Arabidopsis thaliana
  misc_feature (1)..(925): Ceres Seq. ID no. 13609062
  misc_feature: MA Experiment ID: 108434 Result: Down-regulated in Transcription
  misc_feature: MA Experiment 108434 PARAMETER Experiment Name: At_Root_Tips_cDNA_P Parameter: Tissue Value: Root Tips
  misc_feature: MA Experiment ID: 20000070 Result: Up-regulated in Transcription
  misc_feature: MA Experiment 20000070 PARAMETER Experiment Name: At_100uM_ABA_Mutants_cDNA_P Parameter: Plant Line Value: CS24
  misc_feature: MA Experiment 20000070 PARAMETER Experiment Name: At_100uM_ABA_Mutants_cDNA_P Parameter: Timepoint (hr) Value: 6
  misc_feature: MA Experiment 20000070 PARAMETER Experiment Name: At_100uM_ABA_Mutants_cDNA_P Parameter: Tissue Value: Aerial
  misc_feature: MA Experiment 20000070 PARAMETER Experiment Name: At_100uM_ABA_Mutants_cDNA_P Parameter: Treatment Value: 100uM ABA vs. No Treatment
  misc_feature: MA Experiment ID: 20000088 Result: Up-regulated in Transcription
  misc_feature: MA Experiment 20000088 PARAMETER Experiment Name: At_100uM_ABA_Mutants_cDNA_P Parameter: Plant Line Value: Landsberg
  misc_feature: MA Experiment 20000088 PARAMETER Experiment Name: At_100uM_ABA_Mutants_cDNA_P Parameter: Timepoint (hr) Value: 6
  misc_feature: MA Experiment 20000088 PARAMETER Experiment Name: At_100uM_ABA_Mutants_cDNA_P Parameter: Tissue Value: Aerial
  misc_feature: MA Experiment 20000088 PARAMETER Experiment Name: At_100uM_ABA_Mutants_cDNA_P Parameter: Treatment Value: 100uM ABA vs. No Treatment
  misc_feature: MA Experiment ID: 20000227 Result: Down-regulated in Transcription
  misc_feature: MA Experiment 20000227 PARAMETER Experiment Name: At_Root-Tips-vs-Tops_P Parameter: Tissue Value: Root Tips vs. Root Tops
  misc_feature: MA Experiment ID: 20000437 Result: Up-regulated in Transcription
  misc_feature: MA Experiment 20000437 PARAMETER Experiment Name: At_Drought_P Parameter: Age (day) Value: 8
  misc_feature: MA Experiment 20000437 PARAMETER Experiment Name: At_Drought_P Parameter: Organism Value: A. thaliana
  misc_feature: MA Experiment 20000437 PARAMETER Experiment Name: At_Drought_P Parameter: Plant Line Value: WS
  misc_feature: MA Experiment 20000437 PARAMETER Experiment Name: At_Drought_P Parameter: Timepoint (hr) Value: 24
  misc_feature: MA Experiment 20000437 PARAMETER Experiment Name: At_Drought_P Parameter: Tissue Value: Whole Plant
  misc_feature: MA Experiment 20000437 PARAMETER Experiment Name: At_Drought_P Parameter: Treatment Value: Drought vs. No Drought
  misc_feature: MA Experiment ID: 20000453 Result: Up-regulated in Transcription
  misc_feature: MA Experiment 20000453 PARAMETER Experiment Name: At_100uM_ABA_P Parameter: Age (day) Value: 15
  misc_feature: MA Experiment 20000453 PARAMETER Experiment Name: At_100uM_ABA_P Parameter: Organism Value: A. thaliana
  misc_feature: MA Experiment 20000453 PARAMETER Experiment Name: At_100uM_ABA_P Parameter: Plant Line Value: WS
  misc_feature: MA Experiment 20000453 PARAMETER Experiment Name: At_100uM_ABA_P Parameter: Timepoint (hr) Value: 24
  misc_feature: MA Experiment 20000453 PARAMETER Experiment Name: At_100uM_ABA_P Parameter: Tissue Value: Aerial
  misc_feature: MA Experiment 20000453 PARAMETER Experiment Name: At_100uM_ABA_P Parameter: Treatment Value: 100uM ABA vs. No Treatment
  misc_feature: MA Experiment ID: 20000794 Result: Up-regulated in Transcription
  misc_feature: MA Experiment 20000794 PARAMETER Experiment Name: At_Petals_P Parameter: Age (day) Value: 23-25 days
  misc_feature: MA Experiment 20000794 PARAMETER Experiment Name: At_Petals_P Parameter: Plant Line Value: WS
  misc_feature: MA Experiment 20000794 PARAMETER Experiment Name: At_Petals_P Parameter: Tissue Value: Petals vs. Whole plant
  misc_feature: MA Experiment ID: 20001558 Result: Down-regulated in Transcription
  misc_feature: MA Experiment 20001558 PARAMETER Experiment Name: At_Drought_Soil_Dry_P Parameter: Age (day) Value: 27
  misc_feature: MA Experiment 20001558 PARAMETER Experiment Name: At_Drought_Soil_Dry_P Parameter: Organism Value: A. thaliana
  misc_feature: MA Experiment 20001558 PARAMETER Experiment Name: At_Drought_Soil_Dry_P Parameter: Plant Line Value: WS
  misc_feature: MA Experiment 20001558 PARAMETER Experiment Name: At_Drought_Soil_Dry_P Parameter: Post Timepoint (hr) Value: 6
  misc_feature: MA Experiment 20001558 PARAMETER Experiment Name: At_Drought_Soil_Dry_P Parameter: Post-Treatment Value: Re-Water vs. No Drought
  misc_feature: MA Experiment 20001558 PARAMETER Experiment Name: At_Drought_Soil_Dry_P Parameter: Timepoint (day) Value: 13
  misc_feature: MA Experiment 20001558 PARAMETER Experiment Name: At_Drought_Soil_Dry_P Parameter: Treatment Value: Drought vs. No Drought
atcatctctctgtttttccgaagaactaacacatgtcgggacctcagtgctgtgaaaacccgccaactcttaacccggtttccgggtcgggtcatgtcgagaagctgggtgggcttgatgcctacgtctccggctctgccgagtccaagctctgcgtcctcctcatttctgatatttttggttttgaagctccaaacttaagggcgcttgcggacaaggttgcagcttctggattctatgttgtggttcctgattactttggtggagatccttataatccctctaaccaggacagacccatccctgtctggatcaaagaccatggctgtgataagggctttgaaaacacgaaaccagtacttgaaaccataaagaacaaaggcataactgccattggagccgcagggatgtgttggggtgcaaaagtagtggtggaactgtctaaagaagagcttattcaagcagctgtgttgcttcatccttcttttgtcaatgttgatgatatcaaaggtgggaaggctccaattgctatattaggagctgaaattgatcaaatgtccccaccagcactcttgaagcaatttgaggagattctatcttccaaacccgaggtgaatagttacgtgaagatacacccgaaagtgtcacacggatggacagttagatacaacatcgatgaaccagaggcggttaaagcagcagaagaagctcacaaggagatgcttgattggtttgtgacctacatcaaatgatttgagaaagaaagaaaggtattgtctattacttcatatatgcaaagaataaaaattaaagagagacaaagcaaaactcttggttggtgtttcaatttctactttctatagtcttttgaagcattctctgagattctgtgataccttttgttaatcattgttttatgattttt

SEQ ID NO: 101916 - protein, 239 aa, Arabidopsis thaliana; identical to SEQ ID NO: 28662
  peptide (1)..(239): Ceres Seq. ID no. 13609063
  misc_feature (28)..(238): Pfam Name: Dienelactone hydrolase family Pfam Description: Dienelactone hydrolase family
  misc_feature (1)..(239): Homolog of NCBI NO: 18403820 NR Description: expressed protein [Arabidopsis thaliana]
  misc_feature (1)..(239): Homolog of NCBI NO: 18403812 NR Description: expressed protein [Arabidopsis thaliana]
  misc_feature (1)..(239): Homolog of NCBI NO: 24899687 NR Description: Unknown protein [Arabidopsis thaliana]
  misc_feature (9)..(239): Homolog of NCBI NO: 9294513 NR Description: contains similarity to endo-1,3-1,4-beta-D-
  misc_feature (5)..(239): Homolog of NCBI NO: 40253303 NR Description: putative Endo-1,3;1,4-beta-D-glucanase precursor
  misc_feature (6)..(239): Homolog of NCBI NO: 40253306 NR Description: putative Endo-1,3;1,4-beta-D-glucanase precursor
  misc_feature (5)..(194): Homolog of NCBI NO: 8928122 NR Description: Endo-1,3;1,4-beta-D-glucanase precursor
  misc_feature (69)..(239): Homolog of NCBI NO: 40253308 NR Description: Endo-1,3;1,4-beta-D-glucanase precursor-like
  misc_feature (20)..(238): Homolog of NCBI NO: 38181938 NR Description: Unknown (protein for MGC:76315) [Silurana
  misc_feature (14)..(238): Homolog of NCBI NO: 40740730 NR Description: hypothetical protein AN3712.2 [Aspergillus

SEQ ID NO: 101917 - DNA, 1521 bp, Arabidopsis thaliana
  misc_feature (1)..(1521): Ceres Seq. ID no. 13609069
  misc_feature: MA Experiment ID: 108569 Result: Up-regulated in Transcription
  misc_feature: MA Experiment 108569 PARAMETER Experiment Name: At_0.001%_MeJA__cDNA_P Parameter: Timepoint (hr) Value: 6
  misc_feature: MA Experiment 108569 PARAMETER Experiment Name: At_0.001%_MeJA__cDNA_P Parameter: Tissue Value: Aerial
  misc_feature: MA Experiment 108569 PARAMETER Experiment Name: At_0.001%_MeJA__cDNA_P Parameter: Treatment Value: 0.001% MeJA vs. No Treatment
  misc_feature: MA Experiment ID: 20000224 Result: Down-regulated in Transcription
  misc_feature: MA Experiment ID: 20001451 Result: Down-regulated in Transcription
  misc_feature: MA Experiment 20001451 PARAMETER Experiment Name: At_Far-red-induction_P Parameter: Age (day) Value: 7
  misc_feature: MA Experiment 20001451 PARAMETER Experiment Name: At_Far-red-induction_P Parameter: Light Value: Far-red vs. White
  misc_feature: MA Experiment 20001451 PARAMETER Experiment Name: At_Far-red-induction_P Parameter: Organism Value: A. thaliana
  misc_feature: MA Experiment 20001451 PARAMETER Experiment Name: At_Far-red-induction_P Parameter: Plant Line Value: Columbia
  misc_feature: MA Experiment 20001451 PARAMETER Experiment Name: At_Far-red-induction_P Parameter: Timepoint (hr) Value: 24
  misc_feature: MA Experiment 20001451 PARAMETER Experiment Name: At_Far-red-induction_P Parameter: Tissue Value: Whole Plant
attcgtctcctccattaaacatctctcgtctgataacaccgatccatctctttctttctctctccgtcgactctcgttcttaaagatgaaagctttctacgtattcgttgttgctcttcttctcaccttgaattataggggagaagcaagtggttctgttttcttcattgatggatccaacaatcaatatcttcgtccacgatcatccagtgaggcacttcccatgtcgcctgttgaaatatctgcagcagtgtctgccttgttgggttttgcaccttcagcaactttgacagctgatggctcatccaagttgaacaagattctaaaacctaatccatttgagaggcctcgcgctgcttttgtgctagaaatcgctggagctgatgatatgcttttggaaacctcccctagtcattctttcttgggcaatgccataaggagcagtattaagtctgattcgtacaaagctgatactgaacttccagacaatgaagtggttgttgtgtctgtcaatgaaccctcctctgatgtgactgacaaggacattaatgattttgcatcttggttgggtggatcatatgttgctggagctgaaccatcgtctggattgttgagtatccctctggctgggggtgctaatgtggagttcaatttggaaaaggaagcagagaggaaatttgcattgaaccttttgggtctatatcagaatatcagacaggcagtcagcgtttatgacgatttatctcatggtattgacagaactgccgaattaacggttggacgctttggtggtatcgatgctttagcacaggagtatggacaaggtatggctaagcaagggatggatgtattactttccacattatcaaagctattcaatctgttggagacatctcataaaggccaaattgttggggttatcgtccttgatgagagagtaaaccaagaatcagaaaatcttttgaactttgggtcttcccgttcatctgcacgctcaatggtggaagtggagggaattccaagtgcagccattatcgctgaggttatacttgttaggctgactcttgcatggttgactggaatcattcttctcattgcaactatccttggggtatacttccttatgaacatgcctttgacgaaggatactcttctatattcaaatgtaaagctcgactaagaaatgaaacagagcttcaaaacggcaaaaggacactgattttctctacaggtcgttcgtttacatatttttgtgtgtatcaagccgtgtttctcaactggccgcctttgaaaccggtgtcatttgaatgtttaaagagaaggatgaaacttttggtggtcagagcagttgatgtgttatgtgtatattgccatattggttgcattctcgacttataattattttctttcttacatacattttgagtctcagtcctaataataaaagaccactttggacacttgatgtgtatcttctgtctctgtaagagcttttgatcatgaatctgaatatattattgc

SEQ ID NO: 101918 - protein, 392 aa, Arabidopsis thaliana
  peptide (1)..(392): Ceres Seq. ID no. 13609070
  misc_feature (29)..(392): Homolog of NCBI NO: 15230073 NR Description: type 1 membrane protein -related [Arabidopsis
  misc_feature (280)..(392): Homolog of NCBI NO: 40716478 NR Description: putative membrane protein type I [Musa acuminata]
FVSSIKHLSSDNTDPSLSFSLRRLSFLKMKAFYVFVVALLLTLNYRGEASGSVFFIDGSNNQYLRPRSSSEALPMSPVEISAAVSALLGFAPSATLTADGSSKLNKILKPNPFERPRAAFVLEIAGADDMLLETSPSHSFLGNAIRSSIKSDSYKADTELPDNEVVVVSVNEPSSDVTDKDINDFASWLGGSYVAGAEPSSGLLSIPLAGGANVEFNLEKEAERKFALNLLGLYQNIRQAVSVYDDLSHGIDRTAELTVGRFGGIDALAQEYGQGMAKQGMDVLLSTLSKLFNLLETSHKGQIVGVIVLDERVNQESENLLNFGSSRSSARSMVEVEGIPSAAIIAEVILVRLTLAWLTGIILLIATILGVYFLMNMPLTKDTLLYSNVKLD

SEQ ID NO: 101919 - protein, 364 aa, Arabidopsis thaliana; identical to SEQ ID NO: 28942
  peptide (1)..(364): Ceres Seq. ID no. 13609071
  misc_feature (1)..(364): Homolog of NCBI NO: 15230073 NR Description: type 1 membrane protein -related [Arabidopsis
  misc_feature (252)..(364): Homolog of NCBI NO: 40716478 NR Description: putative membrane protein type I [Musa acuminata]

SEQ ID NO: 101920 - protein, 318 aa, Arabidopsis thaliana; identical to SEQ ID NO: 28943
  peptide (1)..(318): Ceres Seq. ID no. 13609072
  misc_feature (1)..(318): Homolog of NCBI NO: 15230073 NR Description: type 1 membrane protein -related [Arabidopsis
  misc_feature (206)..(318): Homolog of NCBI NO: 40716478 NR Description: putative membrane protein type I [Musa acuminata]

SEQ ID NO: 101921 - DNA, 1275 bp, Arabidopsis thaliana
  misc_feature (1)..(1275): Ceres Seq. ID no. 13609073
  misc_feature: MA Experiment ID: 108573 Result: Up-regulated in Transcription
  misc_feature: MA Experiment 108573 PARAMETER Experiment Name: At_Drought_cDNA_P Parameter: Timepoint (hr) Value: 6
  misc_feature: MA Experiment 108573 PARAMETER Experiment Name: At_Drought_cDNA_P Parameter: Tissue Value: Aerial
  misc_feature: MA Experiment 108573 PARAMETER Experiment Name: At_Drought_cDNA_P Parameter: Treatment Value: Drought vs. No Drought
  misc_feature: MA Experiment ID: 108577 Result: Down-regulated in Transcription
  misc_feature: MA Experiment 108577 PARAMETER Experiment Name: At_42deg_Heat_cDNA_P Parameter: Temperature (deg C) Value: 42 vs. 22
  misc_feature: MA Experiment 108577 PARAMETER Experiment Name: At_42deg_Heat_cDNA_P Parameter: Timepoint (hr) Value: 6
  misc_feature: MA Experiment 108577 PARAMETER Experiment Name: At_42deg_Heat_cDNA_P Parameter: Tissue Value: Aerial
  misc_feature: MA Experiment ID: 108595 Result: Up-regulated in Transcription
  misc_feature: MA Experiment 108595 PARAMETER Experiment Name: At_Ler-pi_Ovule_cDNA_P Parameter: Plant Line Value: null
  misc_feature: MA Experiment ID: 20000111 Result: Down-regulated in Transcription
  misc_feature: MA Experiment 20000111 PARAMETER Experiment Name: At_42deg_Heat_cDNA_P Parameter: Temperature (deg C) Value: 42 vs. 22
  misc_feature: MA Experiment 20000111 PARAMETER Experiment Name: At_42deg_Heat_cDNA_P Parameter: Timepoint (hr) Value: 6
  misc_feature: MA Experiment 20000111 PARAMETER Experiment Name: At_42deg_Heat_cDNA_P Parameter: Tissue Value: Aerial
  misc_feature: MA Experiment ID: 20000113 Result: Down-regulated in Transcription
  misc_feature: MA Experiment 20000113 PARAMETER Experiment Name: At_42deg_Heat_cDNA_P Parameter: Temperature (deg C) Value: 42 vs. 22
  misc_feature: MA Experiment 20000113 PARAMETER Experiment Name: At_42deg_Heat_cDNA_P Parameter: Timepoint (hr) Value: 8
  misc_feature: MA Experiment 20000113 PARAMETER Experiment Name: At_42deg_Heat_cDNA_P Parameter: Tissue Value: Aerial
  misc_feature: MA Experiment ID: 20000214 Result: Down-regulated in Transcription
  misc_feature: MA Experiment 20000214 PARAMETER Experiment Name: At_4deg_Cold_P Parameter: Timepoint (hr) Value: 6
  misc_feature: MA Experiment ID: 20000495 Result: Up-regulated in Transcription
  misc_feature: MA Experiment 20000495 PARAMETER Experiment Name: At_Guard_Cells_P Parameter: Harvest Date Value: 8/2/2002
  misc_feature: MA Experiment 20000495 PARAMETER Experiment Name: At_Guard_Cells_P Parameter: Organism Value: A. thaliana
  misc_feature: MA Experiment 20000495 PARAMETER Experiment Name: At_Guard_Cells_P Parameter: Tissue Value: Guard Cells vs. Leaves
aaagaagttcctcattcaaaaaagatttctcagccatcaaaattctctttctcttcatccaacaaaaaaaaagcatacctctttttcttccatatagataagttaattaagaaaacgaattatcaggttttgtttcggctgatctgaggaagttcatctatggatacggctcagtggccacaggagattgtagtgaagcccttggaagaaatagtaacaaacacatgcccaaagccgcaaccgcaaccgcttcaaccgcagcagccaccgtcggtgggtggagagaggaaggcaaggccagaaaaggatcaagctgtaaactgtccgagatgtaactcaaccaacacaaagttttgttactacaacaattatagtttgacgcagccaagatacttctgcaaaggttgtagaaggtattggaccgaaggcggttcgcttaggaacattcctgttggcggtggctcaagaaagaacaagagatctcactcttcttcttctgatattagtaacaatcactcggattctacacaaccagctacaaagaagcatctctctgatcatcaccaccacctcatgagcatgtctcaacaaggtttgaccggtcaaaaccctaaattccttgagacgacccaacaagatctcaatttaggtttttcaccacatgggatgattaggaccaacttcactgacctcatccacaacattggcaacaacaccaacaagagcaacaacaataacaatccattgattgtttcttcatgttctgccatggctacttcttctctggatctcataagaaacaatagtaacaatgggaattcttcaaattcttccttcatgggatttccagttcataatcaagatccagcatcaggagggttttcaatgcaagatcattacaagccttgcaacacaaacaccacactgctagggttttcattagatcatcatcataataatggatttcatggagggtttcaaggaggagaagaaggtggagaaggtggtgatgatgtgaatggaaggcacttgtttccttttgaggatttgaaattgccagtttcttcttcatcagcaacaattaatgtcgacattaatgaacatcagaagcgaggaagcggtagtgatgcagctgctacgtctggtgggtattggactgggatgttgagtggaggatcatggtgctaattaatttctcggtttggttgatgaagatagtactattagtggttaattattgctatttatttaattaatcaatatgttcttaatttc

SEQ ID NO: 101922 - protein, 342 aa, Arabidopsis thaliana
  peptide (1)..(342): Ceres Seq. ID no. 13609074
  misc_feature (48)..(110): Pfam Name: Dof domain, zinc finger Pfam Description: Dof domain, zinc finger
  misc_feature (1)..(342): Homolog of NCBI NO: 18416267 NR Description: Dof zinc finger protein [Arabidopsis thaliana]
  misc_feature (1)..(342): Homolog of NCBI NO: 21593274 NR Description: unknown [Arabidopsis thaliana]
  misc_feature (8)..(342): Homolog of NCBI NO: 7487175 NR Description: hypothetical protein T19F6.50 - Arabidopsis >gi|5668634|emb|CAB51649.1| putative protein [Arabidopsis >gi|7269255|emb|CAB81324.1| putative protein [Arabidopsis
  misc_feature (139)..(342): Homolog of NCBI NO: 14335082 NR Description: AT4g24060/T19F6_50 [Arabidopsis thaliana]
  misc_feature (1)..(340): Homolog of NCBI NO: 18408092 NR Description: Dof zinc finger protein [Arabidopsis thaliana] putative Dof zinc finger protein [Arabidopsis thaliana]
  misc_feature (1)..(340): Homolog of NCBI NO: 21537120 NR Description: zinc finger protein, putative [Arabidopsis
  misc_feature (15)..(340): Homolog of NCBI NO: 25404940 NR Description: protein F1N19.19 [imported] - Arabidopsis >gi|6633819|gb|AAF19678.1|AC009519_12 F1N19.19 [Arabidopsis
  misc_feature (36)..(340): Homolog of NCBI NO: 4996640 NR Description: Dof zinc finger protein [Oryza sativa]
  misc_feature (36)..(340): Homolog of NCBI NO: 38344272 NR Description: OSJNBa0005N02.10 [Oryza sativa (japonica
  misc_feature (38)..(341): Homolog of NCBI NO: 24211633 NR Description: DOF zinc finger protein DAG2 (Dof affecting thaliana] >gi|13624641|emb|CAC36940.1| putative DNA binding
MDTAQWPQEIVVKPLEEIVTNTCPKPQPQPLQPQQPPSVGGERKARPEKDQAVNCPRCNSTNTKFCYYNNYSLTQPRYFCKGCRRYWTEGGSLRNIPVGGGSRKNKRSHSSSSDISNNHSDSTQPATKKHLSDHHHHLMSMSQQGLTGQNPKFLETTQQDLNLGFSPHGMIRTNFTDLIHNIGNNTNKSNNNNNPLIVSSCSAMATSSLDLIRNNSNNGNSSNSSFMGFPVHNQDPASGGFSMQDHYKPCNTNTTLLGFSLDHHHNNGFHGGFQGGEEGGEGGDDVNGRHLFPFEDLKLPVSSSSATINVDINEHQKRGSGSDAAATSGGYWTGMLSGGSWC

SEQ ID NO: 101923 - protein, 204 aa, Arabidopsis thaliana; identical to SEQ ID NO: 84981
  peptide (1)..(204): Ceres Seq. ID no. 13609075
  misc_feature (1)..(204): Homolog of NCBI NO: 18416267 NR Description: Dof zinc finger protein [Arabidopsis thaliana]
  misc_feature (1)..(204): Homolog of NCBI NO: 21593274 NR Description: unknown [Arabidopsis thaliana]
  misc_feature (1)..(204): Homolog of NCBI NO: 7487175 NR Description: hypothetical protein T19F6.50 - Arabidopsis >gi|5668634|emb|CAB51649.1| putative protein [Arabidopsis >gi|7269255|emb|CAB81324.1| putative protein [Arabidopsis
  misc_feature (1)..(204): Homolog of NCBI NO: 14335082 NR Description: AT4g24060/T19F6_50 [Arabidopsis thaliana]
  misc_feature (1)..(202): Homolog of NCBI NO: 18408092 NR Description: Dof zinc finger protein [Arabidopsis thaliana] putative Dof zinc finger protein [Arabidopsis thaliana]
  misc_feature (1)..(202): Homolog of NCBI NO: 21537120 NR Description: zinc finger protein, putative [Arabidopsis
  misc_feature (1)..(202): Homolog of NCBI NO: 25404940 NR Description: protein F1N19.19 [imported] - Arabidopsis >gi|6633819|gb|AAF19678.1|AC009519_12 F1N19.19 [Arabidopsis
  misc_feature (1)..(202): Homolog of NCBI NO: 4996640 NR Description: Dof zinc finger protein [Oryza sativa]
  misc_feature (1)..(202): Homolog of NCBI NO: 38344272 NR Description: OSJNBa0005N02.10 [Oryza sativa (japonica
  misc_feature (1)..(203): Homolog of NCBI NO: 24211633 NR Description: DOF zinc finger protein DAG2 (Dof affecting thaliana] >gi|13624641|emb|CAC36940.1| putative DNA binding

SEQ ID NO: 101924 - protein, 202 aa, Arabidopsis thaliana; identical to SEQ ID NO: 84982
  peptide (1)..(202): Ceres Seq. ID no. 13609076
  misc_feature (1)..(202): Homolog of NCBI NO: 18416267 NR Description: Dof zinc finger protein [Arabidopsis thaliana]
  misc_feature (1)..(202): Homolog of NCBI NO: 21593274 NR Description: unknown [Arabidopsis thaliana]
  misc_feature (1)..(202): Homolog of NCBI NO: 7487175 NR Description: hypothetical protein T19F6.50 - Arabidopsis >gi|5668634|emb|CAB51649.1| putative protein [Arabidopsis >gi|7269255|emb|CAB81324.1| putative protein [Arabidopsis
  misc_feature (1)..(202): Homolog of NCBI NO: 14335082 NR Description: AT4g24060/T19F6_50 [Arabidopsis thaliana]
  misc_feature (1)..(200): Homolog of NCBI NO: 18408092 NR Description: Dof zinc finger protein [Arabidopsis thaliana] putative Dof zinc finger protein [Arabidopsis thaliana]
  misc_feature (1)..(200): Homolog of NCBI NO: 21537120 NR Description: zinc finger protein, putative [Arabidopsis
  misc_feature (1)..(200): Homolog of NCBI NO: 25404940 NR Description: protein F1N19.19 [imported] - Arabidopsis >gi|6633819|gb|AAF19678.1|AC009519_12 F1N19.19 [Arabidopsis
  misc_feature (1)..(200): Homolog of NCBI NO: 4996640 NR Description: Dof zinc finger protein [Oryza sativa]
  misc_feature (1)..(200): Homolog of NCBI NO: 38344272 NR Description: OSJNBa0005N02.10 [Oryza sativa (japonica
  misc_feature (1)..(201): Homolog of NCBI NO: 24211633 NR Description: DOF zinc finger protein DAG2 (Dof affecting thaliana] >gi|13624641|emb|CAC36940.1| putative DNA binding

SEQ ID NO: 101925 - DNA, 1469 bp, Arabidopsis thaliana
  misc_feature (1)..(1469): Ceres Seq. ID no. 13609077
  misc_feature: MA Experiment ID: 108473 Result: Up-regulated in Transcription
  misc_feature: MA Experiment 108473 PARAMETER Experiment Name: At_Drought_Flowers_cDNA_P Parameter: Timepoint (hr) Value: 7 d
  misc_feature: MA Experiment 108473 PARAMETER Experiment Name: At_Drought_Flowers_cDNA_P Parameter: Tissue Value: Flower
  misc_feature: MA Experiment 108473 PARAMETER Experiment Name: At_Drought_Flowers_cDNA_P Parameter: Treatment Value: Drought vs. No Drought
  misc_feature: MA Experiment ID: 108488 Result: Down-regulated in Transcription
  misc_feature: MA Experiment ID: 108501 Result: Up-regulated in Transcription
  misc_feature: MA Experiment 108501 PARAMETER Experiment Name: At_ap2_floral_buds_cDNA_P Parameter: Plant Line Value: ap2 (Ler.)
  misc_feature: MA Experiment 108501 PARAMETER Experiment Name: At_ap2_floral_buds_cDNA_P Parameter: Tissue Value: Closed Flower
  misc_feature: MA Experiment ID: 108561 Result: Up-regulated in Transcription
  misc_feature: MA Experiment 108561 PARAMETER Experiment Name: At_100uM_ABA_cDNA_P Parameter: Timepoint (hr) Value: 6
  misc_feature: MA Experiment 108561 PARAMETER Experiment Name: At_100uM_ABA_cDNA_P Parameter: Tissue Value: Aerial
  misc_feature: MA Experiment 108561 PARAMETER Experiment Name: At_100uM_ABA_cDNA_P Parameter: Treatment Value: 100uM ABA vs. No Treatment
  misc_feature: MA Experiment ID: 108572 Result: Up-regulated in Transcription
  misc_feature: MA Experiment 108572 PARAMETER Experiment Name: At_Drought_cDNA_P Parameter: Timepoint (hr) Value: 1
  misc_feature: MA Experiment 108572 PARAMETER Experiment Name: At_Drought_cDNA_P Parameter: Tissue Value: Aerial
  misc_feature: MA Experiment 108572 PARAMETER Experiment Name: At_Drought_cDNA_P Parameter: Treatment Value: Drought vs. No Drought
  misc_feature: MA Experiment ID: 108573 Result: Up-regulated in Transcription
  misc_feature: MA Experiment 108573 PARAMETER Experiment Name: At_Drought_cDNA_P Parameter: Timepoint (hr) Value: 6
  misc_feature: MA Experiment 108573 PARAMETER Experiment Name: At_Drought_cDNA_P Parameter: Tissue Value: Aerial
  misc_feature: MA Experiment 108573 PARAMETER Experiment Name: At_Drought_cDNA_P Parameter: Treatment Value: Drought vs. No Drought
  misc_feature: MA Experiment ID: 108605 Result: Up-regulated in Transcription
  misc_feature: MA Experiment 108605 PARAMETER Experiment Name: At_100uM_ABA_cDNA_P Parameter: Timepoint (hr) Value: 6
  misc_feature: MA Experiment 108605 PARAMETER Experiment Name: At_100uM_ABA_cDNA_P Parameter: Tissue Value: Aerial
  misc_feature: MA Experiment 108605 PARAMETER Experiment Name: At_100uM_ABA_cDNA_P Parameter: Treatment Value: 100uM ABA vs. No Treatment
  misc_feature: MA Experiment ID: 108607 Result: Up-regulated in Transcription
  misc_feature: MA Experiment 108607 PARAMETER Experiment Name: At_100uM_ABA_cDNA_P Parameter: Timepoint (hr) Value: 4
  misc_feature: MA Experiment 108607 PARAMETER Experiment Name: At_100uM_ABA_cDNA_P Parameter: Tissue Value: Aerial
  misc_feature: MA Experiment 108607 PARAMETER Experiment Name: At_100uM_ABA_cDNA_P Parameter: Treatment Value: 100uM ABA vs. No Treatment
  misc_feature: MA Experiment ID: 108608 Result: Up-regulated in Transcription
  misc_feature: MA Experiment 108608 PARAMETER Experiment Name: At_100uM_ABA_cDNA_P Parameter: Timepoint (hr) Value: 1
  misc_feature: MA Experiment 108608 PARAMETER Experiment Name: At_100uM_ABA_cDNA_P Parameter: Tissue Value: Aerial
  misc_feature: MA Experiment 108608 PARAMETER Experiment Name: At_100uM_ABA_cDNA_P Parameter: Treatment Value: 100uM ABA vs. No Treatment
  misc_feature: MA Experiment ID: 108609 Result: Up-regulated in Transcription
  misc_feature: MA Experiment 108609 PARAMETER Experiment Name: At_100uM_ABA_cDNA_P Parameter: Timepoint (hr) Value: 24
  misc_feature: MA Experiment 108609 PARAMETER Experiment Name: At_100uM_ABA_cDNA_P Parameter: Tissue Value: Aerial
  misc_feature: MA Experiment 108609 PARAMETER Experiment Name: At_100uM_ABA_cDNA_P Parameter: Treatment Value: 100uM ABA vs. No Treatment
  misc_feature: MA Experiment ID: 20000086 Result: Up-regulated in Transcription
  misc_feature: MA Experiment 20000086 PARAMETER Experiment Name: At_100uM_ABA_Mutants_cDNA_P Parameter: Plant Line Value: CS22
  misc_feature: MA Experiment 20000086 PARAMETER Experiment Name: At_100uM_ABA_Mutants_cDNA_P Parameter: Timepoint (hr) Value: 6
  misc_feature: MA Experiment 20000086 PARAMETER Experiment Name: At_100uM_ABA_Mutants_cDNA_P Parameter: Tissue Value: Aerial
  misc_feature: MA Experiment 20000086 PARAMETER Experiment Name: At_100uM_ABA_Mutants_cDNA_P Parameter: Treatment Value: 100uM ABA vs. No Treatment
  misc_feature: MA Experiment ID: 20000087 Result: Up-regulated in Transcription
  misc_feature: MA Experiment 20000087 PARAMETER Experiment Name: At_100uM_ABA_Mutants_cDNA_P Parameter: Plant Line Value: WS
  misc_feature: MA Experiment 20000087 PARAMETER Experiment Name: At_100uM_ABA_Mutants_cDNA_P Parameter: Timepoint (hr) Value: 6
  misc_feature: MA Experiment 20000087 PARAMETER Experiment Name: At_100uM_ABA_Mutants_cDNA_P Parameter: Tissue Value: Aerial
  misc_feature: MA Experiment 20000087 PARAMETER Experiment Name: At_100uM_ABA_Mutants_cDNA_P Parameter: Treatment Value: 100uM ABA vs. No Treatment
  misc_feature: MA Experiment ID: 20000088 Result: Up-regulated in Transcription
  misc_feature: MA Experiment 20000088 PARAMETER Experiment Name: At_100uM_ABA_Mutants_cDNA_P Parameter: Plant Line Value: Landsberg
  misc_feature: MA Experiment 20000088 PARAMETER Experiment Name: At_100uM_ABA_Mutants_cDNA_P Parameter: Timepoint (hr) Value: 6
  misc_feature: MA Experiment 20000088 PARAMETER Experiment Name: At_100uM_ABA_Mutants_cDNA_P Parameter: Tissue Value: Aerial
  misc_feature: MA Experiment 20000088 PARAMETER Experiment Name: At_100uM_ABA_Mutants_cDNA_P Parameter: Treatment Value: 100uM ABA vs. No Treatment
  misc_feature: MA Experiment ID: 20000113 Result: Down-regulated in Transcription
  misc_feature: MA Experiment 20000113 PARAMETER Experiment Name: At_42deg_Heat_cDNA_P Parameter: Temperature (deg C) Value: 42 vs. 22
  misc_feature: MA Experiment 20000113 PARAMETER Experiment Name: At_42deg_Heat_cDNA_P Parameter: Timepoint (hr) Value: 8
  misc_feature: MA Experiment 20000113 PARAMETER Experiment Name: At_42deg_Heat_cDNA_P Parameter: Tissue Value: Aerial
  misc_feature: MA Experiment ID: 20000117 Result: Up-regulated in Transcription
  misc_feature: MA Experiment 20000117 PARAMETER Experiment Name: At_100uM_ABA_Mutants_cDNA_P Parameter: Plant Line Value: Columbia
  misc_feature: MA Experiment 20000117 PARAMETER Experiment Name: At_100uM_ABA_Mutants_cDNA_P Parameter: Timepoint (hr) Value: 6
  misc_feature: MA Experiment 20000117 PARAMETER Experiment Name: At_100uM_ABA_Mutants_cDNA_P Parameter: Tissue Value: Aerial
  misc_feature: MA Experiment 20000117 PARAMETER Experiment Name: At_100uM_ABA_Mutants_cDNA_P Parameter: Treatment Value: 100uM ABA vs. No Treatment
  misc_feature: MA Experiment ID: 20000144 Result: Up-regulated in Transcription
  misc_feature: MA Experiment 20000144 PARAMETER Experiment Name: At_42deg_Heat_cDNA_P Parameter: Temperature (deg C) Value: 42 vs. 22
  misc_feature: MA Experiment 20000144 PARAMETER Experiment Name: At_42deg_Heat_cDNA_P Parameter: Timepoint (hr) Value: 1
  misc_feature: MA Experiment 20000144 PARAMETER Experiment Name: At_42deg_Heat_cDNA_P Parameter: Tissue Value: Aerial
  misc_feature: MA Experiment ID: 20000264 Result: Up-regulated in Transcription
  misc_feature: MA Experiment 20000264 PARAMETER Experiment Name: At_Open_Flower_P Parameter: Age (day) Value: 21
  misc_feature: MA Experiment 20000264 PARAMETER Experiment Name: At_Open_Flower_P Parameter: Plant Line Value: WS
  misc_feature: MA Experiment 20000264 PARAMETER Experiment Name: At_Open_Flower_P Parameter: Tissue Value: Open Flower vs. Whole Plant
  misc_feature: MA Experiment ID: 20000265 Result: Up-regulated in Transcription
  misc_feature: MA Experiment 20000265 PARAMETER Experiment Name: At_Open_Flower_P Parameter: Age (day) Value: 21
  misc_feature: MA Experiment 20000265 PARAMETER Experiment Name: At_Open_Flower_P Parameter: Plant Line Value: WS
  misc_feature: MA Experiment 20000265 PARAMETER Experiment Name: At_Open_Flower_P Parameter: Tissue Value: Closed Flower vs. Whole Plant
  misc_feature: MA Experiment ID: 20000286 Result: Up-regulated in Transcription
  misc_feature: MA Experiment 20000286 PARAMETER Experiment Name: At_Open_Flower_P Parameter: Age (day) Value: 21
  misc_feature: MA Experiment 20000286 PARAMETER Experiment Name: At_Open_Flower_P Parameter: Plant Line Value: WS
  misc_feature: MA Experiment 20000286 PARAMETER Experiment Name: At_Open_Flower_P Parameter: Tissue Value: Half Open vs. Whole Plant
  misc_feature: MA Experiment ID: 20000794 Result: Up-regulated in Transcription
  misc_feature: MA Experiment 20000794 PARAMETER Experiment Name: At_Petals_P Parameter: Age (day) Value: 23-25 days
  misc_feature: MA Experiment 20000794 PARAMETER Experiment Name: At_Petals_P Parameter: Plant Line Value: WS
  misc_feature: MA Experiment 20000794 PARAMETER Experiment Name: At_Petals_P Parameter: Tissue Value: Petals vs. Whole plant
  misc_feature: MA Experiment ID: 20001556 Result: Up-regulated in Transcription
  misc_feature: MA Experiment 20001556 PARAMETER Experiment Name: At_Drought_Soil_Dry_P Parameter: Age (day) Value: 26
  misc_feature: MA Experiment 20001556 PARAMETER Experiment Name: At_Drought_Soil_Dry_P Parameter: Organism Value: A. thaliana
  misc_feature: MA Experiment 20001556 PARAMETER Experiment Name: At_Drought_Soil_Dry_P Parameter: Plant Line Value: WS
  misc_feature: MA Experiment 20001556 PARAMETER Experiment Name: At_Drought_Soil_Dry_P Parameter: Post Timepoint (hr) Value: None
  misc_feature: MA Experiment 20001556 PARAMETER Experiment Name: At_Drought_Soil_Dry_P Parameter: Post-Treatment Value: None
  misc_feature: MA Experiment 20001556 PARAMETER Experiment Name: At_Drought_Soil_Dry_P Parameter: Timepoint (day) Value: 12
  misc_feature: MA Experiment 20001556 PARAMETER Experiment Name: At_Drought_Soil_Dry_P Parameter: Treatment Value: Drought vs. No Drought
  misc_feature: MA Experiment ID: 20001904 Result: Up-regulated in Transcription
  misc_feature: MA Experiment 20001904 PARAMETER Experiment Name: At_Drought_Reproduction_P Parameter: Age (day) Value: 37
  misc_feature: MA Experiment 20001904 PARAMETER Experiment Name: At_Drought_Reproduction_P Parameter: Organism Value: A. thaliana
  misc_feature: MA Experiment 20001904 PARAMETER Experiment Name: At_Drought_Reproduction_P Parameter: Plant Line Value: WS
  misc_feature: MA Experiment 20001904 PARAMETER Experiment Name: At_Drought_Reproduction_P Parameter: Timepoint (day) Value: 7
  misc_feature: MA Experiment 20001904 PARAMETER Experiment Name: At_Drought_Reproduction_P Parameter: Tissue Value: Rosettes
  misc_feature: MA Experiment 20001904 PARAMETER Experiment Name: At_Drought_Reproduction_P Parameter: Treatment Value: Drought vs. No Drought
  misc_feature: MA Experiment ID: 20001905 Result: Up-regulated in Transcription
  misc_feature: MA Experiment 20001905 PARAMETER Experiment Name: At_Drought_Reproduction_P Parameter: Age (day) Value: 40
  misc_feature: MA Experiment 20001905 PARAMETER Experiment Name: At_Drought_Reproduction_P Parameter: Organism Value: A. thaliana
  misc_feature: MA Experiment 20001905 PARAMETER Experiment Name: At_Drought_Reproduction_P Parameter: Plant Line Value: WS
  misc_feature: MA Experiment 20001905 PARAMETER Experiment Name: At_Drought_Reproduction_P Parameter: Timepoint (day) Value: 10
  misc_feature: MA Experiment 20001905 PARAMETER Experiment Name: At_Drought_Reproduction_P Parameter: Tissue Value: Rosettes
  misc_feature: MA Experiment 20001905 PARAMETER Experiment Name: At_Drought_Reproduction_P Parameter: Treatment Value: Drought vs. No Drought
  misc_feature: MA Experiment ID: 20001906 Result: Up-regulated in Transcription
  misc_feature: MA Experiment 20001906 PARAMETER Experiment Name: At_Drought_Reproduction_P Parameter: Age (day) Value: 35
  misc_feature: MA Experiment 20001906 PARAMETER Experiment Name: At_Drought_Reproduction_P Parameter: Organism Value: A. thaliana
  misc_feature: MA Experiment 20001906 PARAMETER Experiment Name: At_Drought_Reproduction_P Parameter: Plant Line Value: WS
  misc_feature: MA Experiment 20001906 PARAMETER Experiment Name: At_Drought_Reproduction_P Parameter: Timepoint (day) Value: 5
  misc_feature: MA Experiment 20001906 PARAMETER Experiment Name: At_Drought_Reproduction_P Parameter: Tissue Value: Siliques
  misc_feature: MA Experiment 20001906 PARAMETER Experiment Name: At_Drought_Reproduction_P Parameter: Treatment Value: Drought vs. No Drought
  misc_feature: MA Experiment ID: 20001910 Result: Up-regulated in Transcription
  misc_feature: MA Experiment 20001910 PARAMETER Experiment Name: At_Drought_Reproduction_P Parameter: Age (day) Value: 37
  misc_feature: MA Experiment 20001910 PARAMETER Experiment Name: At_Drought_Reproduction_P Parameter: Organism Value: A. thaliana
  misc_feature: MA Experiment 20001910 PARAMETER Experiment Name: At_Drought_Reproduction_P Parameter: Plant Line Value: WS
  misc_feature: MA Experiment 20001910 PARAMETER Experiment Name: At_Drought_Reproduction_P Parameter: Timepoint (day) Value: 7
  misc_feature: MA Experiment 20001910 PARAMETER Experiment Name: At_Drought_Reproduction_P Parameter: Tissue Value: Flowers
  misc_feature: MA Experiment 20001910 PARAMETER Experiment Name: At_Drought_Reproduction_P Parameter: Treatment Value: Drought vs. No Drought
  misc_feature: MA Experiment ID: 20001911 Result: Up-regulated in Transcription
  misc_feature: MA Experiment 20001911 PARAMETER Experiment Name: At_Drought_Reproduction_P Parameter: Age (day) Value: 40
  misc_feature: MA Experiment 20001911 PARAMETER Experiment Name: At_Drought_Reproduction_P Parameter: Organism Value: A. thaliana
  misc_feature: MA Experiment 20001911 PARAMETER Experiment Name: At_Drought_Reproduction_P Parameter: Plant Line Value: WS
  misc_feature: MA Experiment 20001911 PARAMETER Experiment Name: At_Drought_Reproduction_P Parameter: Timepoint (day) Value: 10
  misc_feature: MA Experiment 20001911 PARAMETER Experiment Name: At_Drought_Reproduction_P Parameter: Tissue Value: Flowers
  misc_feature: MA Experiment 20001911 PARAMETER Experiment Name: At_Drought_Reproduction_P Parameter: Treatment Value: Drought vs. No Drought
atcaatagttcaatactaagaaaccggcctatatatatatatttgtggtcactaatttctccaaaaaccagttgccttccgtaaaaagatggaacctcagagaaaacactcgacagccctccacacgtgtcatccctgccggcgaaccattccatacagaatctacgccgtatttcacacgtgtggcatcatagctctcatgtatcaccatgtacactcaattgtcaacgcaaacaacactctaataacatgtcttcttctcctctccgatattgttctcgccttcatgtgggcaaccacaacttccctccggttaaacccgattcatcggaccgagtaccctgaaaaatatgctgctaaaccggaggactttccaaagctggacgtttttatatgcacggctgatccgtacaaggagcctccgatgatggtggttaacaccgctttatcggtgatggcttacgagtatccgtctcataagatctcagtgtacgtatcggacgatggaggatcttccttgactttgtttgctcttatggaggctgccaagttctctaagcattggttgcccttttgcaagaataacaatgttcaagatcgctctcctgaagtttatttttcttcaaagtcacattcttcgagtgatgaagctgaaaatcttaagatgatgtacgaagacatgaagagtagagtcgaacatgtggtcgagagcggaaaagttgagactgcgtttatcgcatgcgatcaatttagttgtgtgttcgatctgtggacagataaattcactcgtcatgaccatcctaccattattatggtgctacaacataacgaaacagagatgatgccaaaccttatatatgtttcaagagaaaagagtaaagtttcaccacatcatttcaaagccggtgctcttaatactttgttacgtgtatctgccgtgatgacaaactcaccaatcattctaacactagattgtgacatgtactcaaacaatcctacaacaccacttcatgctctgtgctatttgtcagaccctaaaatcaattttgatttaggatttgtgcaatttcctcaaaaatttcaaggagtaaacaaaaatgatatttatgcatccgagctcaaacgcccatttgacatcaacacggttgggtttgatggacttatgggaccagttcatatgggaactgggtgtttcttcaatcgacgggcgttttatgggcctccgactactttgattttgcctgagatagaaacatttgggccaaatcggattgccgataagcccattaaagcccaagatattttggcgttggcacacgatgtagcaggatgtaactacgagtgcaacaccaattggggatccaaggtaagattaaaatgaactttagctttcttttatgtatgttgattttttggttatgtttacagattttgtttcttttacatcaactagtcttctcaaaatccat

SEQ ID NO: 101926 - protein, 430 aa, Arabidopsis thaliana; identical to SEQ ID NO: 40164
  peptide (1)..(430): Ceres Seq. ID no. 13609078
  misc_feature (10)..(427): Pfam Name: Cellulose synthase Pfam Description: Cellulose synthase
  misc_feature (1)..(430): Homolog of NCBI NO: 17380774 NR Description: unknown protein [Arabidopsis thaliana]
  misc_feature (1)..(427): Homolog of NCBI NO: 30686386 NR Description: cellulose synthase - related [Arabidopsis >gi|17979143|gb|AAL49829.1| unknown protein [Arabidopsis >gi|20465365|gb|AAM20086.1| unknown protein [Arabidopsis
  misc_feature (1)..(427): Homolog of NCBI NO: 2262115 NR Description: cellulose synthase isolog [Arabidopsis thaliana]
  misc_feature (1)..(430): Homolog of NCBI NO: 21536834 NR Description: unknown [Arabidopsis thaliana]
  misc_feature (1)..(243): Homolog of NCBI NO: 7487588 NR Description: hypothetical protein T32A16.170 - Arabidopsis >gi|4972104|emb|CAB43900.1| putative protein [Arabidopsis >gi|7269249|emb|CAB81318.1| putative protein [Arabidopsis
  misc_feature (278)..(427): Homolog of NCBI NO: 7487588 NR Description: hypothetical protein T32A16.170 - Arabidopsis >gi|4972104|emb|CAB43900.1| putative protein [Arabidopsis >gi|7269249|emb|CAB81318.1| putative protein [Arabidopsis
  misc_feature (1)..(426): Homolog of NCBI NO: 2262116 NR Description: cellulose synthase isolog [Arabidopsis thaliana]
  misc_feature (1)..(243): Homolog of NCBI NO: 15233649 NR Description: cellulose synthase - related [Arabidopsis
  misc_feature (279)..(427): Homolog of NCBI NO: 15233649 NR Description: cellulose synthase - related [Arabidopsis
  misc_feature (1)..(243): Homolog of NCBI NO: 15233653 NR Description: cellulose synthase - related [Arabidopsis

SEQ ID NO: 101927 - protein, 393 aa, Arabidopsis thaliana; identical to SEQ ID NO: 40165
  peptide (1)..(393): Ceres Seq. ID no. 13609079
  misc_feature (1)..(390): Pfam Name: Cellulose synthase Pfam Description: Cellulose synthase
  misc_feature (1)..(393): Homolog of NCBI NO: 17380774 NR Description: unknown protein [Arabidopsis thaliana]
  misc_feature (1)..(390): Homolog of NCBI NO: 30686386 NR Description: cellulose synthase - related [Arabidopsis >gi|17979143|gb|AAL49829.1| unknown protein [Arabidopsis >gi|20465365|gb|AAM20086.1| unknown protein [Arabidopsis
  misc_feature (1)..(390): Homolog of NCBI NO: 2262115 NR Description: cellulose synthase isolog [Arabidopsis thaliana]
  misc_feature (1)..(393): Homolog of NCBI NO: 21536834 NR Description: unknown [Arabidopsis thaliana]
  misc_feature (1)..(206): Homolog of NCBI NO: 7487588 NR Description: hypothetical protein T32A16.170 - Arabidopsis >gi|4972104|emb|CAB43900.1| putative protein [Arabidopsis >gi|7269249|emb|CAB81318.1| putative protein [Arabidopsis
  misc_feature (241)..(390): Homolog of NCBI NO: 7487588 NR Description: hypothetical protein T32A16.170 - Arabidopsis >gi|4972104|emb|CAB43900.1| putative protein [Arabidopsis >gi|7269249|emb|CAB81318.1| putative protein [Arabidopsis
  misc_feature (1)..(389): Homolog of NCBI NO: 2262116 NR Description: cellulose synthase isolog [Arabidopsis thaliana]
  misc_feature (1)..(206): Homolog of NCBI NO: 15233649 NR Description: cellulose synthase - related [Arabidopsis
  misc_feature (242)..(390): Homolog of NCBI NO: 15233649 NR Description: cellulose synthase - related [Arabidopsis
  misc_feature (1)..(206): Homolog of NCBI NO: 15233653 NR Description: cellulose synthase - related [Arabidopsis

SEQ ID NO: 101928 - protein, 364 aa, Arabidopsis thaliana; identical to SEQ ID NO: 40166
  peptide (1)..(364): Ceres Seq. ID no. 13609080
  misc_feature (1)..(361): Pfam Name: Cellulose synthase Pfam Description: Cellulose synthase
  misc_feature (1)..(364): Homolog of NCBI NO: 17380774 NR Description: unknown protein [Arabidopsis thaliana]
  misc_feature (1)..(361): Homolog of NCBI NO: 30686386 NR Description: cellulose synthase - related [Arabidopsis >gi|17979143|gb|AAL49829.1| unknown protein [Arabidopsis >gi|20465365|gb|AAM20086.1| unknown protein [Arabidopsis
  misc_feature (1)..(361): Homolog of NCBI NO: 2262115 NR Description: cellulose synthase isolog [Arabidopsis thaliana]
  misc_feature (1)..(364): Homolog of NCBI NO: 21536834 NR Description: unknown [Arabidopsis thaliana]
  misc_feature (1)..(177): Homolog of NCBI NO: 7487588 NR Description: hypothetical protein T32A16.170 - Arabidopsis >gi|4972104|emb|CAB43900.1| putative protein [Arabidopsis >gi|7269249|emb|CAB81318.1| putative protein [Arabidopsis
  misc_feature (212)..(361): Homolog of NCBI NO: 7487588 NR Description: hypothetical protein T32A16.170 - Arabidopsis >gi|4972104|emb|CAB43900.1| putative protein [Arabidopsis >gi|7269249|emb|CAB81318.1| putative protein [Arabidopsis
  misc_feature (1)..(360): Homolog of NCBI NO: 2262116 NR Description: cellulose synthase isolog [Arabidopsis thaliana]
  misc_feature (1)..(177): Homolog of NCBI NO: 15233649 NR Description: cellulose synthase - related [Arabidopsis
  misc_feature (213)..(361): Homolog of NCBI NO: 15233649 NR Description: cellulose synthase - related [Arabidopsis
  misc_feature (1)..(177): Homolog of NCBI NO: 15233653 NR Description: cellulose synthase - related [Arabidopsis

SEQ ID NO: 101929 - DNA, 1017 bp, Arabidopsis thaliana
  misc_feature (1)..(1017): Ceres Seq. ID no. 13609088
  misc_feature: MA Experiment ID: 108561 Result: Down-regulated in Transcription
  misc_feature: MA Experiment 108561 PARAMETER Experiment Name: At_100uM_ABA_cDNA_P Parameter: Timepoint (hr) Value: 6
  misc_feature: MA Experiment 108561 PARAMETER Experiment Name: At_100uM_ABA_cDNA_P Parameter: Tissue Value: Aerial
  misc_feature: MA Experiment 108561 PARAMETER Experiment Name: At_100uM_ABA_cDNA_P Parameter: Treatment Value: 100uM ABA vs. No Treatment
  misc_feature: MA Experiment ID: 108569 Result: Up-regulated in Transcription
  misc_feature: MA Experiment 108569 PARAMETER Experiment Name: At_0.001%_MeJA__cDNA_P Parameter: Timepoint (hr) Value: 6
  misc_feature: MA Experiment 108569 PARAMETER Experiment Name: At_0.001%_MeJA__cDNA_P Parameter: Tissue Value: Aerial
  misc_feature: MA Experiment 108569 PARAMETER Experiment Name: At_0.001%_MeJA__cDNA_P Parameter: Treatment Value: 0.001% MeJA vs. No Treatment
  misc_feature: MA Experiment ID: 108573 Result: Down-regulated in Transcription
  misc_feature: MA Experiment 108573 PARAMETER Experiment Name: At_Drought_cDNA_P Parameter: Timepoint (hr) Value: 6
  misc_feature: MA Experiment 108573 PARAMETER Experiment Name: At_Drought_cDNA_P Parameter: Tissue Value: Aerial
  misc_feature: MA Experiment 108573 PARAMETER Experiment Name: At_Drought_cDNA_P Parameter: Treatment Value: Drought vs. No Drought
  misc_feature: MA Experiment ID: 108574 Result: Up-regulated in Transcription
  misc_feature: MA Experiment 108574 PARAMETER Experiment Name: At_Wounding__cDNA_P Parameter: Timepoint (hr) Value: 1
  misc_feature: MA Experiment 108574 PARAMETER Experiment Name: At_Wounding__cDNA_P Parameter: Tissue Value: Aerial
  misc_feature: MA Experiment 108574 PARAMETER Experiment Name: At_Wounding__cDNA_P Parameter: Treatment Value: Wounding vs. No Wounding
  misc_feature: MA Experiment ID: 108595 Result: Down-regulated in Transcription
  misc_feature: MA Experiment 108595 PARAMETER Experiment Name: At_Ler-pi_Ovule_cDNA_P Parameter: Plant Line Value: null
  misc_feature: MA Experiment ID: 108668 Result: Down-regulated in Transcription
  misc_feature: MA Experiment 108668 PARAMETER Experiment Name: At_2mM_SA_cDNA_P Parameter: Plant Line Value: WS
  misc_feature: MA Experiment 108668 PARAMETER Experiment Name: At_2mM_SA_cDNA_P Parameter: Timepoint (hr) Value: 6
  misc_feature: MA Experiment 108668 PARAMETER Experiment Name: At_2mM_SA_cDNA_P Parameter: Treatment Value: 2mM SA vs. No Treatment
atggcttccatggatcacaatcattttctttttcctctcctcttcatcatcatcatctcttccttgcacgttttgcgtgcttcgaccacaccttcacactcacacaaactaaaatccgccactaccattagaaaaatcaaccgtagaggaccttacattggccttgtgacggtctttgagaccgaagaagatgcttttctcggcagtgttgatttcagactcgatcctacgcatcctttcctcgatctctctggaagacgttttcgtatagggaagattcatggaaagaaggttgtgtatgtcagatgtgggataggaatggtgaacgcagcagcagcaacacaacaaatgatagatgtgttcagtgtgaaagggattgtgcattttgggattgctggaaatataaacaactcgatgtccataggagatgtgagcatccctaagcaaatcacgaatgctggcttgtgggattggctgaatccaggcaaagcaaaaggaaatgaggatgtagcgtacttagatgtcgggaactataatgttccacaaggaaacaataagttaggaactattggatacagttacgaggaattatattcagtcagtggtcacatcaattcaccaaagaaagtgttttggattaatacaactcaagagtggcttcatcttgcagctgatcttgagaagatggagctattgcagtgtgtgaatgcaagtctgtgtcttccaaataaacccaaagtagtagttggattaaaagcagccactgctgacatatttgtggataatgcagcctatagaaatttcttatacgatacttttggagtttcctcctcagacatggagagttctgctgtggccatgacttgcgtgtcaaatgggtatcccctaattgtgataagaggattatcagatttagcaggagtaggagataacactgttcgaaagtttggatctttggctgccactaacactgccaaagctgttttagagttcattaaaaagctcccaccgtcataa

SEQ ID NO: 101930 - protein, 338 aa, Arabidopsis thaliana
  peptide (1)..(338): Ceres Seq. ID no. 13609089
  misc_feature (52)..(332): Pfam Name: Phosphorylase family Pfam Description: Phosphorylase family
  misc_feature (1)..(338): Homolog of NCBI NO: 18416327 NR Description: expressed protein [Arabidopsis thaliana] unknown protein [Arabidopsis thaliana]
  misc_feature (1)..(338): Homolog of NCBI NO: 21617914 NR Description: unknown [Arabidopsis thaliana]
  misc_feature (4)..(338): Homolog of NCBI NO: 7487317 NR Description: hypothetical protein T22A6.170 - Arabidopsis >gi|5051776|emb|CAB45069.1| putative protein [Arabidopsis >gi|7269284|emb|CAB79344.1| putative protein [Arabidopsis
  misc_feature (4)..(337): Homolog of NCBI NO: 21593613 NR Description: unknown [Arabidopsis thaliana]
  misc_feature (4)..(337): Homolog of NCBI NO: 30686500 NR Description: expressed protein [Arabidopsis thaliana] unknown protein [Arabidopsis thaliana]
  misc_feature (4)..(227): Homolog of NCBI NO: 7487318 NR Description: hypothetical protein T22A6.180 - Arabidopsis >gi|5051777|emb|CAB45070.1| putative protein [Arabidopsis >gi|7269285|emb|CAB79345.1| putative protein [Arabidopsis
  misc_feature (53)..(336): Homolog of NCBI NO: 481815 NR Description: vegetative storage protein win4.5 - western poplar x cottonwood (fragment) >gi|309839|gb|AAA16342.1| storage protein [Populus balsamifera subsp. trichocarpa x Populus
  misc_feature (229)..(337): Homolog of NCBI NO: 7487319 NR Description: hypothetical protein T22A6.190 - Arabidopsis >gi|5051778|emb|CAB45071.1| putative protein [Arabidopsis >gi|7269286|emb|CAB79346.1| putative protein [Arabidopsis
  misc_feature (108)..(332): Homolog of NCBI NO: 34897886 NR Description: ESTs AU032452(S10068),C23571(S10068) correspond a region of the predicted gene.~Similar to P.trichocarpa x P.
  misc_feature (53)..(336): Homolog of NCBI NO: 421813 NR Description: storage protein, bark - cottonwood
MASMDHNHFLFPLLFIIIISSLHVLRASTTPSHSHKLKSATTIRKINRRGPYIGLVTVFETEEDAFLGSVDFRLDPTHPFLDLSGRRFRIGKIHGKKVVYVRCGIGMVNAAAATQQMIDVFSVKGIVHFGIAGNINNSMSIGDVSIPKQITNAGLWDWLNPGKAKGNEDVAYLDVGNYNVPQGNNKLGTIGYSYEELYSVSGHINSPKKVFWINTTQEWLHLAADLEKMELLQCVNASLCLPNKPKVVVGLKAATADIFVDNAAYRNFLYDTFGVSSSDMESSAVAMTCVSNGYPLIVIRGLSDLAGVGDNTVRKFGSLAATNTAKAVLEFIKKLPPS

SEQ ID NO: 101931 - protein, 335 aa, Arabidopsis thaliana; identical to SEQ ID NO: 87862
  peptide (1)..(335): Ceres Seq. ID no. 13609090
  misc_feature (49)..(329): Pfam Name: Phosphorylase family Pfam Description: Phosphorylase family
  misc_feature (1)..(335): Homolog of NCBI NO: 18416327 NR Description: expressed protein [Arabidopsis thaliana] unknown protein [Arabidopsis thaliana]
  misc_feature (1)..(335): Homolog of NCBI NO: 21617914 NR Description: unknown [Arabidopsis thaliana]
  misc_feature (1)..(335): Homolog of NCBI NO: 7487317 NR Description: hypothetical protein T22A6.170 - Arabidopsis >gi|5051776|emb|CAB45069.1| putative protein [Arabidopsis >gi|7269284|emb|CAB79344.1| putative protein [Arabidopsis
  misc_feature (1)..(334): Homolog of NCBI NO: 21593613 NR Description: unknown [Arabidopsis thaliana]
  misc_feature (1)..(334): Homolog of NCBI NO: 30686500 NR Description: expressed protein [Arabidopsis thaliana] unknown protein [Arabidopsis thaliana]
  misc_feature (1)..(224): Homolog of NCBI NO: 7487318 NR Description: hypothetical protein T22A6.180 - Arabidopsis >gi|5051777|emb|CAB45070.1| putative protein [Arabidopsis >gi|7269285|emb|CAB79345.1| putative protein [Arabidopsis
  misc_feature (50)..(333): Homolog of NCBI NO: 481815 NR Description: vegetative storage protein win4.5 - western poplar x cottonwood (fragment) >gi|309839|gb|AAA16342.1| storage protein [Populus balsamifera subsp. trichocarpa x Populus
  misc_feature (226)..(334): Homolog of NCBI NO: 7487319 NR Description: hypothetical protein T22A6.190 - Arabidopsis >gi|5051778|emb|CAB45071.1| putative protein [Arabidopsis >gi|7269286|emb|CAB79346.1| putative protein [Arabidopsis
  misc_feature (105)..(329): Homolog of NCBI NO: 34897886 NR Description: ESTs AU032452(S10068),C23571(S10068) correspond a region of the predicted gene.~Similar to P.trichocarpa x P.
  misc_feature (50)..(333): Homolog of NCBI NO: 421813 NR Description: storage protein, bark - cottonwood

SEQ ID NO: 101932 - protein, 232 aa, Arabidopsis thaliana; identical to SEQ ID NO: 87863
  peptide (1)..(232): Ceres Seq. ID no. 13609091
  misc_feature (1)..(226): Pfam Name: Phosphorylase family Pfam Description: Phosphorylase family
  misc_feature (1)..(232): Homolog of NCBI NO: 18416327 NR Description: expressed protein [Arabidopsis thaliana] unknown protein [Arabidopsis thaliana]
  misc_feature (1)..(232): Homolog of NCBI NO: 21617914 NR Description: unknown [Arabidopsis thaliana]
  misc_feature (1)..(232): Homolog of NCBI NO: 7487317 NR Description: hypothetical protein T22A6.170 - Arabidopsis >gi|5051776|emb|CAB45069.1| putative protein [Arabidopsis >gi|7269284|emb|CAB79344.1| putative protein [Arabidopsis
  misc_feature (1)..(231): Homolog of NCBI NO: 21593613 NR Description: unknown [Arabidopsis thaliana]
  misc_feature (1)..(231): Homolog of NCBI NO: 30686500 NR Description: expressed protein [Arabidopsis thaliana] unknown protein [Arabidopsis thaliana]
  misc_feature (1)..(121): Homolog of NCBI NO: 7487318 NR Description: hypothetical protein T22A6.180 - Arabidopsis >gi|5051777|emb|CAB45070.1| putative protein [Arabidopsis >gi|7269285|emb|CAB79345.1| putative protein [Arabidopsis
  misc_feature (1)..(230): Homolog of NCBI NO: 481815 NR Description: vegetative storage protein win4.5 - western poplar x cottonwood (fragment) >gi|309839|gb|AAA16342.1| storage protein [Populus balsamifera subsp. trichocarpa x Populus
  misc_feature (123)..(231): Homolog of NCBI NO: 7487319 NR Description: hypothetical protein T22A6.190 - Arabidopsis >gi|5051778|emb|CAB45071.1| putative protein [Arabidopsis >gi|7269286|emb|CAB79346.1| putative protein [Arabidopsis
  misc_feature (2)..(226): Homolog of NCBI NO: 34897886 NR Description: ESTs AU032452(S10068),C23571(S10068) correspond a region of the predicted gene.~Similar to P.trichocarpa x P.
  misc_feature (1)..(230): Homolog of NCBI NO: 421813 NR Description: storage protein, bark - cottonwood

SEQ ID NO: 101933 - DNA, 1457 bp, Arabidopsis thaliana
  misc_feature (1)..(1457): Ceres Seq. ID no. 13609096
  misc_feature: MA Experiment ID: 20000227 Result: Up-regulated in Transcription
  misc_feature: MA Experiment 20000227 PARAMETER Experiment Name: At_Root-Tips-vs-Tops_P Parameter: Tissue Value: Root Tips vs. Root Tops
  misc_feature: MA Experiment ID: 20000264 Result: Up-regulated in Transcription
  misc_feature: MA Experiment 20000264 PARAMETER Experiment Name: At_Open_Flower_P Parameter: Age (day) Value: 21
  misc_feature: MA Experiment 20000264 PARAMETER Experiment Name: At_Open_Flower_P Parameter: Plant Line Value: WS
  misc_feature: MA Experiment 20000264 PARAMETER Experiment Name: At_Open_Flower_P Parameter: Tissue Value: Open Flower vs. Whole Plant
  misc_feature: MA Experiment ID: 20000265 Result: Up-regulated in Transcription
  misc_feature: MA Experiment 20000265 PARAMETER Experiment Name: At_Open_Flower_P Parameter: Age (day) Value: 21
  misc_feature: MA Experiment 20000265 PARAMETER Experiment Name: At_Open_Flower_P Parameter: Plant Line Value: WS
  misc_feature: MA Experiment 20000265 PARAMETER Experiment Name: At_Open_Flower_P Parameter: Tissue Value: Closed Flower vs. Whole Plant
atggagattgccgagcaaaaacctatggtggaggacccgattcctcttccaaacgcttccatggaggtctcttaccaaaaccccattgaagcagcgactattccagtgcaaatagccgtcgctgagccagtcgctacacccaatcctcctccttgcctccacgagaacaaattcctcgtatctgtggaggtctgcttaaagccttcaagcacggctcgtctagaggatgtccagagagctgtagaacggatgctggaaaataggagcatgagctatgcagatggactggttttgattcctgcagacgacttgttcctagttgataatgtgcaaaggatatgcatttgtgatacagaggaatgggtgaaaaataatgatgttctcttgttctggcaagtgaagccagttgtgcacacctttcagctcattgaagaaggaccatgtgaggacttgtgtgcagatggacaacctgctagctttaacgaatggattctacccgcaaaggagtttgatggcttatgggaaagcctaatatatgaatctggacttaagcaaaggttactacgttatgctgcgagtgcattgctgttcacccagaagggtgttaacccaaatctcgtttcatggaacaggattattcttttgcacggaccaccagggactggcaaaacatccctttgcaaagcgttggctcaaaagctttcaatccggtgcaactccagatatccacattgccaattgattgaagtcaatgctcactctctatttagtaaatggttctctgaaagtggcaagctggttgccaagcttttccaaaaaatccaagagatggtggaggaagatggaaatctggtatttgttttgatcgatgaagtagaaagtcttgctgctgctcgaaaagctgcattgtctggctcagaaccgtcagattctatccgggttgtgaatgcactactcacccaaatggacaaattgaaatcagcaccgaatgtgataatccttacaacatcaaacataactactgctattgatgttgctttcgtggatcgagctgacataaaagcttatgttggccctccaactcttcatgttcgttatgaaatattaaggtcttgtgttgaggaattaataagtaaagggatcatatcaagtttccagggctgtgatggactctctattccaagcttttcaagtttgaaagaaaagttaagtgaaagtgaggttcatgatacaaatacagttccttggttctgcaaacagttgatagaagctgcaaaagggtgcgagggtttaagtgggagatcattgaggaagcttccgtttttagcgcacgcagcacttgcagatccatatagccatgatccaagtaatttcttgtgtacaatgatagaaacagctaagagagagaagtctgaacaacctgaatgaccatttttgtgaggtcataaacaaataac

SEQ ID NO: 101934 - protein, 475 aa, Arabidopsis thaliana
  peptide (1)..(475): Ceres Seq. ID no. 13609097
  misc_feature (212)..(376): Pfam Name: ATPase family associated with various cellular Pfam Description: ATPase family associated with various cellular
  misc_feature (9)..(475): Homolog of NCBI NO: 30686626 NR Description: protein -related binding protein [Arabidopsis >gi|23297331|gb|AAN12943.1| putative binding protein [Arabidopsis
  misc_feature (151)..(386): Homolog of NCBI NO: 7485976 NR Description: hypothetical protein F22K18.90 - Arabidopsis >gi|4220519|emb|CAA22992.1| putative protein binding protein thaliana] >gi|7269322|emb|CAB79381.1| putative protein binding
  misc_feature (21)..(119): Homolog of NCBI NO: 7485976 NR Description: hypothetical protein F22K18.90 - Arabidopsis >gi|4220519|emb|CAA22992.1| putative protein binding protein thaliana] >gi|7269322|emb|CAB79381.1| putative protein binding
  misc_feature (393)..(475): Homolog of NCBI NO: 7485976 NR Description: hypothetical protein F22K18.90 - Arabidopsis >gi|4220519|emb|CAA22992.1| putative protein binding protein thaliana] >gi|7269322|emb|CAB79381.1| putative protein binding
  misc_feature (15)..(472): Homolog of NCBI NO: 38605777 NR Description: OSJNBa0044K18.20 [Oryza sativa (japonica
  misc_feature (56)..(445): Homolog of NCBI NO: 38969923 NR Description: Unknown (protein for MGC:76197) [Silurana
  misc_feature (51)..(445): Homolog of NCBI NO: 11321607 NR Description: thyroid hormone receptor interactor 13; thyroid interacting protein 13 [Homo sapiens] >gi|2232019|gb|AAB64095.1| E1 protein binding protein [Homo sapiens]
  misc_feature (51)..(445): Homolog of NCBI NO: 12845703 NR Description: unnamed protein product [Mus musculus]
  misc_feature (51)..(445): Homolog of NCBI NO: 20908701 NR Description: thyroid hormone receptor interactor 13 [Mus
  misc_feature (51)..(445): Homolog of NCBI NO: 34853393 NR Description: similar to thyroid hormone receptor interactor
MEIAEQKPMVEDPIPLPNASMEVSYQNPIEAATIPVQIAVAEPVATPNPPPCLHENKFLVSVEVCLKPSSTARLEDVQRAVERMLENRSMSYADGLVLIPADDLFLVDNVQRICICDTEEWVKNNDVLLFWQVKPVVHTFQLIEEGPCEDLCADGQPASFNEWILPAKEFDGLWESLIYESGLKQRLLRYAASALLFTQKGVNPNLVSWNRIILLHGPPGTGKTSLCKALAQKLSIRCNSRYPHCQLIEVNAHSLFSKWFSESGKLVAKLFQKIQEMVEEDGNLVFVLIDEVESLAAARKAALSGSEPSDSIRVVNALLTQMDKLKSAPNVIILTTSNITTAIDVAFVDRADIKAYVGPPTLHVRYEILRSCVEELISKGIISSFQGCDGLSIPSFSSLKEKLSESEVHDTNTVPWFCKQLIEAAKGCEGLSGRSLRKLPFLAHAALADPYSHDPSNFLCTMIETAKREKSEQPE

SEQ ID NO: 101935 - protein, 467 aa, Arabidopsis thaliana
  peptide (1)..(467): Ceres Seq. ID no. 13609098
  misc_feature (204)..(368): Pfam Name: ATPase family associated with various cellular Pfam Description: ATPase family associated with various cellular
  misc_feature (1)..(467): Homolog of NCBI NO: 30686626 NR Description: protein -related binding protein [Arabidopsis >gi|23297331|gb|AAN12943.1| putative binding protein [Arabidopsis
  misc_feature (143)..(378): Homolog of NCBI NO: 7485976 NR Description: hypothetical protein F22K18.90 - Arabidopsis >gi|4220519|emb|CAA22992.1| putative protein binding protein thaliana] >gi|7269322|emb|CAB79381.1| putative protein binding
  misc_feature (13)..(111): Homolog of NCBI NO: 7485976 NR Description: hypothetical protein F22K18.90 - Arabidopsis >gi|4220519|emb|CAA22992.1| putative protein binding protein thaliana] >gi|7269322|emb|CAB79381.1| putative protein binding
  misc_feature (385)..(467): Homolog of NCBI NO: 7485976 NR Description: hypothetical protein F22K18.90 - Arabidopsis >gi|4220519|emb|CAA22992.1| putative protein binding protein thaliana] >gi|7269322|emb|CAB79381.1| putative protein binding
  misc_feature (7)..(464): Homolog of NCBI NO: 38605777 NR Description: OSJNBa0044K18.20 [Oryza sativa (japonica
  misc_feature (48)..(437): Homolog of NCBI NO: 38969923 NR Description: Unknown (protein for MGC:76197) [Silurana
  misc_feature (43)..(437): Homolog of NCBI NO: 11321607 NR Description: thyroid hormone receptor interactor 13; thyroid interacting protein 13 [Homo sapiens] >gi|2232019|gb|AAB64095.1| E1 protein binding protein [Homo sapiens]
  misc_feature (43)..(437): Homolog of NCBI NO: 12845703 NR Description: unnamed protein product [Mus musculus]
  misc_feature (43)..(437): Homolog of NCBI NO: 20908701 NR Description: thyroid hormone receptor interactor 13 [Mus
  misc_feature (43)..(437): Homolog of NCBI NO: 34853393 NR Description: similar to thyroid hormone receptor interactor
MVEDPIPLPNASMEVSYQNPIEAATIPVQIAVAEPVATPNPPPCLHENKFLVSVEVCLKPSSTARLEDVQRAVERMLENRSMSYADGLVLIPADDLFLVDNVQRICICDTEEWVKNNDVLLFWQVKPVVHTFQLIEEGPCEDLCADGQPASFNEWILPAKEFDGLWESLIYESGLKQRLLRYAASALLFTQKGVNPNLVSWNRIILLHGPPGTGKTSLCKALAQKLSIRCNSRYPHCQLIEVNAHSLFSKWFSESGKLVAKLFQKIQEMVEEDGNLVFVLIDEVESLAAARKAALSGSEPSDSIRVVNALLTQMDKLKSAPNVIILTTSNITTAIDVAFVDRADIKAYVGPPTLHVRYEILRSCVEELISKGIISSFQGCDGLSIPSFSSLKEKLSESEVHDTNTVPWFCKQLIEAAKGCEGLSGRSLRKLPFLAHAALADPYSHDPSNFLCTMIETAKREKSEQPE

SEQ ID NO: 101936 - protein, 455 aa, Arabidopsis thaliana
  peptide (1)..(455): Ceres Seq. ID no. 13609099
  misc_feature (192)..(356): Pfam Name: ATPase family associated with various cellular Pfam Description: ATPase family associated with various cellular
  misc_feature (1)..(455): Homolog of NCBI NO: 30686626 NR Description: protein -related binding protein [Arabidopsis >gi|23297331|gb|AAN12943.1| putative binding protein [Arabidopsis
  misc_feature (131)..(366): Homolog of NCBI NO: 7485976 NR Description: hypothetical protein F22K18.90 - Arabidopsis >gi|4220519|emb|CAA22992.1| putative protein binding protein thaliana] >gi|7269322|emb|CAB79381.1| putative protein binding
  misc_feature (1)..(99): Homolog of NCBI NO: 7485976 NR Description: hypothetical protein F22K18.90 - Arabidopsis >gi|4220519|emb|CAA22992.1| putative protein binding protein thaliana] >gi|7269322|emb|CAB79381.1| putative protein binding
  misc_feature (373)..(455): Homolog of NCBI NO: 7485976 NR Description: hypothetical protein F22K18.90 - Arabidopsis >gi|4220519|emb|CAA22992.1| putative protein binding protein thaliana] >gi|7269322|emb|CAB79381.1| putative protein binding
  misc_feature (1)..(452): Homolog of NCBI NO: 38605777 NR Description: OSJNBa0044K18.20 [Oryza sativa (japonica
  misc_feature (36)..(425): Homolog of NCBI NO: 38969923 NR Description: Unknown (protein for MGC:76197) [Silurana
  misc_feature (31)..(425): Homolog of NCBI NO: 11321607 NR Description: thyroid hormone receptor interactor 13; thyroid interacting protein 13 [Homo sapiens] >gi|2232019|gb|AAB64095.1| E1 protein binding protein [Homo sapiens]
  misc_feature (31)..(425): Homolog of NCBI NO: 12845703 NR Description: unnamed protein product [Mus musculus]
  misc_feature (31)..(425): Homolog of NCBI NO: 20908701 NR Description: thyroid hormone receptor interactor 13 [Mus
  misc_feature (31)..(425): Homolog of NCBI NO: 34853393 NR Description: similar to thyroid hormone receptor interactor
MEVSYQNPIEAATIPVQIAVAEPVATPNPPPCLHENKFLVSVEVCLKPSSTARLEDVQRAVERMLENRSMSYADGLVLIPADDLFLVDNVQRICICDTEEWVKNNDVLLFWQVKPVVHTFQLIEEGPCEDLCADGQPASFNEWILPAKEFDGLWESLIYESGLKQRLLRYAASALLFTQKGVNPNLVSWNRIILLHGPPGTGKTSLCKALAQKLSIRCNSRYPHCQLIEVNAHSLFSKWFSESGKLVAKLFQKIQEMVEEDGNLVFVLIDEVESLAAARKAALSGSEPSDSIRVVNALLTQMDKLKSAPNVIILTTSNITTAIDVAFVDRADIKAYVGPPTLHVRYEILRSCVEELISKGIISSFQGCDGLSIPSFSSLKEKLSESEVHDTNTVPWFCKQLIEAAKGCEGLSGRSLRKLPFLAHAALADPYSHDPSNFLCTMIETAKREKSEQPE

SEQ ID NO: 101937 - DNA, 830 bp, Arabidopsis thaliana
  misc_feature (1)..(830): Ceres Seq. ID no. 13609100
  misc_feature: MA Experiment ID: 20000171 Result: Up-regulated in Transcription
  misc_feature: MA Experiment 20000171 PARAMETER Experiment Name: At_42deg_Heat_P Parameter: Age (day) Value: 14
  misc_feature: MA Experiment 20000171 PARAMETER Experiment Name: At_42deg_Heat_P Parameter: Organism Value: A. thaliana
  misc_feature: MA Experiment 20000171 PARAMETER Experiment Name: At_42deg_Heat_P Parameter: Plant Line Value: WS
  misc_feature: MA Experiment 20000171 PARAMETER Experiment Name: At_42deg_Heat_P Parameter: Temperature (deg C) Value: 42 vs. 22
  misc_feature: MA Experiment 20000171 PARAMETER Experiment Name: At_42deg_Heat_P Parameter: Timepoint (hr) Value: 1
  misc_feature: MA Experiment 20000171 PARAMETER Experiment Name: At_42deg_Heat_P Parameter: Tissue Value: Aerial
  misc_feature: MA Experiment ID: 20000173 Result: Up-regulated in Transcription
  misc_feature: MA Experiment 20000173 PARAMETER Experiment Name: At_42deg_Heat_P Parameter: Age (day) Value: 14
  misc_feature: MA Experiment 20000173 PARAMETER Experiment Name: At_42deg_Heat_P Parameter: Organism Value: A. thaliana
  misc_feature: MA Experiment 20000173 PARAMETER Experiment Name: At_42deg_Heat_P Parameter: Plant Line Value: WS
  misc_feature: MA Experiment 20000173 PARAMETER Experiment Name: At_42deg_Heat_P Parameter: Temperature (deg C) Value: 42 vs. 22
  misc_feature: MA Experiment 20000173 PARAMETER Experiment Name: At_42deg_Heat_P Parameter: Timepoint (hr) Value: 6
  misc_feature: MA Experiment 20000173 PARAMETER Experiment Name: At_42deg_Heat_P Parameter: Tissue Value: Aerial
  misc_feature: MA Experiment ID: 20000456 Result: Up-regulated in Transcription
  misc_feature: MA Experiment 20000456 PARAMETER Experiment Name: At_100uM_BA_P Parameter: Age (day) Value: 14
  misc_feature: MA Experiment 20000456 PARAMETER Experiment Name: At_100uM_BA_P Parameter: Organism Value: A. thaliana
  misc_feature: MA Experiment 20000456 PARAMETER Experiment Name: At_100uM_BA_P Parameter: Plant Line Value: WS
  misc_feature: MA Experiment 20000456 PARAMETER Experiment Name: At_100uM_BA_P Parameter: Timepoint (hr) Value: 6
  misc_feature: MA Experiment 20000456 PARAMETER Experiment Name: At_100uM_BA_P Parameter: Tissue Value: Aerial
  misc_feature: MA Experiment 20000456 PARAMETER Experiment Name: At_100uM_BA_P Parameter: Treatment Value: 100uM BA vs. No Treatment
  misc_feature: MA Experiment ID: 20000709 Result: Up-regulated in Transcription
  misc_feature: MA Experiment 20000709 PARAMETER Experiment Name: At_15mM_NH4NO3_L-to-H_P Parameter: Age (hr) Value: 14
  misc_feature: MA Experiment 20000709 PARAMETER Experiment Name: At_15mM_NH4NO3_L-to-H_P Parameter: Organism Value: A. thaliana
  misc_feature: MA Experiment 20000709 PARAMETER Experiment Name: At_15mM_NH4NO3_L-to-H_P Parameter: Plant Line Value: WS
  misc_feature: MA Experiment 20000709 PARAMETER Experiment Name: At_15mM_NH4NO3_L-to-H_P Parameter: Timepoint (hr) Value: 4
  misc_feature: MA Experiment 20000709 PARAMETER Experiment Name: At_15mM_NH4NO3_L-to-H_P Parameter: Tissue Value: Aerial
  misc_feature: MA Experiment 20000709 PARAMETER Experiment Name: At_15mM_NH4NO3_L-to-H_P Parameter: Treatment Value: 15mM NH4NO3 vs. 30mM Mannitol
  misc_feature: MA Experiment ID: 20001248 Result: Down-regulated in Transcription
  misc_feature: MA Experiment 20001248 PARAMETER Experiment Name: At_Far-red-induction_P Parameter: Age (day) Value: 7
  misc_feature: MA Experiment 20001248 PARAMETER Experiment Name: At_Far-red-induction_P Parameter: Light Value: Far-red vs. White
  misc_feature: MA Experiment 20001248 PARAMETER Experiment Name: At_Far-red-induction_P Parameter: Organism Value: A. thaliana
  misc_feature: MA Experiment 20001248 PARAMETER Experiment Name: At_Far-red-induction_P Parameter: Plant Line Value: Columbia
  misc_feature: MA Experiment 20001248 PARAMETER Experiment Name: At_Far-red-induction_P Parameter: Timepoint (hr) Value: 4
  misc_feature: MA Experiment 20001248 PARAMETER Experiment Name: At_Far-red-induction_P Parameter: Tissue Value: Whole Plant
  misc_feature: MA Experiment ID: 20001555 Result: Up-regulated in Transcription
  misc_feature: MA Experiment 20001555 PARAMETER Experiment Name: At_Drought_Soil_Dry_P Parameter: Age (day) Value: 24
  misc_feature: MA Experiment 20001555 PARAMETER Experiment Name: At_Drought_Soil_Dry_P Parameter: Organism Value: A. thaliana
  misc_feature: MA Experiment 20001555 PARAMETER Experiment Name: At_Drought_Soil_Dry_P Parameter: Plant Line Value: WS
  misc_feature: MA Experiment 20001555 PARAMETER Experiment Name: At_Drought_Soil_Dry_P Parameter: Post Timepoint (hr) Value: None
  misc_feature: MA Experiment 20001555 PARAMETER Experiment Name: At_Drought_Soil_Dry_P Parameter: Post-Treatment Value: None
  misc_feature: MA Experiment 20001555 PARAMETER Experiment Name: At_Drought_Soil_Dry_P Parameter: Timepoint (day) Value: 10
  misc_feature: MA Experiment 20001555 PARAMETER Experiment Name: At_Drought_Soil_Dry_P Parameter: Treatment Value: Drought vs. No Drought
acagttctcagataaatactaaactcactgttaaaactttctcaacaaagcttcctgtttctctacaaatggcatctgctctcgctcttaagagactcctatcatcctccatcgctccacgttcccgtagtgttcttcgtccagctgtttcctctcgcctcttcaacaccaacgccgttaggagctacgacgacgacggcgaaaatggagacggcgttgatttatatcgccgctctgttcctcgccgccgtggtgatttcttctcagatgtgtttgatccgttttcgccgacgaggagcgttagtcaagtgctgaatctgatggaccagttcatggagaatcctctgttatcagctactcgtggcatgggagcttcaggagctcgtcgtggttgggatataaaagagaaagacgatgctctgtacctgagaatcgacatgcctgggctgagcagagaggatgtgaagctggctttggagcaggacactctggtgattagaggagaaggaaaaaacgaggaagatggtggcgaggaaggagagagcggtaatcggagattcacaagcaggattggattaccggataagatttacaagatcgatgagattaaggcggagatgaagaacggagtgttgaaagttgtgatcccgaagatgaaagaacaagagagaaatgatgttcgtcagatcgagatcaactaaaaacgtcgacgtttttttctgttctagttttgttgataggtctttgaataagaagtgtgtgtagtttggcacggtcgatgttgagtcatgtagtctctaaagactaaaaggttatatgtttctttcttg

SEQ ID NO: 101938 - protein, 232 aa, Arabidopsis thaliana
  peptide (1)..(232): Ceres Seq. ID no. 13609101
  misc_feature (23)..(232): Homolog of NCBI NO: 15234969 NR Description: mitochondrion-localized small heat shock protein thaliana] >gi|3122232|sp|Q96331|HS2M_ARATH Heat shock 22 kDa mitochondrial precursor >gi|7441312|pir||T05541 heat shock heat
  misc_feature (23)..(232): Homolog of NCBI NO: 2326354 NR Description: LMW heat shock protein [Arabidopsis thaliana]
  misc_feature (53)..(232): Homolog of NCBI NO: 2326361 NR Description: hypothetical protein [Arabidopsis thaliana]
  misc_feature (24)..(232): Homolog of NCBI NO: 21554988 NR Description: mitochondrial heat shock 22 kd protein-like
  misc_feature (24)..(232): Homolog of NCBI NO: 15242086 NR Description: heat shock protein, putative [Arabidopsis
  misc_feature (23)..(232): Homolog of NCBI NO: 1170368 NR Description: Heat shock 22 kDa protein, mitochondrial precursor
  misc_feature (23)..(231): Homolog of NCBI NO: 7159338 NR Description: LMW heat shock protein [Euphorbia esula]
  misc_feature (25)..(231): Homolog of NCBI NO: 7441310 NR Description: heat shock protein MTSHP precursor, mitochondrial tomato >gi|3492854|dbj|BAA32547.1| mitochondrial small heat shock
  misc_feature (23)..(232): Homolog of NCBI NO: 123564 NR Description: Small heat shock protein, chloroplast precursor
  misc_feature (23)..(231): Homolog of NCBI NO: 3122228 NR Description: Heat shock 22 kDa protein, mitochondrial precursor
SSQINTKLTVKTFSTKLPVSLQMASALALKRLLSSSIAPRSRSVLRPAVSSRLFNTNAVRSYDDDGENGDGVDLYRRSVPRRRGDFFSDVFDPFSPTRSVSQVLNLMDQFMENPLLSATRGMGASGARRGWDIKEKDDALYLRIDMPGLSREDVKLALEQDTLVIRGEGKNEEDGGEEGESGNRRFTSRIGLPDKIYKIDEIKAEMKNGVLKVVIPKMKEQERNDVRQIEIN

SEQ ID NO: 101939 - protein, 210 aa, Arabidopsis thaliana; identical to SEQ ID NO: 37125
  peptide (1)..(210): Ceres Seq. ID no. 13609102
  misc_feature (1)..(210): Homolog of NCBI NO: 15234969 NR Description: mitochondrion-localized small heat shock protein thaliana] >gi|3122232|sp|Q96331|HS2M_ARATH Heat shock 22 kDa mitochondrial precursor >gi|7441312|pir||T05541 heat shock heat
  misc_feature (1)..(210): Homolog of NCBI NO: 2326354 NR Description: LMW heat shock protein [Arabidopsis thaliana]
  misc_feature (31)..(210): Homolog of NCBI NO: 2326361 NR Description: hypothetical protein [Arabidopsis thaliana]
  misc_feature (2)..(210): Homolog of NCBI NO: 21554988 NR Description: mitochondrial heat shock 22 kd protein-like
  misc_feature (2)..(210): Homolog of NCBI NO: 15242086 NR Description: heat shock protein, putative [Arabidopsis
  misc_feature (1)..(210): Homolog of NCBI NO: 1170368 NR Description: Heat shock 22 kDa protein, mitochondrial precursor
  misc_feature (1)..(209): Homolog of NCBI NO: 7159338 NR Description: LMW heat shock protein [Euphorbia esula]
  misc_feature (3)..(209): Homolog of NCBI NO: 7441310 NR Description: heat shock protein MTSHP precursor, mitochondrial tomato >gi|3492854|dbj|BAA32547.1| mitochondrial small heat shock
  misc_feature (1)..(210): Homolog of NCBI NO: 123564 NR Description: Small heat shock protein, chloroplast precursor
  misc_feature (1)..(209): Homolog of NCBI NO: 3122228 NR Description: Heat shock 22 kDa protein, mitochondrial precursor

SEQ ID NO: 101940 - protein, 126 aa, Arabidopsis thaliana; identical to SEQ ID NO: 37126
  peptide (1)..(126): Ceres Seq. ID no. 13609103
  misc_feature (1)..(126): Homolog of NCBI NO: 15234969 NR Description: mitochondrion-localized small heat shock protein thaliana] >gi|3122232|sp|Q96331|HS2M_ARATH Heat shock 22 kDa mitochondrial precursor >gi|7441312|pir||T05541 heat shock heat
  misc_feature (1)..(126): Homolog of NCBI NO: 2326354 NR Description: LMW heat shock protein [Arabidopsis thaliana]
  misc_feature (1)..(126): Homolog of NCBI NO: 2326361 NR Description: hypothetical protein [Arabidopsis thaliana]
  misc_feature (1)..(126): Homolog of NCBI NO: 21554988 NR Description: mitochondrial heat shock 22 kd protein-like
  misc_feature (1)..(126): Homolog of NCBI NO: 15242086 NR Description: heat shock protein, putative [Arabidopsis
  misc_feature (1)..(126): Homolog of NCBI NO: 1170368 NR Description: Heat shock 22 kDa protein, mitochondrial precursor
  misc_feature (1)..(125): Homolog of NCBI NO: 7159338 NR Description: LMW heat shock protein [Euphorbia esula]
  misc_feature (1)..(125): Homolog of NCBI NO: 7441310 NR Description: heat shock protein MTSHP precursor, mitochondrial tomato >gi|3492854|dbj|BAA32547.1| mitochondrial small heat shock
  misc_feature (1)..(126): Homolog of NCBI NO: 123564 NR Description: Small heat shock protein, chloroplast precursor
  misc_feature (1)..(125): Homolog of NCBI NO: 3122228 NR Description: Heat shock 22 kDa protein, mitochondrial precursor

SEQ ID NO: 101941 - DNA, 1111 bp, Arabidopsis thaliana
  misc_feature (1)..(1111): Ceres Seq. ID no. 13609112
  misc_feature: MA Experiment ID: 108434 Result: Up-regulated in Transcription
  misc_feature: MA Experiment 108434 PARAMETER Experiment Name: At_Root_Tips_cDNA_P Parameter: Tissue Value: Root Tips
  misc_feature: MA Experiment ID: 108461 Result: Down-regulated in Transcription
  misc_feature: MA Experiment 108461 PARAMETER Experiment Name: At_Germinating_Seeds_cDNA_P Parameter: Age (day) Value: 1 vs. 0
  misc_feature: MA Experiment 108461 PARAMETER Experiment Name: At_Germinating_Seeds_cDNA_P Parameter: Tissue Value: Germinating Seeds
  misc_feature: MA Experiment ID: 108462 Result: Down-regulated in Transcription
  misc_feature: MA Experiment 108462 PARAMETER Experiment Name: At_Germinating_Seeds_cDNA_P Parameter: Age (day) Value: 2 vs. 0
  misc_feature: MA Experiment 108462 PARAMETER Experiment Name: At_Germinating_Seeds_cDNA_P Parameter: Tissue Value: Germinating Seeds
  misc_feature: MA Experiment ID: 108463 Result: Down-regulated in Transcription
  misc_feature: MA Experiment 108463 PARAMETER Experiment Name: At_Germinating_Seeds_cDNA_P Parameter: Age (day) Value: 3 vs. 0
  misc_feature: MA Experiment 108463 PARAMETER Experiment Name: At_Germinating_Seeds_cDNA_P Parameter: Tissue Value: Germinating Seeds
  misc_feature: MA Experiment ID: 108464 Result: Down-regulated in Transcription
  misc_feature: MA Experiment 108464 PARAMETER Experiment Name: At_Germinating_Seeds_cDNA_P Parameter: Age (day) Value: 4 vs. 0
  misc_feature: MA Experiment 108464 PARAMETER Experiment Name: At_Germinating_Seeds_cDNA_P Parameter: Tissue Value: Germinating Seeds
  misc_feature: MA Experiment ID: 108489 Result: Up-regulated in Transcription
  misc_feature: MA Experiment ID: 108572 Result: Down-regulated in Transcription
  misc_feature: MA Experiment 108572 PARAMETER Experiment Name: At_Drought_cDNA_P Parameter: Timepoint (hr) Value: 1
  misc_feature: MA Experiment 108572 PARAMETER Experiment Name: At_Drought_cDNA_P Parameter: Tissue Value: Aerial
  misc_feature: MA Experiment 108572 PARAMETER Experiment Name: At_Drought_cDNA_P Parameter: Treatment Value: Drought vs. No Drought
  misc_feature: MA Experiment ID: 108573 Result: Down-regulated in Transcription
  misc_feature: MA Experiment 108573 PARAMETER Experiment Name: At_Drought_cDNA_P Parameter: Timepoint (hr) Value: 6
  misc_feature: MA Experiment 108573 PARAMETER Experiment Name: At_Drought_cDNA_P Parameter: Tissue Value: Aerial
  misc_feature: MA Experiment 108573 PARAMETER Experiment Name: At_Drought_cDNA_P Parameter: Treatment Value: Drought vs. No Drought
  misc_feature: MA Experiment ID: 108579 Result: Up-regulated in Transcription
  misc_feature: MA Experiment 108579 PARAMETER Experiment Name: At_4deg_Cold_cDNA_P Parameter: Temperature (deg C) Value: 4 vs. 22
  misc_feature: MA Experiment 108579 PARAMETER Experiment Name: At_4deg_Cold_cDNA_P Parameter: Timepoint (hr) Value: 6
  misc_feature: MA Experiment 108579 PARAMETER Experiment Name: At_4deg_Cold_cDNA_P Parameter: Tissue Value: Aerial
  misc_feature: MA Experiment ID: 108595 Result: Down-regulated in Transcription
  misc_feature: MA Experiment 108595 PARAMETER Experiment Name: At_Ler-pi_Ovule_cDNA_P Parameter: Plant Line Value: null
  misc_feature: MA Experiment ID: 20000090 Result: Up-regulated in Transcription
  misc_feature: MA Experiment ID: 20000173 Result: Up-regulated in Transcription
  misc_feature: MA Experiment 20000173 PARAMETER Experiment Name: At_42deg_Heat_P Parameter: Age (day) Value: 14
  misc_feature: MA Experiment 20000173 PARAMETER Experiment Name: At_42deg_Heat_P Parameter: Organism Value: A. thaliana
  misc_feature: MA Experiment 20000173 PARAMETER Experiment Name: At_42deg_Heat_P Parameter: Plant Line Value: WS
  misc_feature: MA Experiment 20000173 PARAMETER Experiment Name: At_42deg_Heat_P Parameter: Temperature (deg C) Value: 42 vs. 22
  misc_feature: MA Experiment 20000173 PARAMETER Experiment Name: At_42deg_Heat_P Parameter: Timepoint (hr) Value: 6
  misc_feature: MA Experiment 20000173 PARAMETER Experiment Name: At_42deg_Heat_P Parameter: Tissue Value: Aerial
  misc_feature: MA Experiment ID: 20000179 Result: Down-regulated in Transcription
  misc_feature: MA Experiment 20000179 PARAMETER Experiment Name: At_Germinating_Seeds_P Parameter: Age (hr) Value: 6 vs. 0
  misc_feature: MA Experiment 20000179 PARAMETER Experiment Name: At_Germinating_Seeds_P Parameter: Tissue Value: Germinating Seeds
  misc_feature: MA Experiment ID: 20000180 Result: Down-regulated in Transcription
  misc_feature: MA Experiment 20000180 PARAMETER Experiment Name: At_Germinating_Seeds_P Parameter: Age (hr) Value: 24 vs. 0
  misc_feature: MA Experiment 20000180 PARAMETER Experiment Name: At_Germinating_Seeds_P Parameter: Tissue Value: Germinating Seeds
  misc_feature: MA Experiment ID: 20000227 Result: Up-regulated in Transcription
  misc_feature: MA Experiment 20000227 PARAMETER Experiment Name: At_Root-Tips-vs-Tops_P Parameter: Tissue Value: Root Tips vs. Root Tops
  misc_feature: MA Experiment ID: 20000265 Result: Up-regulated in Transcription
  misc_feature: MA Experiment 20000265 PARAMETER Experiment Name: At_Open_Flower_P Parameter: Age (day) Value: 21
  misc_feature: MA Experiment 20000265 PARAMETER Experiment Name: At_Open_Flower_P Parameter: Plant Line Value: WS
  misc_feature: MA Experiment 20000265 PARAMETER Experiment Name: At_Open_Flower_P Parameter: Tissue Value: Closed Flower vs. Whole Plant
  misc_feature: MA Experiment ID: 20001451 Result: Down-regulated in Transcription
  misc_feature: MA Experiment 20001451 PARAMETER Experiment Name: At_Far-red-induction_P Parameter: Age (day) Value: 7
  misc_feature: MA Experiment 20001451 PARAMETER Experiment Name: At_Far-red-induction_P Parameter: Light Value: Far-red vs. White
  misc_feature: MA Experiment 20001451 PARAMETER Experiment Name: At_Far-red-induction_P Parameter: Organism Value: A. thaliana
  misc_feature: MA Experiment 20001451 PARAMETER Experiment Name: At_Far-red-induction_P Parameter: Plant Line Value: Columbia
  misc_feature: MA Experiment 20001451 PARAMETER Experiment Name: At_Far-red-induction_P Parameter: Timepoint (hr) Value: 24
  misc_feature: MA Experiment 20001451 PARAMETER Experiment Name: At_Far-red-induction_P Parameter: Tissue Value: Whole Plant
  misc_feature: MA Experiment ID: 20001458 Result: Up-regulated in Transcription
  misc_feature: MA Experiment 20001458 PARAMETER Experiment Name: At_50mM_NH4NO3_L-to-H_P Parameter: Age (day) Value: Undefined
  misc_feature: MA Experiment 20001458 PARAMETER Experiment Name: At_50mM_NH4NO3_L-to-H_P Parameter: Organism Value: Undefined
  misc_feature: MA Experiment 20001458 PARAMETER Experiment Name: At_50mM_NH4NO3_L-to-H_P Parameter: Plant Line Value: Undefined
  misc_feature: MA Experiment 20001458 PARAMETER Experiment Name: At_50mM_NH4NO3_L-to-H_P Parameter: Timepoint (hr) Value: 2
  misc_feature: MA Experiment 20001458 PARAMETER Experiment Name: At_50mM_NH4NO3_L-to-H_P Parameter: Tissue Value: Siliques
  misc_feature: MA Experiment 20001458 PARAMETER Experiment Name: At_50mM_NH4NO3_L-to-H_P Parameter: Treatment Value: 50mM NH4NO3 vs. 100mM Manitol
  misc_feature: MA Experiment ID: 20001556 Result: Up-regulated in Transcription
  misc_feature: MA Experiment 20001556 PARAMETER Experiment Name: At_Drought_Soil_Dry_P Parameter: Age (day) Value: 26
  misc_feature: MA Experiment 20001556 PARAMETER Experiment Name: At_Drought_Soil_Dry_P Parameter: Organism Value: A. thaliana
  misc_feature: MA Experiment 20001556 PARAMETER Experiment Name: At_Drought_Soil_Dry_P Parameter: Plant Line Value: WS
  misc_feature: MA Experiment 20001556 PARAMETER Experiment Name: At_Drought_Soil_Dry_P Parameter: Post Timepoint (hr) Value: None
  misc_feature: MA Experiment 20001556 PARAMETER Experiment Name: At_Drought_Soil_Dry_P Parameter: Post-Treatment Value: None
  misc_feature: MA Experiment 20001556 PARAMETER Experiment Name: At_Drought_Soil_Dry_P Parameter: Timepoint (day) Value: 12
  misc_feature: MA Experiment 20001556 PARAMETER Experiment Name: At_Drought_Soil_Dry_P Parameter: Treatment Value: Drought vs. No Drought
  misc_feature: MA Experiment ID: 20001557 Result: Up-regulated in Transcription
  misc_feature: MA Experiment 20001557 PARAMETER Experiment Name: At_Drought_Soil_Dry_P Parameter: Age (day) Value: 27
  misc_feature: MA Experiment 20001557 PARAMETER Experiment Name: At_Drought_Soil_Dry_P Parameter: Organism Value: A. thaliana
  misc_feature: MA Experiment 20001557 PARAMETER Experiment Name: At_Drought_Soil_Dry_P Parameter: Plant Line Value: WS
  misc_feature: MA Experiment 20001557 PARAMETER Experiment Name: At_Drought_Soil_Dry_P Parameter: Post Timepoint (hr) Value: 3
  misc_feature: MA Experiment 20001557 PARAMETER Experiment Name: At_Drought_Soil_Dry_P Parameter: Post-Treatment Value: Re-Water vs. No Drought
  misc_feature: MA Experiment 20001557 PARAMETER Experiment Name: At_Drought_Soil_Dry_P Parameter: Timepoint (day) Value: 13
  misc_feature: MA Experiment 20001557 PARAMETER Experiment Name: At_Drought_Soil_Dry_P Parameter: Treatment Value: Drought vs. No Drought
  misc_feature: MA Experiment ID: 20001558 Result: Up-regulated in Transcription
  misc_feature: MA Experiment 20001558 PARAMETER Experiment Name: At_Drought_Soil_Dry_P Parameter: Age (day) Value: 27
  misc_feature: MA Experiment 20001558 PARAMETER Experiment Name: At_Drought_Soil_Dry_P Parameter: Organism Value: A. thaliana
  misc_feature: MA Experiment 20001558 PARAMETER Experiment Name: At_Drought_Soil_Dry_P Parameter: Plant Line Value: WS
  misc_feature: MA Experiment 20001558 PARAMETER Experiment Name: At_Drought_Soil_Dry_P Parameter: Post Timepoint (hr) Value: 6
  misc_feature: MA Experiment 20001558 PARAMETER Experiment Name: At_Drought_Soil_Dry_P Parameter: Post-Treatment Value: Re-Water vs. No Drought
  misc_feature: MA Experiment 20001558 PARAMETER Experiment Name: At_Drought_Soil_Dry_P Parameter: Timepoint (day) Value: 13
  misc_feature: MA Experiment 20001558 PARAMETER Experiment Name: At_Drought_Soil_Dry_P Parameter: Treatment Value: Drought vs. No Drought
  misc_feature: MA Experiment ID: 20001559 Result: Up-regulated in Transcription
  misc_feature: MA Experiment 20001559 PARAMETER Experiment Name: At_Drought_Soil_Dry_P Parameter: Age (day) Value: 28
  misc_feature: MA Experiment 20001559 PARAMETER Experiment Name: At_Drought_Soil_Dry_P Parameter: Organism Value: A. thaliana
  misc_feature: MA Experiment 20001559 PARAMETER Experiment Name: At_Drought_Soil_Dry_P Parameter: Plant Line Value: WS
  misc_feature: MA Experiment 20001559 PARAMETER Experiment Name: At_Drought_Soil_Dry_P Parameter: Post Timepoint (hr) Value: 29
  misc_feature: MA Experiment 20001559 PARAMETER Experiment Name: At_Drought_Soil_Dry_P Parameter: Post-Treatment Value: Re-Water vs. No Drought
  misc_feature: MA Experiment 20001559 PARAMETER Experiment Name: At_Drought_Soil_Dry_P Parameter: Timepoint (day) Value: 14
  misc_feature: MA Experiment 20001559 PARAMETER Experiment Name: At_Drought_Soil_Dry_P Parameter: Treatment Value: Drought vs. No Drought
  misc_feature: MA Experiment ID: 20001560 Result: Up-regulated in Transcription
  misc_feature: MA Experiment 20001560 PARAMETER Experiment Name: At_Drought_Soil_Dry_P Parameter: Age (day) Value: 28
  misc_feature: MA Experiment 20001560 PARAMETER Experiment Name: At_Drought_Soil_Dry_P Parameter: Organism Value: A. thaliana
  misc_feature: MA Experiment 20001560 PARAMETER Experiment Name: At_Drought_Soil_Dry_P Parameter: Plant Line Value: WS
  misc_feature: MA Experiment 20001560 PARAMETER Experiment Name: At_Drought_Soil_Dry_P Parameter: Post Timepoint (hr) Value: None
  misc_feature: MA Experiment 20001560 PARAMETER Experiment Name: At_Drought_Soil_Dry_P Parameter: Post-Treatment Value: None
  misc_feature: MA Experiment 20001560 PARAMETER Experiment Name: At_Drought_Soil_Dry_P Parameter: Timepoint (day) Value: 14
  misc_feature: MA Experiment 20001560 PARAMETER Experiment Name: At_Drought_Soil_Dry_P Parameter: Treatment Value: Drought vs. No Drought
  misc_feature: MA Experiment ID: 20001757 Result: Up-regulated in Transcription
  misc_feature: MA Experiment 20001757 PARAMETER Experiment Name: At_50mM_NH4NO3_L-to-H_P Parameter: Timepoint (hr) Value: 6
  misc_feature: MA Experiment 20001757 PARAMETER Experiment Name: At_50mM_NH4NO3_L-to-H_P Parameter: Tissue Value: Leaf
  misc_feature: MA Experiment 20001757 PARAMETER Experiment Name: At_50mM_NH4NO3_L-to-H_P Parameter: Treatment Value: 50mM NH4NO3 vs 100mM Mannitol
tcagtaaaaccctcatttctgtttctcttttcacttttaaggaaaaccctagaatcctcagaaatggcgttgagcaccgtgtttcgtcgagcttcgtcaacagtagccaatcttgctttccgtgcgggtagatctccggttagcttccgcagtggcgctgtctccgtcgagaggctgattcgtggtagccaccagatcaggcgtggatcggttagttcattctcagtctcgagcttttcgacggaaagtgcgatctctaaaacaaccgccgacgagaatcttgttagcgttatcgaatctgaaatcgaatgcgccgtcgcagaggaggctcctcatgacactgacttcttggaagataagccagaagggtttccatttgaaatcattgataattcaggggagagaactgtgttgctgacaaggaaatttgaggatgaaaccatccaagtggaagttgactctgttgcttcttatgatgatgaagatgaagaagaggaagcagaaccaaacaatgaagaagacgatgaagatcaagagagctcgggtaaagtccgggttccgatggttgttagtgtgcagaaaggtgatggtgtgtgtcttgagtttggagtcagcgcatacccggatgagattgtgattgatagtttatcgatcaaacaaccgcaaggatctgataatgaccttgcttacgaaggacctgactttgatgacttggatgagaatttgcagaaggctttccacaggtacttggagatcagaggtattaaaccaagcttcactacctttctggcagattatgtggccaacaaagatagcagagagtatcttcaatggctcaaggatctcaagtcttttgtcgagaagtgaaactgaactttgttcagagaataagagcgagatttctttttgctttaaacttttgagtttatcttagatgaacttgatatcaccatgagcaatcgttgaaagtgaggtcatgtgttatgcttgttaacaatattgctacatgtttttaatgggtttttaggtactttgctagatataagatgcaactctttcgagtgtcagttggaaaaaatgttacgacctcaataaagtataattcttttgc

SEQ ID NO: 101942 - protein, 288 aa, Arabidopsis thaliana
  peptide (1)..(288): Ceres Seq. ID no. 13609113
  misc_feature (98)..(286): Pfam Name: Mitochondrial glycoprotein Pfam Description: Mitochondrial glycoprotein
  misc_feature (22)..(288): Homolog of NCBI NO: 15241669 NR Description: expressed protein [Arabidopsis thaliana]
  misc_feature (22)..(288): Homolog of NCBI NO: 21592321 NR Description: unknown [Arabidopsis thaliana]
  misc_feature (22)..(286): Homolog of NCBI NO: 34895730 NR Description: P0019D06.23 [Oryza sativa (japonica
  misc_feature (22)..(288): Homolog of NCBI NO: 18410318 NR Description: expressed protein [Arabidopsis thaliana] unknown [Arabidopsis thaliana] >gi|30102600|gb|AAP21218.1|
  misc_feature (32)..(288): Homolog of NCBI NO: 11357566 NR Description: hypothetical protein F1I16.10 - Arabidopsis >gi|7263548|emb|CAB81585.1| putative protein [Arabidopsis
  misc_feature (81)..(287): Homolog of NCBI NO: 15239320 NR Description: expressed protein [Arabidopsis thaliana] emb|CAB81585.1~gene_id:K18J17.19~similar to unknown protein thaliana] >gi|14517391|gb|AAK62586.1| AT5g05990/K18J17_19
  misc_feature (40)..(288): Homolog of NCBI NO: 7487698 NR Description: hypothetical protein At2g39790 [imported] -
  misc_feature (70)..(288): Homolog of NCBI NO: 18405164 NR Description: expressed protein [Arabidopsis thaliana] Hypothetical protein At2g39795, mitochondrial precursor Unknown protein [Arabidopsis thaliana]
  misc_feature (70)..(288): Homolog of NCBI NO: 21593469 NR Description: unknown [Arabidopsis thaliana]
  misc_feature (79)..(286): Homolog of NCBI NO: 34895740 NR Description: P0019D06.28 [Oryza sativa (japonica
SVKPSFLFLFSLLRKTLESSEMALSTVFRRASSTVANLAFRAGRSPVSFRSGAVSVERLIRGSHQIRRGSVSSFSVSSFSTESAISKTTADENLVSVIESEIECAVAEEAPHDTDFLEDKPEGFPFEIIDNSGERTVLLTRKFEDETIQVEVDSVASYDDEDEEEEAEPNNEEDDEDQESSGKVRVPMVVSVQKGDGVCLEFGVSAYPDEIVIDSLSIKQPQGSDNDLAYEGPDFDDLDENLQKAFHRYLEIRGIKPSFTTFLADYVANKDSREYLQWLKDLKSFVEK

SEQ ID NO: 101943 - protein, 267 aa, Arabidopsis thaliana
  peptide (1)..(267): Ceres Seq. ID no. 13609114
  misc_feature (77)..(265): Pfam Name: Mitochondrial glycoprotein Pfam Description: Mitochondrial glycoprotein
  misc_feature (1)..(267): Homolog of NCBI NO: 15241669 NR Description: expressed protein [Arabidopsis thaliana]
  misc_feature (1)..(267): Homolog of NCBI NO: 21592321 NR Description: unknown [Arabidopsis thaliana]
  misc_feature (1)..(265): Homolog of NCBI NO: 34895730 NR Description: P0019D06.23 [Oryza sativa (japonica
  misc_feature (1)..(267): Homolog of NCBI NO: 18410318 NR Description: expressed protein [Arabidopsis thaliana] unknown [Arabidopsis thaliana] >gi|30102600|gb|AAP21218.1|
  misc_feature (11)..(267): Homolog of NCBI NO: 11357566 NR Description: hypothetical protein F1I16.10 - Arabidopsis >gi|7263548|emb|CAB81585.1| putative protein [Arabidopsis
  misc_feature (60)..(266): Homolog of NCBI NO: 15239320 NR Description: expressed protein [Arabidopsis thaliana] emb|CAB81585.1~gene_id:K18J17.19~similar to unknown protein thaliana] >gi|14517391|gb|AAK62586.1| AT5g05990/K18J17_19
  misc_feature (19)..(267): Homolog of NCBI NO: 7487698 NR Description: hypothetical protein At2g39790 [imported] -
  misc_feature (49)..(267): Homolog of NCBI NO: 18405164 NR Description: expressed protein [Arabidopsis thaliana] Hypothetical protein At2g39795, mitochondrial precursor Unknown protein [Arabidopsis thaliana]
  misc_feature (49)..(267): Homolog of NCBI NO: 21593469 NR Description: unknown [Arabidopsis thaliana]
  misc_feature (58)..(265): Homolog of NCBI NO: 34895740 NR Description: P0019D06.28 [Oryza sativa (japonica
MALSTVFRRASSTVANLAFRAGRSPVSFRSGAVSVERLIRGSHQIRRGSVSSFSVSSFSTESAISKTTADENLVSVIESEIECAVAEEAPHDTDFLEDKPEGFPFEIIDNSGERTVLLTRKFEDETIQVEVDSVASYDDEDEEEEAEPNNEEDDEDQESSGKVRVPMVVSVQKGDGVCLEFGVSAYPDEIVIDSLSIKQPQGSDNDLAYEGPDFDDLDENLQKAFHRYLEIRGIKPSFTTFLADYVANKDSREYLQWLKDLKSFVEK

SEQ ID NO: 101944 - DNA, 817 bp, Arabidopsis thaliana
  misc_feature (1)..(817): Ceres Seq. ID no. 13609115
  misc_feature: MA Experiment ID: 108435 Result: Down-regulated in Transcription
  misc_feature: MA Experiment 108435 PARAMETER Experiment Name: At_stm_Mutants_cDNA_P Parameter: Plant Line Value: wt Landsburg vs stm
  misc_feature: MA Experiment 108435 PARAMETER Experiment Name: At_stm_Mutants_cDNA_P Parameter: Tissue Value: Shoot Apical Meristem Region
  misc_feature: MA Experiment ID: 108461 Result: Up-regulated in Transcription
  misc_feature: MA Experiment 108461 PARAMETER Experiment Name: At_Germinating_Seeds_cDNA_P Parameter: Age (day) Value: 1 vs. 0
  misc_feature: MA Experiment 108461 PARAMETER Experiment Name: At_Germinating_Seeds_cDNA_P Parameter: Tissue Value: Germinating Seeds
  misc_feature: MA Experiment ID: 108462 Result: Up-regulated in Transcription
  misc_feature: MA Experiment 108462 PARAMETER Experiment Name: At_Germinating_Seeds_cDNA_P Parameter: Age (day) Value: 2 vs. 0
  misc_feature: MA Experiment 108462 PARAMETER Experiment Name: At_Germinating_Seeds_cDNA_P Parameter: Tissue Value: Germinating Seeds
  misc_feature: MA Experiment ID: 108463 Result: Up-regulated in Transcription
  misc_feature: MA Experiment 108463 PARAMETER Experiment Name: At_Germinating_Seeds_cDNA_P Parameter: Age (day) Value: 3 vs. 0
  misc_feature: MA Experiment 108463 PARAMETER Experiment Name: At_Germinating_Seeds_cDNA_P Parameter: Tissue Value: Germinating Seeds
  misc_feature: MA Experiment ID: 108501 Result: Down-regulated in Transcription
  misc_feature: MA Experiment 108501 PARAMETER Experiment Name: At_ap2_floral_buds_cDNA_P Parameter: Plant Line Value: ap2 (Ler.)
  misc_feature: MA Experiment 108501 PARAMETER Experiment Name: At_ap2_floral_buds_cDNA_P Parameter: Tissue Value: Closed Flower
  misc_feature: MA Experiment ID: 108577 Result: Down-regulated in Transcription
  misc_feature: MA Experiment 108577 PARAMETER Experiment Name: At_42deg_Heat_cDNA_P Parameter: Temperature (deg C) Value: 42 vs. 22
  misc_feature: MA Experiment 108577 PARAMETER Experiment Name: At_42deg_Heat_cDNA_P Parameter: Timepoint (hr) Value: 6
  misc_feature: MA Experiment 108577 PARAMETER Experiment Name: At_42deg_Heat_cDNA_P Parameter: Tissue Value: Aerial
  misc_feature: MA Experiment ID: 108594 Result: Up-regulated in Transcription
  misc_feature: MA Experiment 108594 PARAMETER Experiment Name: At_Ler-rhl_Root_cDNA_P Parameter: Plant Line Value: null
  misc_feature: MA Experiment ID: 108595 Result: Down-regulated in Transcription
  misc_feature: MA Experiment 108595 PARAMETER Experiment Name: At_Ler-pi_Ovule_cDNA_P Parameter: Plant Line Value: null
  misc_feature: MA Experiment ID: 20000069 Result: Up-regulated in Transcription
  misc_feature: MA Experiment 20000069 PARAMETER Experiment Name: At_100uM_ABA_Mutants_cDNA_P Parameter: Plant Line Value: CS23
  misc_feature: MA Experiment 20000069 PARAMETER Experiment Name: At_100uM_ABA_Mutants_cDNA_P Parameter: Timepoint (hr) Value: 6
  misc_feature: MA Experiment 20000069 PARAMETER Experiment Name: At_100uM_ABA_Mutants_cDNA_P Parameter: Tissue Value: Aerial
  misc_feature: MA Experiment 20000069 PARAMETER Experiment Name: At_100uM_ABA_Mutants_cDNA_P Parameter: Treatment Value: 100uM ABA vs. No Treatment
  misc_feature: MA Experiment ID: 20000089 Result: Up-regulated in Transcription
  misc_feature: MA Experiment ID: 20000090 Result: Up-regulated in Transcription
  misc_feature: MA Experiment ID: 20000111 Result: Down-regulated in Transcription
  misc_feature: MA Experiment 20000111 PARAMETER Experiment Name: At_42deg_Heat_cDNA_P Parameter: Temperature (deg C) Value: 42 vs. 22
  misc_feature: MA Experiment 20000111 PARAMETER Experiment Name: At_42deg_Heat_cDNA_P Parameter: Timepoint (hr) Value: 6
  misc_feature: MA Experiment 20000111 PARAMETER Experiment Name: At_42deg_Heat_cDNA_P Parameter: Tissue Value: Aerial
  misc_feature: MA Experiment ID: 20000112 Result: Down-regulated in Transcription
  misc_feature: MA Experiment 20000112 PARAMETER Experiment Name: At_42deg_Heat_cDNA_P Parameter: Temperature (deg C) Value: 42 vs. 22
  misc_feature: MA Experiment 20000112 PARAMETER Experiment Name: At_42deg_Heat_cDNA_P Parameter: Timepoint (hr) Value: 2
  misc_feature: MA Experiment 20000112 PARAMETER Experiment Name: At_42deg_Heat_cDNA_P Parameter: Tissue Value: Aerial
  misc_feature: MA Experiment ID: 20000113 Result: Down-regulated in Transcription
  misc_feature: MA Experiment 20000113 PARAMETER Experiment Name: At_42deg_Heat_cDNA_P Parameter: Temperature (deg C) Value: 42 vs. 22
  misc_feature: MA Experiment 20000113 PARAMETER Experiment Name: At_42deg_Heat_cDNA_P Parameter: Timepoint (hr) Value: 8
  misc_feature: MA Experiment 20000113 PARAMETER Experiment Name: At_42deg_Heat_cDNA_P Parameter: Tissue Value: Aerial
  misc_feature: MA Experiment ID: 20000173 Result: Down-regulated in Transcription
  misc_feature: MA Experiment 20000173 PARAMETER Experiment Name: At_42deg_Heat_P Parameter: Age (day) Value: 14
  misc_feature: MA Experiment 20000173 PARAMETER Experiment Name: At_42deg_Heat_P Parameter: Organism Value: A. thaliana
  misc_feature: MA Experiment 20000173 PARAMETER Experiment Name: At_42deg_Heat_P Parameter: Plant Line Value: WS
  misc_feature: MA Experiment 20000173 PARAMETER Experiment Name: At_42deg_Heat_P Parameter: Temperature (deg C) Value: 42 vs. 22
  misc_feature: MA Experiment 20000173 PARAMETER Experiment Name: At_42deg_Heat_P Parameter: Timepoint (hr) Value: 6
  misc_feature: MA Experiment 20000173 PARAMETER Experiment Name: At_42deg_Heat_P Parameter: Tissue Value: Aerial
  misc_feature: MA Experiment ID: 20000180 Result: Up-regulated in Transcription
  misc_feature: MA Experiment 20000180 PARAMETER Experiment Name: At_Germinating_Seeds_P Parameter: Age (hr) Value: 24 vs. 0
  misc_feature: MA Experiment 20000180 PARAMETER Experiment Name: At_Germinating_Seeds_P Parameter: Tissue Value: Germinating Seeds
  misc_feature: MA Experiment ID: 20000182 Result: Down-regulated in Transcription
  misc_feature: MA Experiment 20000182 PARAMETER Experiment Name: At_2mM_SA_P Parameter: Age (day) Value: 14
  misc_feature: MA Experiment 20000182 PARAMETER Experiment Name: At_2mM_SA_P Parameter: Organism Value: A. thaliana
  misc_feature: MA Experiment 20000182 PARAMETER Experiment Name: At_2mM_SA_P Parameter: Plant Line Value: WS
  misc_feature: MA Experiment 20000182 PARAMETER Experiment Name: At_2mM_SA_P Parameter: Timepoint (hr) Value: 6
  misc_feature: MA Experiment 20000182 PARAMETER Experiment Name: At_2mM_SA_P Parameter: Tissue Value: Aerial
  misc_feature: MA Experiment 20000182 PARAMETER Experiment Name: At_2mM_SA_P Parameter: Treatment Value: 2mM SA vs. No Treatment
  misc_feature: MA Experiment ID: 20000185 Result: Down-regulated in Transcription
  misc_feature: MA Experiment 20000185 PARAMETER Experiment Name: At_Roots__P Parameter: Age (day) Value: 7 vs. 21
  misc_feature: MA Experiment 20000185 PARAMETER Experiment Name: At_Roots__P Parameter: Organism Value: A. thaliana
  misc_feature: MA Experiment 20000185 PARAMETER Experiment Name: At_Roots__P Parameter: Tissue Value: Roots vs. Whole Plant
  misc_feature: MA Experiment ID: 20000224 Result: Down-regulated in Transcription
  misc_feature: MA Experiment ID: 20000234 Result: Down-regulated in Transcription
  misc_feature: MA Experiment 20000234 PARAMETER Experiment Name: At_Siliques_P Parameter: Age (day) Value: 21
  misc_feature: MA Experiment 20000234 PARAMETER Experiment Name: At_Siliques_P Parameter: Organism Value: A. thaliana
  misc_feature: MA Experiment 20000234 PARAMETER Experiment Name: At_Siliques_P Parameter: Plant Line Value: WS
  misc_feature: MA Experiment 20000234 PARAMETER Experiment Name: At_Siliques_P Parameter: Tissue Value: Less Than 5mm Siliques vs. Whole Plant
  misc_feature: MA Experiment ID: 20000264 Result: Down-regulated in Transcription
  misc_feature: MA Experiment 20000264 PARAMETER Experiment Name: At_Open_Flower_P Parameter: Age (day) Value: 21
  misc_feature: MA Experiment 20000264 PARAMETER Experiment Name: At_Open_Flower_P Parameter: Plant Line Value: WS
  misc_feature: MA Experiment 20000264 PARAMETER Experiment Name: At_Open_Flower_P Parameter: Tissue Value: Open Flower vs. Whole Plant
  misc_feature: MA Experiment ID: 20000265 Result: Down-regulated in Transcription
  misc_feature: MA Experiment 20000265 PARAMETER Experiment Name: At_Open_Flower_P Parameter: Age (day) Value: 21
  misc_feature: MA Experiment 20000265 PARAMETER Experiment Name: At_Open_Flower_P Parameter: Plant Line Value: WS
  misc_feature: MA Experiment 20000265 PARAMETER Experiment Name: At_Open_Flower_P Parameter: Tissue Value: Closed Flower vs. Whole Plant
  misc_feature: MA Experiment ID: 20000286 Result: Down-regulated in Transcription
  misc_feature: MA Experiment 20000286 PARAMETER Experiment Name: At_Open_Flower_P Parameter: Age (day) Value: 21
  misc_feature: MA Experiment 20000286 PARAMETER Experiment Name: At_Open_Flower_P Parameter: Plant Line Value: WS
  misc_feature: MA Experiment 20000286 PARAMETER Experiment Name: At_Open_Flower_P Parameter: Tissue Value: Half Open vs. Whole Plant
  misc_feature: MA Experiment ID: 20000439 Result: Down-regulated in Transcription
  misc_feature: MA Experiment 20000439 PARAMETER Experiment Name: At_Roots__P Parameter: Age (day) Value: 14 vs. 21
  misc_feature: MA Experiment 20000439 PARAMETER Experiment Name: At_Roots__P Parameter: Organism Value: A. thaliana
  misc_feature: MA Experiment 20000439 PARAMETER Experiment Name: At_Roots__P Parameter: Tissue Value: Roots vs. Whole Plant
  misc_feature: MA Experiment ID: 20000452 Result: Up-regulated in Transcription
  misc_feature: MA Experiment 20000452 PARAMETER Experiment Name: At_CS6879_Shoots-Roots_P Parameter: Age (day) Value: 14
  misc_feature: MA Experiment 20000452 PARAMETER Experiment Name: At_CS6879_Shoots-Roots_P Parameter: Organism Value: A. thaliana
  misc_feature: MA Experiment 20000452 PARAMETER Experiment Name: At_CS6879_Shoots-Roots_P Parameter: Plant Line Value: CS6879 vs. WS
  misc_feature: MA Experiment 20000452 PARAMETER Experiment Name: At_CS6879_Shoots-Roots_P Parameter: Tissue Value: Shoots
  misc_feature: MA Experiment ID: 20000794 Result: Down-regulated in Transcription
  misc_feature: MA Experiment 20000794 PARAMETER Experiment Name: At_Petals_P Parameter: Age (day) Value: 23-25 days
  misc_feature: MA Experiment 20000794 PARAMETER Experiment Name: At_Petals_P Parameter: Plant Line Value: WS
  misc_feature: MA Experiment 20000794 PARAMETER Experiment Name: At_Petals_P Parameter: Tissue Value: Petals vs. Whole plant
  misc_feature: MA Experiment ID: 20001248 Result: Up-regulated in Transcription
  misc_feature: MA Experiment 20001248 PARAMETER Experiment Name: At_Far-red-induction_P Parameter: Age (day) Value: 7
  misc_feature: MA Experiment 20001248 PARAMETER Experiment Name: At_Far-red-induction_P Parameter: Light Value: Far-red vs. White
  misc_feature: MA Experiment 20001248 PARAMETER Experiment Name: At_Far-red-induction_P Parameter: Organism Value: A. thaliana
  misc_feature: MA Experiment 20001248 PARAMETER Experiment Name: At_Far-red-induction_P Parameter: Plant Line Value: Columbia
  misc_feature: MA Experiment 20001248 PARAMETER Experiment Name: At_Far-red-induction_P Parameter: Timepoint (hr) Value: 4
  misc_feature: MA Experiment 20001248 PARAMETER Experiment Name: At_Far-red-induction_P Parameter: Tissue Value: Whole Plant
  misc_feature: MA Experiment ID: 20001450 Result: Up-regulated in Transcription
  misc_feature: MA Experiment 20001450 PARAMETER Experiment Name: At_Far-red-induction_P Parameter: Age (day) Value: 7
  misc_feature: MA Experiment 20001450 PARAMETER Experiment Name: At_Far-red-induction_P Parameter: Light Value: Far-red vs. White
  misc_feature: MA Experiment 20001450 PARAMETER Experiment Name: At_Far-red-induction_P Parameter: Organism Value: A. thaliana
  misc_feature: MA Experiment 20001450 PARAMETER Experiment Name: At_Far-red-induction_P Parameter: Plant Line Value: Columbia
  misc_feature: MA Experiment 20001450 PARAMETER Experiment Name: At_Far-red-induction_P Parameter: Timepoint (hr) Value: 8
  misc_feature: MA Experiment 20001450 PARAMETER Experiment Name: At_Far-red-induction_P Parameter: Tissue Value: Whole Plant
  misc_feature: MA Experiment ID: 20001555 Result: Down-regulated in Transcription
  misc_feature: MA Experiment 20001555 PARAMETER Experiment Name: At_Drought_Soil_Dry_P Parameter: Age (day) Value: 24
  misc_feature: MA Experiment 20001555 PARAMETER Experiment Name: At_Drought_Soil_Dry_P Parameter: Organism Value: A. thaliana
  misc_feature: MA Experiment 20001555 PARAMETER Experiment Name: At_Drought_Soil_Dry_P Parameter: Plant Line Value: WS
  misc_feature: MA Experiment 20001555 PARAMETER Experiment Name: At_Drought_Soil_Dry_P Parameter: Post Timepoint (hr) Value: None
  misc_feature: MA Experiment 20001555 PARAMETER Experiment Name: At_Drought_Soil_Dry_P Parameter: Post-Treatment Value: None
  misc_feature: MA Experiment 20001555 PARAMETER Experiment Name: At_Drought_Soil_Dry_P Parameter: Timepoint (day) Value: 10
  misc_feature: MA Experiment 20001555 PARAMETER Experiment Name: At_Drought_Soil_Dry_P Parameter: Treatment Value: Drought vs. No Drought
  misc_feature: MA Experiment ID: 20001556 Result: Down-regulated in Transcription
  misc_feature: MA Experiment 20001556 PARAMETER Experiment Name: At_Drought_Soil_Dry_P Parameter: Age (day) Value: 26
  misc_feature: MA Experiment 20001556 PARAMETER Experiment Name: At_Drought_Soil_Dry_P Parameter: Organism Value: A. thaliana
  misc_feature: MA Experiment 20001556 PARAMETER Experiment Name: At_Drought_Soil_Dry_P Parameter: Plant Line Value: WS
  misc_feature: MA Experiment 20001556 PARAMETER Experiment Name: At_Drought_Soil_Dry_P Parameter: Post Timepoint (hr) Value: None
  misc_feature: MA Experiment 20001556 PARAMETER Experiment Name: At_Drought_Soil_Dry_P Parameter: Post-Treatment Value: None
  misc_feature: MA Experiment 20001556 PARAMETER Experiment Name: At_Drought_Soil_Dry_P Parameter: Timepoint (day) Value: 12
  misc_feature: MA Experiment 20001556 PARAMETER Experiment Name: At_Drought_Soil_Dry_P Parameter: Treatment Value: Drought vs. No Drought
  misc_feature: MA Experiment ID: 20001557 Result: Down-regulated in Transcription
  misc_feature: MA Experiment 20001557 PARAMETER Experiment Name: At_Drought_Soil_Dry_P Parameter: Age (day) Value: 27
  misc_feature: MA Experiment 20001557 PARAMETER Experiment Name: At_Drought_Soil_Dry_P Parameter: Organism Value: A. thaliana
  misc_feature: MA Experiment 20001557 PARAMETER Experiment Name: At_Drought_Soil_Dry_P Parameter: Plant Line Value: WS
  misc_feature: MA Experiment 20001557 PARAMETER Experiment Name: At_Drought_Soil_Dry_P Parameter: Post Timepoint (hr) Value: 3
  misc_feature: MA Experiment 20001557 PARAMETER Experiment Name: At_Drought_Soil_Dry_P Parameter: Post-Treatment Value: Re-Water vs. No Drought
  misc_feature: MA Experiment 20001557 PARAMETER Experiment Name: At_Drought_Soil_Dry_P Parameter: Timepoint (day) Value: 13
  misc_feature: MA Experiment 20001557 PARAMETER Experiment Name: At_Drought_Soil_Dry_P Parameter: Treatment Value: Drought vs. No Drought
  misc_feature: MA Experiment ID: 20001558 Result: Down-regulated in Transcription
  misc_feature: MA Experiment 20001558 PARAMETER Experiment Name: At_Drought_Soil_Dry_P Parameter: Age (day) Value: 27
  misc_feature: MA Experiment 20001558 PARAMETER Experiment Name: At_Drought_Soil_Dry_P Parameter: Organism Value: A. thaliana
  misc_feature: MA Experiment 20001558 PARAMETER Experiment Name: At_Drought_Soil_Dry_P Parameter: Plant Line Value: WS
  misc_feature: MA Experiment 20001558 PARAMETER Experiment Name: At_Drought_Soil_Dry_P Parameter: Post Timepoint (hr) Value: 6
  misc_feature: MA Experiment 20001558 PARAMETER Experiment Name: At_Drought_Soil_Dry_P Parameter: Post-Treatment Value: Re-Water vs. No Drought
  misc_feature: MA Experiment 20001558 PARAMETER Experiment Name: At_Drought_Soil_Dry_P Parameter: Timepoint (day) Value: 13
  misc_feature: MA Experiment 20001558 PARAMETER Experiment Name: At_Drought_Soil_Dry_P Parameter: Treatment Value: Drought vs. No Drought
  misc_feature: MA Experiment ID: 20001559 Result: Down-regulated in Transcription
  misc_feature: MA Experiment 20001559 PARAMETER Experiment Name: At_Drought_Soil_Dry_P Parameter: Age (day) Value: 28
  misc_feature: MA Experiment 20001559 PARAMETER Experiment Name: At_Drought_Soil_Dry_P Parameter: Organism Value: A. thaliana
  misc_feature: MA Experiment 20001559 PARAMETER Experiment Name: At_Drought_Soil_Dry_P Parameter: Plant Line Value: WS
  misc_feature: MA Experiment 20001559 PARAMETER Experiment Name: At_Drought_Soil_Dry_P Parameter: Post Timepoint (hr) Value: 29
  misc_feature: MA Experiment 20001559 PARAMETER Experiment Name: At_Drought_Soil_Dry_P Parameter: Post-Treatment Value: Re-Water vs. No Drought
  misc_feature: MA Experiment 20001559 PARAMETER Experiment Name: At_Drought_Soil_Dry_P Parameter: Timepoint (day) Value: 14
  misc_feature: MA Experiment 20001559 PARAMETER Experiment Name: At_Drought_Soil_Dry_P Parameter: Treatment Value: Drought vs. No Drought
  misc_feature: MA Experiment ID: 20001757 Result: Up-regulated in Transcription
  misc_feature: MA Experiment 20001757 PARAMETER Experiment Name: At_50mM_NH4NO3_L-to-H_P Parameter: Timepoint (hr) Value: 6
  misc_feature: MA Experiment 20001757 PARAMETER Experiment Name: At_50mM_NH4NO3_L-to-H_P Parameter: Tissue Value: Leaf
  misc_feature: MA Experiment 20001757 PARAMETER Experiment Name: At_50mM_NH4NO3_L-to-H_P Parameter: Treatment Value: 50mM NH4NO3 vs 100mM Mannitol
  misc_feature: MA Experiment ID: 20001904 Result: Down-regulated in Transcription
  misc_feature: MA Experiment 20001904 PARAMETER Experiment Name: At_Drought_Reproduction_P Parameter: Age (day) Value: 37
  misc_feature: MA Experiment 20001904 PARAMETER Experiment Name: At_Drought_Reproduction_P Parameter: Organism Value: A. thaliana
  misc_feature: MA Experiment 20001904 PARAMETER Experiment Name: At_Drought_Reproduction_P Parameter: Plant Line Value: WS
  misc_feature: MA Experiment 20001904 PARAMETER Experiment Name: At_Drought_Reproduction_P Parameter: Timepoint (day) Value: 7
  misc_feature: MA Experiment 20001904 PARAMETER Experiment Name: At_Drought_Reproduction_P Parameter: Tissue Value: Rosettes
  misc_feature: MA Experiment 20001904 PARAMETER Experiment Name: At_Drought_Reproduction_P Parameter: Treatment Value: Drought vs. No Drought
  misc_feature: MA Experiment ID: 20001906 Result: Down-regulated in Transcription
  misc_feature: MA Experiment 20001906 PARAMETER Experiment Name: At_Drought_Reproduction_P Parameter: Age (day) Value: 35
  misc_feature: MA Experiment 20001906 PARAMETER Experiment Name: At_Drought_Reproduction_P Parameter: Organism Value: A. thaliana
  misc_feature: MA Experiment 20001906 PARAMETER Experiment Name: At_Drought_Reproduction_P Parameter: Plant Line Value: WS
  misc_feature: MA Experiment 20001906 PARAMETER Experiment Name: At_Drought_Reproduction_P Parameter: Timepoint (day) Value: 5
  misc_feature: MA Experiment 20001906 PARAMETER Experiment Name: At_Drought_Reproduction_P Parameter: Tissue Value: Siliques
  misc_feature: MA Experiment 20001906 PARAMETER Experiment Name: At_Drought_Reproduction_P Parameter: Treatment Value: Drought vs. No Drought
aaaagaaaactgaagaaccccaaaaatcccaagtgaaaacgttatccacttcgagagagtgacacgtcacgaagcaaatccaaattcaaaacctttccataaaaatcaaatcacttcttcttattacttcccccaaatcgaaatcagtcacttaaaaccctaaattatgacgatcgcaccggcattgcagacgacgttcgtgtcatcaaccaacttcctgaaacattcttcttcgtggggatcaccatcaccgaacaatgtgattcttcccaaaaacaagagatcttcttcctccgtagttgtcgccgccgtcggtgatgtctcttctgacggaacaatctacttaatcggcggagccatcgccgttgcactcgtcggaactgcattcccgatcctcttcaaacgcaaaggacccgtgtccggaatgtgacggagcaggatttgtgaggaaaggaggagtgactctgagagccaacgccgcacggaaggatcttcctcagatcgtttgtgctaactgcaatggactcggaaagcttaaccagattgataaatcataagtcttcttcatatatatgtaaaaagctccatttctcattcctcttcttctctacaatatacctctgcaaaagtagatagcttggaatgatcaatggttgcttggagatgggtggatatatatatatatatatatatatacaattgcttttttatgtgtaagtttctttgctttcttgttctgtaagaaattgtctgagtattattgtaagtttttaagcagttatagacgaaggtgctcagctaccaaaataaaacgaac

SEQ ID NO: 101945 - protein, 87 aa, Arabidopsis thaliana
  peptide (1)..(87): Ceres Seq. ID no. 13609116
  misc_feature (1)..(81): Homolog of NCBI NO: 11762216 NR Description: AT5g02160 [Arabidopsis thaliana]
  misc_feature (1)..(87): Homolog of NCBI NO: 15241706 NR Description: expressed protein [Arabidopsis thaliana]
  misc_feature (19)..(81): Homolog of NCBI NO: 14719330 NR Description: unknown protein [Oryza sativa]
MTIAPALQTTFVSSTNFLKHSSSWGSPSPNNVILPKNKRSSSSVVVAAVGDVSSDGTIYLIGGAIAVALVGTAFPILFKRKGPVSGM

SEQ ID NO: 101946 - DNA, 644 bp, Arabidopsis thaliana
  misc_feature (1)..(644): Ceres Seq. ID no. 13609140
  misc_feature: MA Experiment ID: 108435 Result: Down-regulated in Transcription
  misc_feature: MA Experiment 108435 PARAMETER Experiment Name: At_stm_Mutants_cDNA_P Parameter: Plant Line Value: wt Landsburg vs stm
  misc_feature: MA Experiment 108435 PARAMETER Experiment Name: At_stm_Mutants_cDNA_P Parameter: Tissue Value: Shoot Apical Meristem Region
  misc_feature: MA Experiment ID: 108573 Result: Down-regulated in Transcription
  misc_feature: MA Experiment 108573 PARAMETER Experiment Name: At_Drought_cDNA_P Parameter: Timepoint (hr) Value: 6
  misc_feature: MA Experiment 108573 PARAMETER Experiment Name: At_Drought_cDNA_P Parameter: Tissue Value: Aerial
  misc_feature: MA Experiment 108573 PARAMETER Experiment Name: At_Drought_cDNA_P Parameter: Treatment Value: Drought vs. No Drought
  misc_feature: MA Experiment ID: 108595 Result: Down-regulated in Transcription
  misc_feature: MA Experiment 108595 PARAMETER Experiment Name: At_Ler-pi_Ovule_cDNA_P Parameter: Plant Line Value: null
  misc_feature: MA Experiment ID: 20000185 Result: Down-regulated in Transcription
  misc_feature: MA Experiment 20000185 PARAMETER Experiment Name: At_Roots__P Parameter: Age (day) Value: 7 vs. 21
  misc_feature: MA Experiment 20000185 PARAMETER Experiment Name: At_Roots__P Parameter: Organism Value: A. thaliana
  misc_feature: MA Experiment 20000185 PARAMETER Experiment Name: At_Roots__P Parameter: Tissue Value: Roots vs. Whole Plant
  misc_feature: MA Experiment ID: 20000437 Result: Down-regulated in Transcription
  misc_feature: MA Experiment 20000437 PARAMETER Experiment Name: At_Drought_P Parameter: Age (day) Value: 8
  misc_feature: MA Experiment 20000437 PARAMETER Experiment Name: At_Drought_P Parameter: Organism Value: A. thaliana
  misc_feature: MA Experiment 20000437 PARAMETER Experiment Name: At_Drought_P Parameter: Plant Line Value: WS
  misc_feature: MA Experiment 20000437 PARAMETER Experiment Name: At_Drought_P Parameter: Timepoint (hr) Value: 24
  misc_feature: MA Experiment 20000437 PARAMETER Experiment Name: At_Drought_P Parameter: Tissue Value: Whole Plant
  misc_feature: MA Experiment 20000437 PARAMETER Experiment Name: At_Drought_P Parameter: Treatment Value: Drought vs. No Drought
  misc_feature: MA Experiment ID: 20000439 Result: Down-regulated in Transcription
  misc_feature: MA Experiment 20000439 PARAMETER Experiment Name: At_Roots__P Parameter: Age (day) Value: 14 vs. 21
  misc_feature: MA Experiment 20000439 PARAMETER Experiment Name: At_Roots__P Parameter: Organism Value: A. thaliana
  misc_feature: MA Experiment 20000439 PARAMETER Experiment Name: At_Roots__P Parameter: Tissue Value: Roots vs. Whole Plant
  misc_feature: MA Experiment ID: 20000794 Result: Down-regulated in Transcription
  misc_feature: MA Experiment 20000794 PARAMETER Experiment Name: At_Petals_P Parameter: Age (day) Value: 23-25 days
  misc_feature: MA Experiment 20000794 PARAMETER Experiment Name: At_Petals_P Parameter: Plant Line Value: WS
  misc_feature: MA Experiment 20000794 PARAMETER Experiment Name: At_Petals_P Parameter: Tissue Value: Petals vs. Whole plant
  misc_feature: MA Experiment ID: 20001757 Result: Up-regulated in Transcription
  misc_feature: MA Experiment 20001757 PARAMETER Experiment Name: At_50mM_NH4NO3_L-to-H_P Parameter: Timepoint (hr) Value: 6
  misc_feature: MA Experiment 20001757 PARAMETER Experiment Name: At_50mM_NH4NO3_L-to-H_P Parameter: Tissue Value: Leaf
  misc_feature: MA Experiment 20001757 PARAMETER Experiment Name: At_50mM_NH4NO3_L-to-H_P Parameter: Treatment Value: 50mM NH4NO3 vs 100mM Mannitol
ctcattctcttatccatcaatcgttacttcgtttcttctctatcaccaggaaaaaagaagaagatagctcctgaagacaaaaatggcggtttctctcccgaactcgtttcttcagattagcccatgtgttccttctctgcaattaagaaagccggtgatggcggcagtgaaaggaggaaaacaatcggtgagaagaagcagcaatacggtggttcagataacgtgtcgtaagaaggaattgcatcctgaattccacgaagacgcaaaggtttactgcaatggagagctggtgatgactacaggaggaacaaagaaagagtatgtggttgatgtatggtcaggtaaccatccgttttacctcgggaatcgttcggctttgatggttgatgctgatcaagttgagaagtttcgtaagaggttcgctgggctttctgagattatggagattcctgtgcttaaaggagaaatcattatgcctactaagaaaagtaaaggtcccaaagggaagaagaaatgatgagtcttttctggtaaagcttatgtctttgaatttgttgtcttttcaattgaagtcgagatactgcttaggctgttaaaaattgtatgtgaattttcttctgaatgctattggttatgctttcttt

SEQ ID NO: 101947 - protein, 144 aa, Arabidopsis thaliana; identical to SEQ ID NO: 24197
  peptide (1)..(144): Ceres Seq. ID no. 13609141
  misc_feature (50)..(117): Pfam Name: Ribosomal protein L31 Pfam Description: Ribosomal protein L31
  misc_feature (1)..(144): Homolog of NCBI NO: 18410833 NR Description: chloroplast 50S ribosomal protein L31 -related
  misc_feature (46)..(144): Homolog of NCBI NO: 3885513 NR Description: similar to chloroplast 50S ribosomal protein L31
  misc_feature (24)..(118): Homolog of NCBI NO: 34912982 NR Description: putative chloroplast 50S ribosomal protein L31
  misc_feature (50)..(144): Homolog of NCBI NO: 22297654 NR Description: 50S ribosomal protein L31 [Thermosynechococcus BP- 1] >gi|31076955|sp|Q8DMK6|RL31_SYNEL 50S ribosomal protein >gi|22293831|dbj|BAC07663.1| 50S ribosomal protein L31
  misc_feature (50)..(118): Homolog of NCBI NO: 11467741 NR Description: ribosomal protein L31 [Guillardia theta] Chloroplast 50S ribosomal protein L31 >gi|3603066|gb|AAC35727.1|
  misc_feature (50)..(143): Homolog of NCBI NO: 23042796 NR Description: hypothetical protein [Trichodesmium erythraeum
  misc_feature (50)..(113): Homolog of NCBI NO: 33862086 NR Description: 50S ribosomal protein L31 [Prochlorococcus subsp. pastoris str. CCMP1378] >gi|33634304|emb|CAE19989.1| 50S protein L31 [Prochlorococcus marinus subsp. pastoris str.
  misc_feature (50)..(117): Homolog of NCBI NO: 17231678 NR Description: 50S ribosomal protein L31 [Nostoc sp. PCC 7120]
  misc_feature (50)..(113): Homolog of NCBI NO: 33241133 NR Description: Ribosomal protein L31 [Prochlorococcus marinus marinus str. CCMP1375] >gi|33238663|gb|AAQ00728.1| Ribosomal
  misc_feature (50)..(118): Homolog of NCBI NO: 33866627 NR Description: 50S ribosomal protein L31 [Synechococcus sp. WH >gi|33633405|emb|CAE08610.1| 50S ribosomal protein L31

SEQ ID NO: 101948 - protein, 119 aa, Arabidopsis thaliana; identical to SEQ ID NO: 24198
  peptide (1)..(119): Ceres Seq. ID no. 13609142
  misc_feature (25)..(92): Pfam Name: Ribosomal protein L31 Pfam Description: Ribosomal protein L31
  misc_feature (1)..(119): Homolog of NCBI NO: 18410833 NR Description: chloroplast 50S ribosomal protein L31 -related
  misc_feature (21)..(119): Homolog of NCBI NO: 3885513 NR Description: similar to chloroplast 50S ribosomal protein L31
  misc_feature (1)..(93): Homolog of NCBI NO: 34912982 NR Description: putative chloroplast 50S ribosomal protein L31
  misc_feature (25)..(119): Homolog of NCBI NO: 22297654 NR Description: 50S ribosomal protein L31 [Thermosynechococcus BP- 1] >gi|31076955|sp|Q8DMK6|RL31_SYNEL 50S ribosomal protein >gi|22293831|dbj|BAC07663.1| 50S ribosomal protein L31
  misc_feature (25)..(93): Homolog of NCBI NO: 11467741 NR Description: ribosomal protein L31 [Guillardia theta] Chloroplast 50S ribosomal protein L31 >gi|3603066|gb|AAC35727.1|
  misc_feature (25)..(118): Homolog of NCBI NO: 23042796 NR Description: hypothetical protein [Trichodesmium erythraeum
  misc_feature (25)..(88): Homolog of NCBI NO: 33862086 NR Description: 50S ribosomal protein L31 [Prochlorococcus subsp. pastoris str. CCMP1378] >gi|33634304|emb|CAE19989.1| 50S protein L31 [Prochlorococcus marinus subsp. pastoris str.
  misc_feature (25)..(92): Homolog of NCBI NO: 17231678 NR Description: 50S ribosomal protein L31 [Nostoc sp. PCC 7120]
  misc_feature (25)..(88): Homolog of NCBI NO: 33241133 NR Description: Ribosomal protein L31 [Prochlorococcus marinus marinus str. CCMP1375] >gi|33238663|gb|AAQ00728.1| Ribosomal
  misc_feature (25)..(93): Homolog of NCBI NO: 33866627 NR Description: 50S ribosomal protein L31 [Synechococcus sp. WH >gi|33633405|emb|CAE08610.1| 50S ribosomal protein L31

SEQ ID NO: 101949 - protein, 74 aa, Arabidopsis thaliana; identical to SEQ ID NO: 24199
  peptide (1)..(74): Ceres Seq. ID no. 13609143
  misc_feature (1)..(74): Homolog of NCBI NO: 18410833 NR Description: chloroplast 50S ribosomal protein L31 -related
  misc_feature (1)..(74): Homolog of NCBI NO: 3885513 NR Description: similar to chloroplast 50S ribosomal protein L31
  misc_feature (1)..(48): Homolog of NCBI NO: 34912982 NR Description: putative chloroplast 50S ribosomal protein L31
  misc_feature (1)..(74): Homolog of NCBI NO: 22297654 NR Description: 50S ribosomal protein L31 [Thermosynechococcus BP- 1] >gi|31076955|sp|Q8DMK6|RL31_SYNEL 50S ribosomal protein >gi|22293831|dbj|BAC07663.1| 50S ribosomal protein L31
  misc_feature (1)..(48): Homolog of NCBI NO: 11467741 NR Description: ribosomal protein L31 [Guillardia theta] Chloroplast 50S ribosomal protein L31 >gi|3603066|gb|AAC35727.1|
  misc_feature (1)..(73): Homolog of NCBI NO: 23042796 NR Description: hypothetical protein [Trichodesmium erythraeum
  misc_feature (1)..(43): Homolog of NCBI NO: 33862086 NR Description: 50S ribosomal protein L31 [Prochlorococcus subsp. pastoris str. CCMP1378] >gi|33634304|emb|CAE19989.1| 50S protein L31 [Prochlorococcus marinus subsp. pastoris str.
  misc_feature (1)..(47): Homolog of NCBI NO: 17231678 NR Description: 50S ribosomal protein L31 [Nostoc sp. PCC 7120]
  misc_feature (1)..(43): Homolog of NCBI NO: 33241133 NR Description: Ribosomal protein L31 [Prochlorococcus marinus marinus str. CCMP1375] >gi|33238663|gb|AAQ00728.1| Ribosomal
  misc_feature (1)..(48): Homolog of NCBI NO: 33866627 NR Description: 50S ribosomal protein L31 [Synechococcus sp. WH >gi|33633405|emb|CAE08610.1| 50S ribosomal protein L31

SEQ ID NO: 101950 - DNA, 739 bp, Arabidopsis thaliana
  misc_feature (1)..(739): Ceres Seq. ID no. 13609144
  misc_feature: MA Experiment ID: 108434 Result: Down-regulated in Transcription
  misc_feature: MA Experiment 108434 PARAMETER Experiment Name: At_Root_Tips_cDNA_P Parameter: Tissue Value: Root Tips
  misc_feature: MA Experiment ID: 108464 Result: Up-regulated in Transcription
  misc_feature: MA Experiment 108464 PARAMETER Experiment Name: At_Germinating_Seeds_cDNA_P Parameter: Age (day) Value: 4 vs. 0
  misc_feature: MA Experiment 108464 PARAMETER Experiment Name: At_Germinating_Seeds_cDNA_P Parameter: Tissue Value: Germinating Seeds
  misc_feature: MA Experiment ID: 108573 Result: Down-regulated in Transcription
  misc_feature: MA Experiment 108573 PARAMETER Experiment Name: At_Drought_cDNA_P Parameter: Timepoint (hr) Value: 6
  misc_feature: MA Experiment 108573 PARAMETER Experiment Name: At_Drought_cDNA_P Parameter: Tissue Value: Aerial
  misc_feature: MA Experiment 108573 PARAMETER Experiment Name: At_Drought_cDNA_P Parameter: Treatment Value: Drought vs. No Drought
  misc_feature: MA Experiment ID: 20000179 Result: Down-regulated in Transcription
  misc_feature: MA Experiment 20000179 PARAMETER Experiment Name: At_Germinating_Seeds_P Parameter: Age (hr) Value: 6 vs. 0
  misc_feature: MA Experiment 20000179 PARAMETER Experiment Name: At_Germinating_Seeds_P Parameter: Tissue Value: Germinating Seeds
  misc_feature: MA Experiment ID: 20000185 Result: Up-regulated in Transcription
  misc_feature: MA Experiment 20000185 PARAMETER Experiment Name: At_Roots__P Parameter: Age (day) Value: 7 vs. 21
  misc_feature: MA Experiment 20000185 PARAMETER Experiment Name: At_Roots__P Parameter: Organism Value: A. thaliana
  misc_feature: MA Experiment 20000185 PARAMETER Experiment Name: At_Roots__P Parameter: Tissue Value: Roots vs. Whole Plant
  misc_feature: MA Experiment ID: 20000227 Result: Down-regulated in Transcription
  misc_feature: MA Experiment 20000227 PARAMETER Experiment Name: At_Root-Tips-vs-Tops_P Parameter: Tissue Value: Root Tips vs. Root Tops
  misc_feature: MA Experiment ID: 20000234 Result: Down-regulated in Transcription
  misc_feature: MA Experiment 20000234 PARAMETER Experiment Name: At_Siliques_P Parameter: Age (day) Value: 21
  misc_feature: MA Experiment 20000234 PARAMETER Experiment Name: At_Siliques_P Parameter: Organism Value: A. thaliana
  misc_feature: MA Experiment 20000234 PARAMETER Experiment Name: At_Siliques_P Parameter: Plant Line Value: WS
  misc_feature: MA Experiment 20000234 PARAMETER Experiment Name: At_Siliques_P Parameter: Tissue Value: Less Than 5mm Siliques vs. Whole Plant
  misc_feature: MA Experiment ID: 20000286 Result: Down-regulated in Transcription
  misc_feature: MA Experiment 20000286 PARAMETER Experiment Name: At_Open_Flower_P Parameter: Age (day) Value: 21
  misc_feature: MA Experiment 20000286 PARAMETER Experiment Name: At_Open_Flower_P Parameter: Plant Line Value: WS
  misc_feature: MA Experiment 20000286 PARAMETER Experiment Name: At_Open_Flower_P Parameter: Tissue Value: Half Open vs. Whole Plant
  misc_feature: MA Experiment ID: 20000439 Result: Up-regulated in Transcription
  misc_feature: MA Experiment 20000439 PARAMETER Experiment Name: At_Roots__P Parameter: Age (day) Value: 14 vs. 21
  misc_feature: MA Experiment 20000439 PARAMETER Experiment Name: At_Roots__P Parameter: Organism Value: A. thaliana
  misc_feature: MA Experiment 20000439 PARAMETER Experiment Name: At_Roots__P Parameter: Tissue Value: Roots vs. Whole Plant
  misc_feature: MA Experiment ID: 20000456 Result: Up-regulated in Transcription
  misc_feature: MA Experiment 20000456 PARAMETER Experiment Name: At_100uM_BA_P Parameter: Age (day) Value: 14
  misc_feature: MA Experiment 20000456 PARAMETER Experiment Name: At_100uM_BA_P Parameter: Organism Value: A. thaliana
  misc_feature: MA Experiment 20000456 PARAMETER Experiment Name: At_100uM_BA_P Parameter: Plant Line Value: WS
  misc_feature: MA Experiment 20000456 PARAMETER Experiment Name: At_100uM_BA_P Parameter: Timepoint (hr) Value: 6
  misc_feature: MA Experiment 20000456 PARAMETER Experiment Name: At_100uM_BA_P Parameter: Tissue Value: Aerial
  misc_feature: MA Experiment 20000456 PARAMETER Experiment Name: At_100uM_BA_P Parameter: Treatment Value: 100uM BA vs. No Treatment
  misc_feature: MA Experiment ID: 20001557 Result: Down-regulated in Transcription
  misc_feature: MA Experiment 20001557 PARAMETER Experiment Name: At_Drought_Soil_Dry_P Parameter: Age (day) Value: 27
  misc_feature: MA Experiment 20001557 PARAMETER Experiment Name: At_Drought_Soil_Dry_P Parameter: Organism Value: A. thaliana
  misc_feature: MA Experiment 20001557 PARAMETER Experiment Name: At_Drought_Soil_Dry_P Parameter: Plant Line Value: WS
  misc_feature: MA Experiment 20001557 PARAMETER Experiment Name: At_Drought_Soil_Dry_P Parameter: Post Timepoint (hr) Value: 3
  misc_feature: MA Experiment 20001557 PARAMETER Experiment Name: At_Drought_Soil_Dry_P Parameter: Post-Treatment Value: Re-Water vs. No Drought
  misc_feature: MA Experiment 20001557 PARAMETER Experiment Name: At_Drought_Soil_Dry_P Parameter: Timepoint (day) Value: 13
  misc_feature: MA Experiment 20001557 PARAMETER Experiment Name: At_Drought_Soil_Dry_P Parameter: Treatment Value: Drought vs. No Drought
  misc_feature: MA Experiment ID: 20001558 Result: Down-regulated in Transcription
  misc_feature: MA Experiment 20001558 PARAMETER Experiment Name: At_Drought_Soil_Dry_P Parameter: Age (day) Value: 27
  misc_feature: MA Experiment 20001558 PARAMETER Experiment Name: At_Drought_Soil_Dry_P Parameter: Organism Value: A. thaliana
  misc_feature: MA Experiment 20001558 PARAMETER Experiment Name: At_Drought_Soil_Dry_P Parameter: Plant Line Value: WS
  misc_feature: MA Experiment 20001558 PARAMETER Experiment Name: At_Drought_Soil_Dry_P Parameter: Post Timepoint (hr) Value: 6
  misc_feature: MA Experiment 20001558 PARAMETER Experiment Name: At_Drought_Soil_Dry_P Parameter: Post-Treatment Value: Re-Water vs. No Drought
  misc_feature: MA Experiment 20001558 PARAMETER Experiment Name: At_Drought_Soil_Dry_P Parameter: Timepoint (day) Value: 13
  misc_feature: MA Experiment 20001558 PARAMETER Experiment Name: At_Drought_Soil_Dry_P Parameter: Treatment Value: Drought vs. No Drought
  misc_feature: MA Experiment ID: 20001560 Result: Down-regulated in Transcription
  misc_feature: MA Experiment 20001560 PARAMETER Experiment Name: At_Drought_Soil_Dry_P Parameter: Age (day) Value: 28
  misc_feature: MA Experiment 20001560 PARAMETER Experiment Name: At_Drought_Soil_Dry_P Parameter: Organism Value: A. thaliana
  misc_feature: MA Experiment 20001560 PARAMETER Experiment Name: At_Drought_Soil_Dry_P Parameter: Plant Line Value: WS
  misc_feature: MA Experiment 20001560 PARAMETER Experiment Name: At_Drought_Soil_Dry_P Parameter: Post Timepoint (hr) Value: None
  misc_feature: MA Experiment 20001560 PARAMETER Experiment Name: At_Drought_Soil_Dry_P Parameter: Post-Treatment Value: None
  misc_feature: MA Experiment 20001560 PARAMETER Experiment Name: At_Drought_Soil_Dry_P Parameter: Timepoint (day) Value: 14
  misc_feature: MA Experiment 20001560 PARAMETER Experiment Name: At_Drought_Soil_Dry_P Parameter: Treatment Value: Drought vs. No Drought
  misc_feature: MA Experiment ID: 20001905 Result: Down-regulated in Transcription
  misc_feature: MA Experiment 20001905 PARAMETER Experiment Name: At_Drought_Reproduction_P Parameter: Age (day) Value: 40
  misc_feature: MA Experiment 20001905 PARAMETER Experiment Name: At_Drought_Reproduction_P Parameter: Organism Value: A. thaliana
  misc_feature: MA Experiment 20001905 PARAMETER Experiment Name: At_Drought_Reproduction_P Parameter: Plant Line Value: WS
  misc_feature: MA Experiment 20001905 PARAMETER Experiment Name: At_Drought_Reproduction_P Parameter: Timepoint (day) Value: 10
  misc_feature: MA Experiment 20001905 PARAMETER Experiment Name: At_Drought_Reproduction_P Parameter: Tissue Value: Rosettes
  misc_feature: MA Experiment 20001905 PARAMETER Experiment Name: At_Drought_Reproduction_P Parameter: Treatment Value: Drought vs. No Drought
aaatctgaacccttcgattttcgattcttcctcgagccttccttccttccttcttcttctccaagaggattttgattgtctcctttactctctccatgtcaagttctggtgctccttcacgcaagactctgagtaagatcgcgactaatcgtcttcagaaagagcttgtggaatggcagatgaatccacctactggtttcaaacacaaagtcactgataatctccaaagatggataattgaagttattggagctccaggaactctatatgccaacgatacttatcagcttcaagttgattttccagaacattatcctatggaatcgccacaagtgatttttcttcatccagctcctctgcatcctcacatttacagcaatgggcatatttgtctagatattttgtatgattcgtggtctccagccatgacggtgagttctatctgcattagcatcctctccatgctctcaagctcgactgaaaagcaacgaccaaccgataatgaccgatatgtgaagaattgtaagaacggaagatctccaaaggagacccgatggtggttccacgacgataaagtataaacctcgatcaaccaaaaaaaatgtaaaatagtccaaaacagtctttgaggtttgttgtctatttttaatttaattgggtttaagctgtcccaaacccatttccaaaatccgtgatgtataaaaacaacacaataaatttgactaattttgaatcttct

SEQ ID NO: 101951 - protein, 161 aa, Arabidopsis thaliana; identical to SEQ ID NO: 20789
  peptide (1)..(161): Ceres Seq. ID no. 13609145
  misc_feature (1)..(161): Homolog of NCBI NO: 18410856 NR Description: ubiquitin-conjugating enzyme 16 (UBC16)
  misc_feature (1)..(161): Homolog of NCBI NO: 2801444 NR Description: ubiquitin-conjugating enzyme 16 [Arabidopsis
  misc_feature (1)..(161): Homolog of NCBI NO: 18422281 NR Description: ubiquitin-conjugating enzyme 18 (UBC18)
  misc_feature (1)..(161): Homolog of NCBI NO: 18401461 NR Description: ubiquitin-conjugating enzyme 15 (UBC15)
  misc_feature (1)..(161): Homolog of NCBI NO: 481811 NR Description: ubiquitin-conjugating enzyme UBC2-1 - Arabidopsis
  misc_feature (1)..(161): Homolog of NCBI NO: 4090259 NR Description: ubiquitin-conjugating enzyme E2 [Pseudotsuga
  misc_feature (1)..(161): Homolog of NCBI NO: 18419831 NR Description: ubiquitin-conjugating enzyme 17 (UBC17)
  misc_feature (1)..(130): Homolog of NCBI NO: 34897008 NR Description: putative ubiquitin-conjugating enzyme E2 [Oryza
  misc_feature (65)..(161): Homolog of NCBI NO: 25293670 NR Description: ubiquitin-conjugating enzyme 18 [imported] -
  misc_feature (1)..(102): Homolog of NCBI NO: 25293672 NR Description: protein F27F5.13 [imported] - Arabidopsis >gi|7767660|gb|AAF69157.1|AC007915_9 F27F5.13 [Arabidopsis

SEQ ID NO: 101952 - protein, 133 aa, Arabidopsis thaliana; identical to SEQ ID NO: 20790
  peptide (1)..(133): Ceres Seq. ID no. 13609146
  misc_feature (1)..(133): Homolog of NCBI NO: 18410856 NR Description: ubiquitin-conjugating enzyme 16 (UBC16)
  misc_feature (1)..(133): Homolog of NCBI NO: 2801444 NR Description: ubiquitin-conjugating enzyme 16 [Arabidopsis
  misc_feature (1)..(133): Homolog of NCBI NO: 18422281 NR Description: ubiquitin-conjugating enzyme 18 (UBC18)
  misc_feature (1)..(133): Homolog of NCBI NO: 18401461 NR Description: ubiquitin-conjugating enzyme 15 (UBC15)
  misc_feature (1)..(133): Homolog of NCBI NO: 481811 NR Description: ubiquitin-conjugating enzyme UBC2-1 - Arabidopsis
  misc_feature (1)..(133): Homolog of NCBI NO: 4090259 NR Description: ubiquitin-conjugating enzyme E2 [Pseudotsuga
  misc_feature (1)..(133): Homolog of NCBI NO: 18419831 NR Description: ubiquitin-conjugating enzyme 17 (UBC17)
  misc_feature (1)..(102): Homolog of NCBI NO: 34897008 NR Description: putative ubiquitin-conjugating enzyme E2 [Oryza
  misc_feature (37)..(133): Homolog of NCBI NO: 25293670 NR Description: ubiquitin-conjugating enzyme 18 [imported] -
  misc_feature (1)..(74): Homolog of NCBI NO: 25293672 NR Description: protein F27F5.13 [imported] - Arabidopsis >gi|7767660|gb|AAF69157.1|AC007915_9 F27F5.13 [Arabidopsis

SEQ ID NO: 101953 - protein, 87 aa, Arabidopsis thaliana; identical to SEQ ID NO: 20791
  peptide (1)..(87): Ceres Seq. ID no. 13609147
  misc_feature (1)..(87): Homolog of NCBI NO: 18410856 NR Description: ubiquitin-conjugating enzyme 16 (UBC16)
  misc_feature (1)..(87): Homolog of NCBI NO: 2801444 NR Description: ubiquitin-conjugating enzyme 16 [Arabidopsis
  misc_feature (1)..(87): Homolog of NCBI NO: 18422281 NR Description: ubiquitin-conjugating enzyme 18 (UBC18)
  misc_feature (1)..(87): Homolog of NCBI NO: 18401461 NR Description: ubiquitin-conjugating enzyme 15 (UBC15)
  misc_feature (1)..(87): Homolog of NCBI NO: 481811 NR Description: ubiquitin-conjugating enzyme UBC2-1 - Arabidopsis
  misc_feature (1)..(87): Homolog of NCBI NO: 4090259 NR Description: ubiquitin-conjugating enzyme E2 [Pseudotsuga
  misc_feature (1)..(87): Homolog of NCBI NO: 18419831 NR Description: ubiquitin-conjugating enzyme 17 (UBC17)
  misc_feature (1)..(56): Homolog of NCBI NO: 34897008 NR Description: putative ubiquitin-conjugating enzyme E2 [Oryza
  misc_feature (1)..(87): Homolog of NCBI NO: 25293670 NR Description: ubiquitin-conjugating enzyme 18 [imported] -
  misc_feature (1)..(28): Homolog of NCBI NO: 25293672 NR Description: protein F27F5.13 [imported] - Arabidopsis >gi|7767660|gb|AAF69157.1|AC007915_9 F27F5.13 [Arabidopsis

SEQ ID NO: 101954 - DNA, 631 bp, Arabidopsis thaliana
  misc_feature (1)..(631): Ceres Seq. ID no. 13609148
  misc_feature: MA Experiment ID: 108434 Result: Down-regulated in Transcription
  misc_feature: MA Experiment 108434 PARAMETER Experiment Name: At_Root_Tips_cDNA_P Parameter: Tissue Value: Root Tips
  misc_feature: MA Experiment ID: 108435 Result: Down-regulated in Transcription
  misc_feature: MA Experiment 108435 PARAMETER Experiment Name: At_stm_Mutants_cDNA_P Parameter: Plant Line Value: wt Landsburg vs stm
  misc_feature: MA Experiment 108435 PARAMETER Experiment Name: At_stm_Mutants_cDNA_P Parameter: Tissue Value: Shoot Apical Meristem Region
  misc_feature: MA Experiment ID: 108461 Result: Up-regulated in Transcription
  misc_feature: MA Experiment 108461 PARAMETER Experiment Name: At_Germinating_Seeds_cDNA_P Parameter: Age (day) Value: 1 vs. 0
  misc_feature: MA Experiment 108461 PARAMETER Experiment Name: At_Germinating_Seeds_cDNA_P Parameter: Tissue Value: Germinating Seeds
  misc_feature: MA Experiment ID: 108462 Result: Up-regulated in Transcription
  misc_feature: MA Experiment 108462 PARAMETER Experiment Name: At_Germinating_Seeds_cDNA_P Parameter: Age (day) Value: 2 vs. 0
  misc_feature: MA Experiment 108462 PARAMETER Experiment Name: At_Germinating_Seeds_cDNA_P Parameter: Tissue Value: Germinating Seeds
  misc_feature: MA Experiment ID: 108463 Result: Up-regulated in Transcription
  misc_feature: MA Experiment 108463 PARAMETER Experiment Name: At_Germinating_Seeds_cDNA_P Parameter: Age (day) Value: 3 vs. 0
  misc_feature: MA Experiment 108463 PARAMETER Experiment Name: At_Germinating_Seeds_cDNA_P Parameter: Tissue Value: Germinating Seeds
  misc_feature: MA Experiment ID: 108464 Result: Up-regulated in Transcription
  misc_feature: MA Experiment 108464 PARAMETER Experiment Name: At_Germinating_Seeds_cDNA_P Parameter: Age (day) Value: 4 vs. 0
  misc_feature: MA Experiment 108464 PARAMETER Experiment Name: At_Germinating_Seeds_cDNA_P Parameter: Tissue Value: Germinating Seeds
  misc_feature: MA Experiment ID: 108473 Result: Down-regulated in Transcription
  misc_feature: MA Experiment 108473 PARAMETER Experiment Name: At_Drought_Flowers_cDNA_P Parameter: Timepoint (hr) Value: 7 d
  misc_feature: MA Experiment 108473 PARAMETER Experiment Name: At_Drought_Flowers_cDNA_P Parameter: Tissue Value: Flower
  misc_feature: MA Experiment 108473 PARAMETER Experiment Name: At_Drought_Flowers_cDNA_P Parameter: Treatment Value: Drought vs. No Drought
  misc_feature: MA Experiment ID: 108501 Result: Down-regulated in Transcription
  misc_feature: MA Experiment 108501 PARAMETER Experiment Name: At_ap2_floral_buds_cDNA_P Parameter: Plant Line Value: ap2 (Ler.)
  misc_feature: MA Experiment 108501 PARAMETER Experiment Name: At_ap2_floral_buds_cDNA_P Parameter: Tissue Value: Closed Flower
  misc_feature: MA Experiment ID: 108572 Result: Down-regulated in Transcription
  misc_feature: MA Experiment 108572 PARAMETER Experiment Name: At_Drought_cDNA_P Parameter: Timepoint (hr) Value: 1
  misc_feature: MA Experiment 108572 PARAMETER Experiment Name: At_Drought_cDNA_P Parameter: Tissue Value: Aerial
  misc_feature: MA Experiment 108572 PARAMETER Experiment Name: At_Drought_cDNA_P Parameter: Treatment Value: Drought vs. No Drought
  misc_feature: MA Experiment ID: 108573 Result: Down-regulated in Transcription
  misc_feature: MA Experiment 108573 PARAMETER Experiment Name: At_Drought_cDNA_P Parameter: Timepoint (hr) Value: 6
  misc_feature: MA Experiment 108573 PARAMETER Experiment Name: At_Drought_cDNA_P Parameter: Tissue Value: Aerial
  misc_feature: MA Experiment 108573 PARAMETER Experiment Name: At_Drought_cDNA_P Parameter: Treatment Value: Drought vs. No Drought
  misc_feature: MA Experiment ID: 108576 Result: Up-regulated in Transcription
  misc_feature: MA Experiment 108576 PARAMETER Experiment Name: At_42deg_Heat_cDNA_P Parameter: Temperature (deg C) Value: 42 vs. 22
  misc_feature: MA Experiment 108576 PARAMETER Experiment Name: At_42deg_Heat_cDNA_P Parameter: Timepoint (hr) Value: 1
  misc_feature: MA Experiment 108576 PARAMETER Experiment Name: At_42deg_Heat_cDNA_P Parameter: Tissue Value: Aerial
  misc_feature: MA Experiment ID: 108577 Result: Up-regulated in Transcription
  misc_feature: MA Experiment 108577 PARAMETER Experiment Name: At_42deg_Heat_cDNA_P Parameter: Temperature (deg C) Value: 42 vs. 22
  misc_feature: MA Experiment 108577 PARAMETER Experiment Name: At_42deg_Heat_cDNA_P Parameter: Timepoint (hr) Value: 6
  misc_feature: MA Experiment 108577 PARAMETER Experiment Name: At_42deg_Heat_cDNA_P Parameter: Tissue Value: Aerial
  misc_feature: MA Experiment ID: 108595 Result: Down-regulated in Transcription
  misc_feature: MA Experiment 108595 PARAMETER Experiment Name: At_Ler-pi_Ovule_cDNA_P Parameter: Plant Line Value: null
  misc_feature: MA Experiment ID: 108607 Result: Down-regulated in Transcription
  misc_feature: MA Experiment 108607 PARAMETER Experiment Name: At_100uM_ABA_cDNA_P Parameter: Timepoint (hr) Value: 4
  misc_feature: MA Experiment 108607 PARAMETER Experiment Name: At_100uM_ABA_cDNA_P Parameter: Tissue Value: Aerial
  misc_feature: MA Experiment 108607 PARAMETER Experiment Name: At_100uM_ABA_cDNA_P Parameter: Treatment Value: 100uM ABA vs. No Treatment
  misc_feature: MA Experiment ID: 108609 Result: Up-regulated in Transcription
  misc_feature: MA Experiment 108609 PARAMETER Experiment Name: At_100uM_ABA_cDNA_P Parameter: Timepoint (hr) Value: 24
  misc_feature: MA Experiment 108609 PARAMETER Experiment Name: At_100uM_ABA_cDNA_P Parameter: Tissue Value: Aerial
  misc_feature: MA Experiment 108609 PARAMETER Experiment Name: At_100uM_ABA_cDNA_P Parameter: Treatment Value: 100uM ABA vs. No Treatment
  misc_feature: MA Experiment ID: 20000070 Result: Down-regulated in Transcription
  misc_feature: MA Experiment 20000070 PARAMETER Experiment Name: At_100uM_ABA_Mutants_cDNA_P Parameter: Plant Line Value: CS24
  misc_feature: MA Experiment 20000070 PARAMETER Experiment Name: At_100uM_ABA_Mutants_cDNA_P Parameter: Timepoint (hr) Value: 6
  misc_feature: MA Experiment 20000070 PARAMETER Experiment Name: At_100uM_ABA_Mutants_cDNA_P Parameter: Tissue Value: Aerial
  misc_feature: MA Experiment 20000070 PARAMETER Experiment Name: At_100uM_ABA_Mutants_cDNA_P Parameter: Treatment Value: 100uM ABA vs. No Treatment
  misc_feature: MA Experiment ID: 20000072 Result: Down-regulated in Transcription
  misc_feature: MA Experiment 20000072 PARAMETER Experiment Name: At_100uM_ABA_Mutants_cDNA_P Parameter: Plant Line Value: CS8105
  misc_feature: MA Experiment 20000072 PARAMETER Experiment Name: At_100uM_ABA_Mutants_cDNA_P Parameter: Timepoint (hr) Value: 6
  misc_feature: MA Experiment 20000072 PARAMETER Experiment Name: At_100uM_ABA_Mutants_cDNA_P Parameter: Tissue Value: Aerial
  misc_feature: MA Experiment 20000072 PARAMETER Experiment Name: At_100uM_ABA_Mutants_cDNA_P Parameter: Treatment Value: 100uM ABA vs. No Treatment
  misc_feature: MA Experiment ID: 20000093 Result: Up-regulated in Transcription
  misc_feature: MA Experiment 20000093 PARAMETER Experiment Name: At_42deg_Heat_cDNA_P Parameter: Temperature (deg C) Value: 42 vs. 22
  misc_feature: MA Experiment 20000093 PARAMETER Experiment Name: At_42deg_Heat_cDNA_P Parameter: Timepoint (hr) Value: 0.5
  misc_feature: MA Experiment 20000093 PARAMETER Experiment Name: At_42deg_Heat_cDNA_P Parameter: Tissue Value: Aerial
  misc_feature: MA Experiment ID: 20000111 Result: Up-regulated in Transcription
  misc_feature: MA Experiment 20000111 PARAMETER Experiment Name: At_42deg_Heat_cDNA_P Parameter: Temperature (deg C) Value: 42 vs. 22
  misc_feature: MA Experiment 20000111 PARAMETER Experiment Name: At_42deg_Heat_cDNA_P Parameter: Timepoint (hr) Value: 6
  misc_feature: MA Experiment 20000111 PARAMETER Experiment Name: At_42deg_Heat_cDNA_P Parameter: Tissue Value: Aerial
  misc_feature: MA Experiment ID: 20000112 Result: Up-regulated in Transcription
  misc_feature: MA Experiment 20000112 PARAMETER Experiment Name: At_42deg_Heat_cDNA_P Parameter: Temperature (deg C) Value: 42 vs. 22
  misc_feature: MA Experiment 20000112 PARAMETER Experiment Name: At_42deg_Heat_cDNA_P Parameter: Timepoint (hr) Value: 2
  misc_feature: MA Experiment 20000112 PARAMETER Experiment Name: At_42deg_Heat_cDNA_P Parameter: Tissue Value: Aerial
  misc_feature: MA Experiment ID: 20000113 Result: Up-regulated in Transcription
  misc_feature: MA Experiment 20000113 PARAMETER Experiment Name: At_42deg_Heat_cDNA_P Parameter: Temperature (deg C) Value: 42 vs. 22
  misc_feature: MA Experiment 20000113 PARAMETER Experiment Name: At_42deg_Heat_cDNA_P Parameter: Timepoint (hr) Value: 8
  misc_feature: MA Experiment 20000113 PARAMETER Experiment Name: At_42deg_Heat_cDNA_P Parameter: Tissue Value: Aerial
  misc_feature: MA Experiment ID: 20000144 Result: Up-regulated in Transcription
  misc_feature: MA Experiment 20000144 PARAMETER Experiment Name: At_42deg_Heat_cDNA_P Parameter: Temperature (deg C) Value: 42 vs. 22
  misc_feature: MA Experiment 20000144 PARAMETER Experiment Name: At_42deg_Heat_cDNA_P Parameter: Timepoint (hr) Value: 1
  misc_feature: MA Experiment 20000144 PARAMETER Experiment Name: At_42deg_Heat_cDNA_P Parameter: Tissue Value: Aerial
  misc_feature: MA Experiment ID: 20000171 Result: Up-regulated in Transcription
  misc_feature: MA Experiment 20000171 PARAMETER Experiment Name: At_42deg_Heat_P Parameter: Age (day) Value: 14
  misc_feature: MA Experiment 20000171 PARAMETER Experiment Name: At_42deg_Heat_P Parameter: Organism Value: A. thaliana
  misc_feature: MA Experiment 20000171 PARAMETER Experiment Name: At_42deg_Heat_P Parameter: Plant Line Value: WS
  misc_feature: MA Experiment 20000171 PARAMETER Experiment Name: At_42deg_Heat_P Parameter: Temperature (deg C) Value: 42 vs. 22
  misc_feature: MA Experiment 20000171 PARAMETER Experiment Name: At_42deg_Heat_P Parameter: Timepoint (hr) Value: 1
  misc_feature: MA Experiment 20000171 PARAMETER Experiment Name: At_42deg_Heat_P Parameter: Tissue Value: Aerial
  misc_feature: MA Experiment ID: 20000173 Result: Up-regulated in Transcription
  misc_feature: MA Experiment 20000173 PARAMETER Experiment Name: At_42deg_Heat_P Parameter: Age (day) Value: 14
  misc_feature: MA Experiment 20000173 PARAMETER Experiment Name: At_42deg_Heat_P Parameter: Organism Value: A. thaliana
  misc_feature: MA Experiment 20000173 PARAMETER Experiment Name: At_42deg_Heat_P Parameter: Plant Line Value: WS
  misc_feature: MA Experiment 20000173 PARAMETER Experiment Name: At_42deg_Heat_P Parameter: Temperature (deg C) Value: 42 vs. 22
  misc_feature: MA Experiment 20000173 PARAMETER Experiment Name: At_42deg_Heat_P Parameter: Timepoint (hr) Value: 6
  misc_feature: MA Experiment 20000173 PARAMETER Experiment Name: At_42deg_Heat_P Parameter: Tissue Value: Aerial
  misc_feature: MA Experiment ID: 20000179 Result: Up-regulated in Transcription
  misc_feature: MA Experiment 20000179 PARAMETER Experiment Name: At_Germinating_Seeds_P Parameter: Age (hr) Value: 6 vs. 0
  misc_feature: MA Experiment 20000179 PARAMETER Experiment Name: At_Germinating_Seeds_P Parameter: Tissue Value: Germinating Seeds
  misc_feature: MA Experiment ID: 20000180 Result: Up-regulated in Transcription
  misc_feature: MA Experiment 20000180 PARAMETER Experiment Name: At_Germinating_Seeds_P Parameter: Age (hr) Value: 24 vs. 0
  misc_feature: MA Experiment 20000180 PARAMETER Experiment Name: At_Germinating_Seeds_P Parameter: Tissue Value: Germinating Seeds
  misc_feature: MA Experiment ID: 20000184 Result: Up-regulated in Transcription
  misc_feature: MA Experiment 20000184 PARAMETER Experiment Name: At_Shoots__P Parameter: Age (day) Value: 7
  misc_feature: MA Experiment 20000184 PARAMETER Experiment Name: At_Shoots__P Parameter: Tissue Value: Shoots vs. Whole Plant
  misc_feature: MA Experiment ID: 20000224 Result: Down-regulated in Transcription
  misc_feature: MA Experiment ID: 20000267 Result: Down-regulated in Transcription
  misc_feature: MA Experiment 20000267 PARAMETER Experiment Name: At_Drought_P Parameter: Age (day) Value: 7
  misc_feature: MA Experiment 20000267 PARAMETER Experiment Name: At_Drought_P Parameter: Organism Value: A. thaliana
  misc_feature: MA Experiment 20000267 PARAMETER Experiment Name: At_Drought_P Parameter: Plant Line Value: WS
  misc_feature: MA Experiment 20000267 PARAMETER Experiment Name: At_Drought_P Parameter: Timepoint (hr) Value: 6
  misc_feature: MA Experiment 20000267 PARAMETER Experiment Name: At_Drought_P Parameter: Tissue Value: Whole Plant
  misc_feature: MA Experiment 20000267 PARAMETER Experiment Name: At_Drought_P Parameter: Treatment Value: Drought vs. No Drought
  misc_feature: MA Experiment ID: 20000268 Result: Down-regulated in Transcription
  misc_feature: MA Experiment 20000268 PARAMETER Experiment Name: At_100mM_NaCl__P Parameter: Age (day) Value: 14
  misc_feature: MA Experiment 20000268 PARAMETER Experiment Name: At_100mM_NaCl__P Parameter: Organism Value: A. thaliana
  misc_feature: MA Experiment 20000268 PARAMETER Experiment Name: At_100mM_NaCl__P Parameter: Plant Line Value: WS
  misc_feature: MA Experiment 20000268 PARAMETER Experiment Name: At_100mM_NaCl__P Parameter: Timepoint (hr) Value: 6
  misc_feature: MA Experiment 20000268 PARAMETER Experiment Name: At_100mM_NaCl__P Parameter: Tissue Value: Whole Plant
  misc_feature: MA Experiment 20000268 PARAMETER Experiment Name: At_100mM_NaCl__P Parameter: Treatment Value: 100mM NaCl vs. No Treatment
  misc_feature: MA Experiment ID: 20000436 Result: Down-regulated in Transcription
  misc_feature: MA Experiment 20000436 PARAMETER Experiment Name: At_Drought_P Parameter: Age (day) Value: 7
  misc_feature: MA Experiment 20000436 PARAMETER Experiment Name: At_Drought_P Parameter: Organism Value: A. thaliana
  misc_feature: MA Experiment 20000436 PARAMETER Experiment Name: At_Drought_P Parameter: Plant Line Value: WS
  misc_feature: MA Experiment 20000436 PARAMETER Experiment Name: At_Drought_P Parameter: Timepoint (hr) Value: 12
  misc_feature: MA Experiment 20000436 PARAMETER Experiment Name: At_Drought_P Parameter: Tissue Value: Whole Plant
  misc_feature: MA Experiment 20000436 PARAMETER Experiment Name: At_Drought_P Parameter: Treatment Value: Drought vs. No Drought
  misc_feature: MA Experiment ID: 20000437 Result: Down-regulated in Transcription
  misc_feature: MA Experiment 20000437 PARAMETER Experiment Name: At_Drought_P Parameter: Age (day) Value: 8
  misc_feature: MA Experiment 20000437 PARAMETER Experiment Name: At_Drought_P Parameter: Organism Value: A. thaliana
  misc_feature: MA Experiment 20000437 PARAMETER Experiment Name: At_Drought_P Parameter: Plant Line Value: WS
  misc_feature: MA Experiment 20000437 PARAMETER Experiment Name: At_Drought_P Parameter: Timepoint (hr) Value: 24
  misc_feature: MA Experiment 20000437 PARAMETER Experiment Name: At_Drought_P Parameter: Tissue Value: Whole Plant
  misc_feature: MA Experiment 20000437 PARAMETER Experiment Name: At_Drought_P Parameter: Treatment Value: Drought vs. No Drought
  misc_feature: MA Experiment ID: 20000441 Result: Up-regulated in Transcription
  misc_feature: MA Experiment 20000441 PARAMETER Experiment Name: At_1uM_BR-BRZ__P Parameter: Tissue Value: Shoot Apices
  misc_feature: MA Experiment 20000441 PARAMETER Experiment Name: At_1uM_BR-BRZ__P Parameter: Treatment Value: 1uM BR vs. No Treatment
  misc_feature: MA Experiment ID: 20000443 Result: Up-regulated in Transcription
  misc_feature: MA Experiment 20000443 PARAMETER Experiment Name: At_1uM_BR-BRZ__P Parameter: Tissue Value: Shoot Apices
  misc_feature: MA Experiment 20000443 PARAMETER Experiment Name: At_1uM_BR-BRZ__P Parameter: Treatment Value: 1uM BRZ vs. No Treatment
  misc_feature: MA Experiment ID: 20000453 Result: Up-regulated in Transcription
  misc_feature: MA Experiment 20000453 PARAMETER Experiment Name: At_100uM_ABA_P Parameter: Age (day) Value: 15
  misc_feature: MA Experiment 20000453 PARAMETER Experiment Name: At_100uM_ABA_P Parameter: Organism Value: A. thaliana
  misc_feature: MA Experiment 20000453 PARAMETER Experiment Name: At_100uM_ABA_P Parameter: Plant Line Value: WS
  misc_feature: MA Experiment 20000453 PARAMETER Experiment Name: At_100uM_ABA_P Parameter: Timepoint (hr) Value: 24
  misc_feature: MA Experiment 20000453 PARAMETER Experiment Name: At_100uM_ABA_P Parameter: Tissue Value: Aerial
  misc_feature: MA Experiment 20000453 PARAMETER Experiment Name: At_100uM_ABA_P Parameter: Treatment Value: 100uM ABA vs. No Treatment
  misc_feature: MA Experiment ID: 20000456 Result: Down-regulated in Transcription
  misc_feature: MA Experiment 20000456 PARAMETER Experiment Name: At_100uM_BA_P Parameter: Age (day) Value: 14
  misc_feature: MA Experiment 20000456 PARAMETER Experiment Name: At_100uM_BA_P Parameter: Organism Value: A. thaliana
  misc_feature: MA Experiment 20000456 PARAMETER Experiment Name: At_100uM_BA_P Parameter: Plant Line Value: WS
  misc_feature: MA Experiment 20000456 PARAMETER Experiment Name: At_100uM_BA_P Parameter: Timepoint (hr) Value: 6
  misc_feature: MA Experiment 20000456 PARAMETER Experiment Name: At_100uM_BA_P Parameter: Tissue Value: Aerial
  misc_feature: MA Experiment 20000456 PARAMETER Experiment Name: At_100uM_BA_P Parameter: Treatment Value: 100uM BA vs. No Treatment
  misc_feature: MA Experiment ID: 20000573 Result: Up-regulated in Transcription
  misc_feature: MA Experiment 20000573 PARAMETER Experiment Name: At_100uM_ABA_Mutants__P Parameter: Organism Value: A. thaliana
  misc_feature: MA Experiment 20000573 PARAMETER Experiment Name: At_100uM_ABA_Mutants__P Parameter: Plant Line Value: CS22 vs. Ler wt
  misc_feature: MA Experiment 20000573 PARAMETER Experiment Name: At_100uM_ABA_Mutants__P Parameter: Timepoint (hr) Value: N/A
  misc_feature: MA Experiment 20000573 PARAMETER Experiment Name: At_100uM_ABA_Mutants__P Parameter: Tissue Value: Whole Plant
  misc_feature: MA Experiment 20000573 PARAMETER Experiment Name: At_100uM_ABA_Mutants__P Parameter: Treatment Value: None
  misc_feature: MA Experiment ID: 20000574 Result: Up-regulated in Transcription
  misc_feature: MA Experiment 20000574 PARAMETER Experiment Name: At_100uM_ABA_Mutants__P Parameter: Organism Value: A. thaliana
  misc_feature: MA Experiment 20000574 PARAMETER Experiment Name: At_100uM_ABA_Mutants__P Parameter: Plant Line Value: CS23 vs. Ler wt
  misc_feature: MA Experiment 20000574 PARAMETER Experiment Name: At_100uM_ABA_Mutants__P Parameter: Timepoint (hr) Value: N/A
  misc_feature: MA Experiment 20000574 PARAMETER Experiment Name: At_100uM_ABA_Mutants__P Parameter: Tissue Value: Whole Plant
  misc_feature: MA Experiment 20000574 PARAMETER Experiment Name: At_100uM_ABA_Mutants__P Parameter: Treatment Value: None
  misc_feature: MA Experiment ID: 20000709 Result: Up-regulated in Transcription
  misc_feature: MA Experiment 20000709 PARAMETER Experiment Name: At_15mM_NH4NO3_L-to-H_P Parameter: Age (hr) Value: 14
  misc_feature: MA Experiment 20000709 PARAMETER Experiment Name: At_15mM_NH4NO3_L-to-H_P Parameter: Organism Value: A. thaliana
  misc_feature: MA Experiment 20000709 PARAMETER Experiment Name: At_15mM_NH4NO3_L-to-H_P Parameter: Plant Line Value: WS
  misc_feature: MA Experiment 20000709 PARAMETER Experiment Name: At_15mM_NH4NO3_L-to-H_P Parameter: Timepoint (hr) Value: 4
  misc_feature: MA Experiment 20000709 PARAMETER Experiment Name: At_15mM_NH4NO3_L-to-H_P Parameter: Tissue Value: Aerial
  misc_feature: MA Experiment 20000709 PARAMETER Experiment Name: At_15mM_NH4NO3_L-to-H_P Parameter: Treatment Value: 15mM NH4NO3 vs. 30mM Mannitol
  misc_feature: MA Experiment ID: 20001450 Result: Up-regulated in Transcription
  misc_feature: MA Experiment 20001450 PARAMETER Experiment Name: At_Far-red-induction_P Parameter: Age (day) Value: 7
  misc_feature: MA Experiment 20001450 PARAMETER Experiment Name: At_Far-red-induction_P Parameter: Light Value: Far-red vs. White
  misc_feature: MA Experiment 20001450 PARAMETER Experiment Name: At_Far-red-induction_P Parameter: Organism Value: A. thaliana
  misc_feature: MA Experiment 20001450 PARAMETER Experiment Name: At_Far-red-induction_P Parameter: Plant Line Value: Columbia
  misc_feature: MA Experiment 20001450 PARAMETER Experiment Name: At_Far-red-induction_P Parameter: Timepoint (hr) Value: 8
  misc_feature: MA Experiment 20001450 PARAMETER Experiment Name: At_Far-red-induction_P Parameter: Tissue Value: Whole Plant
  misc_feature: MA Experiment ID: 20001451 Result: Up-regulated in Transcription
  misc_feature: MA Experiment 20001451 PARAMETER Experiment Name: At_Far-red-induction_P Parameter: Age (day) Value: 7
  misc_feature: MA Experiment 20001451 PARAMETER Experiment Name: At_Far-red-induction_P Parameter: Light Value: Far-red vs. White
  misc_feature: MA Experiment 20001451 PARAMETER Experiment Name: At_Far-red-induction_P Parameter: Organism Value: A. thaliana
  misc_feature: MA Experiment 20001451 PARAMETER Experiment Name: At_Far-red-induction_P Parameter: Plant Line Value: Columbia
  misc_feature: MA Experiment 20001451 PARAMETER Experiment Name: At_Far-red-induction_P Parameter: Timepoint (hr) Value: 24
  misc_feature: MA Experiment 20001451 PARAMETER Experiment Name: At_Far-red-induction_P Parameter: Tissue Value: Whole Plant
  misc_feature: MA Experiment ID: 20001553 Result: Down-regulated in Transcription
  misc_feature: MA Experiment 20001553 PARAMETER Experiment Name: At_Drought_Soil_Dry_P Parameter: Age (day) Value: 19
  misc_feature: MA Experiment 20001553 PARAMETER Experiment Name: At_Drought_Soil_Dry_P Parameter: Organism Value: A. thaliana
  misc_feature: MA Experiment 20001553 PARAMETER Experiment Name: At_Drought_Soil_Dry_P Parameter: Plant Line Value: WS
  misc_feature: MA Experiment 20001553 PARAMETER Experiment Name: At_Drought_Soil_Dry_P Parameter: Post Timepoint (hr) Value: None
  misc_feature: MA Experiment 20001553 PARAMETER Experiment Name: At_Drought_Soil_Dry_P Parameter: Post-Treatment Value: None
  misc_feature: MA Experiment 20001553 PARAMETER Experiment Name: At_Drought_Soil_Dry_P Parameter: Timepoint (day) Value: 5
  misc_feature: MA Experiment 20001553 PARAMETER Experiment Name: At_Drought_Soil_Dry_P Parameter: Treatment Value: Drought vs. No Drought
  misc_feature: MA Experiment ID: 20001554 Result: Down-regulated in Transcription
  misc_feature: MA Experiment 20001554 PARAMETER Experiment Name: At_Drought_Soil_Dry_P Parameter: Age (day) Value: 21
  misc_feature: MA Experiment 20001554 PARAMETER Experiment Name: At_Drought_Soil_Dry_P Parameter: Organism Value: A. thaliana
  misc_feature: MA Experiment 20001554 PARAMETER Experiment Name: At_Drought_Soil_Dry_P Parameter: Plant Line Value: WS
  misc_feature: MA Experiment 20001554 PARAMETER Experiment Name: At_Drought_Soil_Dry_P Parameter: Post Timepoint (hr) Value: None
  misc_feature: MA Experiment 20001554 PARAMETER Experiment Name: At_Drought_Soil_Dry_P Parameter: Post-Treatment Value: None
  misc_feature: MA Experiment 20001554 PARAMETER Experiment Name: At_Drought_Soil_Dry_P Parameter: Timepoint (day) Value: 7
  misc_feature: MA Experiment 20001554 PARAMETER Experiment Name: At_Drought_Soil_Dry_P Parameter: Treatment Value: Drought vs. No Drought
  misc_feature: MA Experiment ID: 20001555 Result: Down-regulated in Transcription
  misc_feature: MA Experiment 20001555 PARAMETER Experiment Name: At_Drought_Soil_Dry_P Parameter: Age (day) Value: 24
  misc_feature: MA Experiment 20001555 PARAMETER Experiment Name: At_Drought_Soil_Dry_P Parameter: Organism Value: A. thaliana
  misc_feature: MA Experiment 20001555 PARAMETER Experiment Name: At_Drought_Soil_Dry_P Parameter: Plant Line Value: WS
  misc_feature: MA Experiment 20001555 PARAMETER Experiment Name: At_Drought_Soil_Dry_P Parameter: Post Timepoint (hr) Value: None
  misc_feature: MA Experiment 20001555 PARAMETER Experiment Name: At_Drought_Soil_Dry_P Parameter: Post-Treatment Value: None
  misc_feature: MA Experiment 20001555 PARAMETER Experiment Name: At_Drought_Soil_Dry_P Parameter: Timepoint (day) Value: 10
  misc_feature: MA Experiment 20001555 PARAMETER Experiment Name: At_Drought_Soil_Dry_P Parameter: Treatment Value: Drought vs. No Drought
  misc_feature: MA Experiment ID: 20001556 Result: Down-regulated in Transcription
  misc_feature: MA Experiment 20001556 PARAMETER Experiment Name: At_Drought_Soil_Dry_P Parameter: Age (day) Value: 26
  misc_feature: MA Experiment 20001556 PARAMETER Experiment Name: At_Drought_Soil_Dry_P Parameter: Organism Value: A. thaliana
  misc_feature: MA Experiment 20001556 PARAMETER Experiment Name: At_Drought_Soil_Dry_P Parameter: Plant Line Value: WS
  misc_feature: MA Experiment 20001556 PARAMETER Experiment Name: At_Drought_Soil_Dry_P Parameter: Post Timepoint (hr) Value: None
  misc_feature: MA Experiment 20001556 PARAMETER Experiment Name: At_Drought_Soil_Dry_P Parameter: Post-Treatment Value: None
  misc_feature: MA Experiment 20001556 PARAMETER Experiment Name: At_Drought_Soil_Dry_P Parameter: Timepoint (day) Value: 12
  misc_feature: MA Experiment 20001556 PARAMETER Experiment Name: At_Drought_Soil_Dry_P Parameter: Treatment Value: Drought vs. No Drought
  misc_feature: MA Experiment ID: 20001557 Result: Down-regulated in Transcription
  misc_feature: MA Experiment 20001557 PARAMETER Experiment Name: At_Drought_Soil_Dry_P Parameter: Age (day) Value: 27
  misc_feature: MA Experiment 20001557 PARAMETER Experiment Name: At_Drought_Soil_Dry_P Parameter: Organism Value: A. thaliana
  misc_feature: MA Experiment 20001557 PARAMETER Experiment Name: At_Drought_Soil_Dry_P Parameter: Plant Line Value: WS
  misc_feature: MA Experiment 20001557 PARAMETER Experiment Name: At_Drought_Soil_Dry_P Parameter: Post Timepoint (hr) Value: 3
  misc_feature: MA Experiment 20001557 PARAMETER Experiment Name: At_Drought_Soil_Dry_P Parameter: Post-Treatment Value: Re-Water vs. No Drought
  misc_feature: MA Experiment 20001557 PARAMETER Experiment Name: At_Drought_Soil_Dry_P Parameter: Timepoint (day) Value: 13
  misc_feature: MA Experiment 20001557 PARAMETER Experiment Name: At_Drought_Soil_Dry_P Parameter: Treatment Value: Drought vs. No Drought
  misc_feature: MA Experiment ID: 20001558 Result: Up-regulated in Transcription
  misc_feature: MA Experiment 20001558 PARAMETER Experiment Name: At_Drought_Soil_Dry_P Parameter: Age (day) Value: 27
  misc_feature: MA Experiment 20001558 PARAMETER Experiment Name: At_Drought_Soil_Dry_P Parameter: Organism Value: A. thaliana
  misc_feature: MA Experiment 20001558 PARAMETER Experiment Name: At_Drought_Soil_Dry_P Parameter: Plant Line Value: WS
  misc_feature: MA Experiment 20001558 PARAMETER Experiment Name: At_Drought_Soil_Dry_P Parameter: Post Timepoint (hr) Value: 6
  misc_feature: MA Experiment 20001558 PARAMETER Experiment Name: At_Drought_Soil_Dry_P Parameter: Post-Treatment Value: Re-Water vs. No Drought
  misc_feature: MA Experiment 20001558 PARAMETER Experiment Name: At_Drought_Soil_Dry_P Parameter: Timepoint (day) Value: 13
  misc_feature: MA Experiment 20001558 PARAMETER Experiment Name: At_Drought_Soil_Dry_P Parameter: Treatment Value: Drought vs. No Drought
  misc_feature: MA Experiment ID: 20001559 Result: Down-regulated in Transcription
  misc_feature: MA Experiment 20001559 PARAMETER Experiment Name: At_Drought_Soil_Dry_P Parameter: Age (day) Value: 28
  misc_feature: MA Experiment 20001559 PARAMETER Experiment Name: At_Drought_Soil_Dry_P Parameter: Organism Value: A. thaliana
  misc_feature: MA Experiment 20001559 PARAMETER Experiment Name: At_Drought_Soil_Dry_P Parameter: Plant Line Value: WS
  misc_feature: MA Experiment 20001559 PARAMETER Experiment Name: At_Drought_Soil_Dry_P Parameter: Post Timepoint (hr) Value: 29
  misc_feature: MA Experiment 20001559 PARAMETER Experiment Name: At_Drought_Soil_Dry_P Parameter: Post-Treatment Value: Re-Water vs. No Drought
  misc_feature: MA Experiment 20001559 PARAMETER Experiment Name: At_Drought_Soil_Dry_P Parameter: Timepoint (day) Value: 14
  misc_feature: MA Experiment 20001559 PARAMETER Experiment Name: At_Drought_Soil_Dry_P Parameter: Treatment Value: Drought vs. No Drought
  misc_feature: MA Experiment ID: 20001560 Result: Up-regulated in Transcription
  misc_feature: MA Experiment 20001560 PARAMETER Experiment Name: At_Drought_Soil_Dry_P Parameter: Age (day) Value: 28
  misc_feature: MA Experiment 20001560 PARAMETER Experiment Name: At_Drought_Soil_Dry_P Parameter: Organism Value: A. thaliana
  misc_feature: MA Experiment 20001560 PARAMETER Experiment Name: At_Drought_Soil_Dry_P Parameter: Plant Line Value: WS
  misc_feature: MA Experiment 20001560 PARAMETER Experiment Name: At_Drought_Soil_Dry_P Parameter: Post Timepoint (hr) Value: None
  misc_feature: MA Experiment 20001560 PARAMETER Experiment Name: At_Drought_Soil_Dry_P Parameter: Post-Treatment Value: None
  misc_feature: MA Experiment 20001560 PARAMETER Experiment Name: At_Drought_Soil_Dry_P Parameter: Timepoint (day) Value: 14
  misc_feature: MA Experiment 20001560 PARAMETER Experiment Name: At_Drought_Soil_Dry_P Parameter: Treatment Value: Drought vs. No Drought
  misc_feature: MA Experiment ID: 20001757 Result: Up-regulated in Transcription
  misc_feature: MA Experiment 20001757 PARAMETER Experiment Name: At_50mM_NH4NO3_L-to-H_P Parameter: Timepoint (hr) Value: 6
  misc_feature: MA Experiment 20001757 PARAMETER Experiment Name: At_50mM_NH4NO3_L-to-H_P Parameter: Tissue Value: Leaf
  misc_feature: MA Experiment 20001757 PARAMETER Experiment Name: At_50mM_NH4NO3_L-to-H_P Parameter: Treatment Value: 50mM NH4NO3 vs 100mM Mannitol
  misc_feature: MA Experiment ID: 20001772 Result: Up-regulated in Transcription
  misc_feature: MA Experiment 20001772 PARAMETER Experiment Name: At_Far-red-enriched-adult_P Parameter: Age (day) Value: 29
  misc_feature: MA Experiment 20001772 PARAMETER Experiment Name: At_Far-red-enriched-adult_P Parameter: Light Value: Far-red enriched vs. White
  misc_feature: MA Experiment 20001772 PARAMETER Experiment Name: At_Far-red-enriched-adult_P Parameter: Organism Value: A. thaliana
  misc_feature: MA Experiment 20001772 PARAMETER Experiment Name: At_Far-red-enriched-adult_P Parameter: Plant Line Value: Columbia
  misc_feature: MA Experiment 20001772 PARAMETER Experiment Name: At_Far-red-enriched-adult_P Parameter: Timepoint (hr) Value: 24
  misc_feature: MA Experiment 20001772 PARAMETER Experiment Name: At_Far-red-enriched-adult_P Parameter: Tissue Value: Aerial
  misc_feature: MA Experiment ID: 20001774 Result: Up-regulated in Transcription
  misc_feature: MA Experiment 20001774 PARAMETER Experiment Name: At_Far-red-enriched-adult_P Parameter: Age (day) Value: 31
  misc_feature: MA Experiment 20001774 PARAMETER Experiment Name: At_Far-red-enriched-adult_P Parameter: Light Value: Far-red enriched vs. White
  misc_feature: MA Experiment 20001774 PARAMETER Experiment Name: At_Far-red-enriched-adult_P Parameter: Organism Value: A. thaliana
  misc_feature: MA Experiment 20001774 PARAMETER Experiment Name: At_Far-red-enriched-adult_P Parameter: Plant Line Value: Columbia
  misc_feature: MA Experiment 20001774 PARAMETER Experiment Name: At_Far-red-enriched-adult_P Parameter: Timepoint (hr) Value: 72
  misc_feature: MA Experiment 20001774 PARAMETER Experiment Name: At_Far-red-enriched-adult_P Parameter: Tissue Value: Aerial
  misc_feature: MA Experiment ID: 20001904 Result: Down-regulated in Transcription
  misc_feature: MA Experiment 20001904 PARAMETER Experiment Name: At_Drought_Reproduction_P Parameter: Age (day) Value: 37
  misc_feature: MA Experiment 20001904 PARAMETER Experiment Name: At_Drought_Reproduction_P Parameter: Organism Value: A. thaliana
  misc_feature: MA Experiment 20001904 PARAMETER Experiment Name: At_Drought_Reproduction_P Parameter: Plant Line Value: WS
  misc_feature: MA Experiment 20001904 PARAMETER Experiment Name: At_Drought_Reproduction_P Parameter: Timepoint (day) Value: 7
  misc_feature: MA Experiment 20001904 PARAMETER Experiment Name: At_Drought_Reproduction_P Parameter: Tissue Value: Rosettes
  misc_feature: MA Experiment 20001904 PARAMETER Experiment Name: At_Drought_Reproduction_P Parameter: Treatment Value: Drought vs. No Drought
  misc_feature: MA Experiment ID: 20001905 Result: Down-regulated in Transcription
  misc_feature: MA Experiment 20001905 PARAMETER Experiment Name: At_Drought_Reproduction_P Parameter: Age (day) Value: 40
  misc_feature: MA Experiment 20001905 PARAMETER Experiment Name: At_Drought_Reproduction_P Parameter: Organism Value: A. thaliana
  misc_feature: MA Experiment 20001905 PARAMETER Experiment Name: At_Drought_Reproduction_P Parameter: Plant Line Value: WS
  misc_feature: MA Experiment 20001905 PARAMETER Experiment Name: At_Drought_Reproduction_P Parameter: Timepoint (day) Value: 10
  misc_feature: MA Experiment 20001905 PARAMETER Experiment Name: At_Drought_Reproduction_P Parameter: Tissue Value: Rosettes
  misc_feature: MA Experiment 20001905 PARAMETER Experiment Name: At_Drought_Reproduction_P Parameter: Treatment Value: Drought vs. No Drought
acaacaactaaaaccacatttatcattacagtctgatttgagctaagttctctcatcataaactctccttggagaatcatggctatttcaaaagctcttatcgcttctcttctcatatctcttcttgttctccaactcgtccaggctgatgtcgaaaactcacagaagaaaaatggttacgcaaagaagatcgattgtgggagtgcgtgtgtagcacggtgcaggctttcgaggaggccgaggctgtgtcacagagcgtgcgggacttgctgctacaggtgcaactgtgtgcctccgggtacgtacggaaactacgacaagtgccagtgctacgctagcctcaccacccacggtggacgccgcaagtgcccataagaagaaacaaagctcttaattgctgcggataatgggacgatgtcgttttgttagtatttactttggcgtatatatgtggatcgaataataaacgagaacgtacgttgtcgttgtgagtgtgagtactgtattattaatggttctatttgtttttacttgcaagttttcttgttttgaatttgtttttttcatatttgtatatcgattcgtgcattattgtattatttcaatttgtaataagattatgttacctttg

SEQ ID NO: 101955 - protein, 98 aa, Arabidopsis thaliana; identical to SEQ ID NO: 28278
  peptide (1)..(98): Ceres Seq. ID no. 13609149
  misc_feature (3)..(98): Pfam Name: Gibberellin regulated protein Pfam Description: Gibberellin regulated protein
  misc_feature (1)..(98): Homolog of NCBI NO: 18410924 NR Description: GAST1 protein homolog [Arabidopsis thaliana]
  misc_feature (1)..(98): Homolog of NCBI NO: 22530936 NR Description: expressed protein [Arabidopsis thaliana]
  misc_feature (1)..(98): Homolog of NCBI NO: 887939 NR Description: GAST1 protein homolog
  misc_feature (1)..(98): Homolog of NCBI NO: 21618022 NR Description: GAST1-like protein [Arabidopsis thaliana]
  misc_feature (26)..(98): Homolog of NCBI NO: 25313155 NR Description: protein F10A5.6 [imported] - Arabidopsis thaliana
  misc_feature (1)..(25): Homolog of NCBI NO: 25313155 NR Description: protein F10A5.6 [imported] - Arabidopsis thaliana
  misc_feature (1)..(98): Homolog of NCBI NO: 3094012 NR Description: cold-regulated LTCOR12 [Lavatera thuringiaca]
  misc_feature (1)..(98): Homolog of NCBI NO: 2253442 NR Description: LTCOR11 [Lavatera thuringiaca]
  misc_feature (1)..(98): Homolog of NCBI NO: 14625945 NR Description: snakin2 [Solanum tuberosum]
  misc_feature (1)..(98): Homolog of NCBI NO: 14625943 NR Description: snakin2 [Solanum tuberosum]

SEQ ID NO: 101956 - DNA, 1018 bp, Arabidopsis thaliana
  misc_feature (1)..(1018): Ceres Seq. ID no. 13609154
  misc_feature: MA Experiment ID: 108434 Result: Down-regulated in Transcription
  misc_feature: MA Experiment 108434 PARAMETER Experiment Name: At_Root_Tips_cDNA_P Parameter: Tissue Value: Root Tips
  misc_feature: MA Experiment ID: 108462 Result: Up-regulated in Transcription
  misc_feature: MA Experiment 108462 PARAMETER Experiment Name: At_Germinating_Seeds_cDNA_P Parameter: Age (day) Value: 2 vs. 0
  misc_feature: MA Experiment 108462 PARAMETER Experiment Name: At_Germinating_Seeds_cDNA_P Parameter: Tissue Value: Germinating Seeds
  misc_feature: MA Experiment ID: 108464 Result: Up-regulated in Transcription
  misc_feature: MA Experiment 108464 PARAMETER Experiment Name: At_Germinating_Seeds_cDNA_P Parameter: Age (day) Value: 4 vs. 0
  misc_feature: MA Experiment 108464 PARAMETER Experiment Name: At_Germinating_Seeds_cDNA_P Parameter: Tissue Value: Germinating Seeds
  misc_feature: MA Experiment ID: 108488 Result: Down-regulated in Transcription
  misc_feature: MA Experiment ID: 108577 Result: Down-regulated in Transcription
  misc_feature: MA Experiment 108577 PARAMETER Experiment Name: At_42deg_Heat_cDNA_P Parameter: Temperature (deg C) Value: 42 vs. 22
  misc_feature: MA Experiment 108577 PARAMETER Experiment Name: At_42deg_Heat_cDNA_P Parameter: Timepoint (hr) Value: 6
  misc_feature: MA Experiment 108577 PARAMETER Experiment Name: At_42deg_Heat_cDNA_P Parameter: Tissue Value: Aerial
  misc_feature: MA Experiment ID: 108595 Result: Up-regulated in Transcription
  misc_feature: MA Experiment 108595 PARAMETER Experiment Name: At_Ler-pi_Ovule_cDNA_P Parameter: Plant Line Value: null
  misc_feature: MA Experiment ID: 108608 Result: Up-regulated in Transcription
  misc_feature: MA Experiment 108608 PARAMETER Experiment Name: At_100uM_ABA_cDNA_P Parameter: Timepoint (hr) Value: 1
  misc_feature: MA Experiment 108608 PARAMETER Experiment Name: At_100uM_ABA_cDNA_P Parameter: Tissue Value: Aerial
  misc_feature: MA Experiment 108608 PARAMETER Experiment Name: At_100uM_ABA_cDNA_P Parameter: Treatment Value: 100uM ABA vs. No Treatment
  misc_feature: MA Experiment ID: 20000069 Result: Up-regulated in Transcription
  misc_feature: MA Experiment 20000069 PARAMETER Experiment Name: At_100uM_ABA_Mutants_cDNA_P Parameter: Plant Line Value: CS23
  misc_feature: MA Experiment 20000069 PARAMETER Experiment Name: At_100uM_ABA_Mutants_cDNA_P Parameter: Timepoint (hr) Value: 6
  misc_feature: MA Experiment 20000069 PARAMETER Experiment Name: At_100uM_ABA_Mutants_cDNA_P Parameter: Tissue Value: Aerial
  misc_feature: MA Experiment 20000069 PARAMETER Experiment Name: At_100uM_ABA_Mutants_cDNA_P Parameter: Treatment Value: 100uM ABA vs. No Treatment
  misc_feature: MA Experiment ID: 20000070 Result: Up-regulated in Transcription
  misc_feature: MA Experiment 20000070 PARAMETER Experiment Name: At_100uM_ABA_Mutants_cDNA_P Parameter: Plant Line Value: CS24
  misc_feature: MA Experiment 20000070 PARAMETER Experiment Name: At_100uM_ABA_Mutants_cDNA_P Parameter: Timepoint (hr) Value: 6
  misc_feature: MA Experiment 20000070 PARAMETER Experiment Name: At_100uM_ABA_Mutants_cDNA_P Parameter: Tissue Value: Aerial
  misc_feature: MA Experiment 20000070 PARAMETER Experiment Name: At_100uM_ABA_Mutants_cDNA_P Parameter: Treatment Value: 100uM ABA vs. No Treatment
  misc_feature: MA Experiment ID: 20000071 Result: Up-regulated in Transcription
  misc_feature: MA Experiment 20000071 PARAMETER Experiment Name: At_100uM_ABA_Mutants_cDNA_P Parameter: Plant Line Value: CS8104
  misc_feature: MA Experiment 20000071 PARAMETER Experiment Name: At_100uM_ABA_Mutants_cDNA_P Parameter: Timepoint (hr) Value: 6
  misc_feature: MA Experiment 20000071 PARAMETER Experiment Name: At_100uM_ABA_Mutants_cDNA_P Parameter: Tissue Value: Aerial
  misc_feature: MA Experiment 20000071 PARAMETER Experiment Name: At_100uM_ABA_Mutants_cDNA_P Parameter: Treatment Value: 100uM ABA vs. No Treatment
  misc_feature: MA Experiment ID: 20000086 Result: Up-regulated in Transcription
  misc_feature: MA Experiment 20000086 PARAMETER Experiment Name: At_100uM_ABA_Mutants_cDNA_P Parameter: Plant Line Value: CS22
  misc_feature: MA Experiment 20000086 PARAMETER Experiment Name: At_100uM_ABA_Mutants_cDNA_P Parameter: Timepoint (hr) Value: 6
  misc_feature: MA Experiment 20000086 PARAMETER Experiment Name: At_100uM_ABA_Mutants_cDNA_P Parameter: Tissue Value: Aerial
  misc_feature: MA Experiment 20000086 PARAMETER Experiment Name: At_100uM_ABA_Mutants_cDNA_P Parameter: Treatment Value: 100uM ABA vs. No Treatment
  misc_feature: MA Experiment ID: 20000087 Result: Up-regulated in Transcription
  misc_feature: MA Experiment 20000087 PARAMETER Experiment Name: At_100uM_ABA_Mutants_cDNA_P Parameter: Plant Line Value: WS
  misc_feature: MA Experiment 20000087 PARAMETER Experiment Name: At_100uM_ABA_Mutants_cDNA_P Parameter: Timepoint (hr) Value: 6
  misc_feature: MA Experiment 20000087 PARAMETER Experiment Name: At_100uM_ABA_Mutants_cDNA_P Parameter: Tissue Value: Aerial
  misc_feature: MA Experiment 20000087 PARAMETER Experiment Name: At_100uM_ABA_Mutants_cDNA_P Parameter: Treatment Value: 100uM ABA vs. No Treatment
  misc_feature: MA Experiment ID: 20000088 Result: Up-regulated in Transcription
  misc_feature: MA Experiment 20000088 PARAMETER Experiment Name: At_100uM_ABA_Mutants_cDNA_P Parameter: Plant Line Value: Landsberg
  misc_feature: MA Experiment 20000088 PARAMETER Experiment Name: At_100uM_ABA_Mutants_cDNA_P Parameter: Timepoint (hr) Value: 6
  misc_feature: MA Experiment 20000088 PARAMETER Experiment Name: At_100uM_ABA_Mutants_cDNA_P Parameter: Tissue Value: Aerial
  misc_feature: MA Experiment 20000088 PARAMETER Experiment Name: At_100uM_ABA_Mutants_cDNA_P Parameter: Treatment Value: 100uM ABA vs. No Treatment
  misc_feature: MA Experiment ID: 20000117 Result: Up-regulated in Transcription
  misc_feature: MA Experiment 20000117 PARAMETER Experiment Name: At_100uM_ABA_Mutants_cDNA_P Parameter: Plant Line Value: Columbia
  misc_feature: MA Experiment 20000117 PARAMETER Experiment Name: At_100uM_ABA_Mutants_cDNA_P Parameter: Timepoint (hr) Value: 6
  misc_feature: MA Experiment 20000117 PARAMETER Experiment Name: At_100uM_ABA_Mutants_cDNA_P Parameter: Tissue Value: Aerial
  misc_feature: MA Experiment 20000117 PARAMETER Experiment Name: At_100uM_ABA_Mutants_cDNA_P Parameter: Treatment Value: 100uM ABA vs. No Treatment
  misc_feature: MA Experiment ID: 20000166 Result: Up-regulated in Transcription
  misc_feature: MA Experiment 20000166 PARAMETER Experiment Name: At_100uM_ABA_P Parameter: Age (day) Value: 14
  misc_feature: MA Experiment 20000166 PARAMETER Experiment Name: At_100uM_ABA_P Parameter: Organism Value: A. thaliana
  misc_feature: MA Experiment 20000166 PARAMETER Experiment Name: At_100uM_ABA_P Parameter: Plant Line Value: WS
  misc_feature: MA Experiment 20000166 PARAMETER Experiment Name: At_100uM_ABA_P Parameter: Timepoint (hr) Value: 1
  misc_feature: MA Experiment 20000166 PARAMETER Experiment Name: At_100uM_ABA_P Parameter: Tissue Value: Aerial
  misc_feature: MA Experiment 20000166 PARAMETER Experiment Name: At_100uM_ABA_P Parameter: Treatment Value: 100uM ABA vs. No Treatment
  misc_feature: MA Experiment ID: 20000180 Result: Up-regulated in Transcription
  misc_feature: MA Experiment 20000180 PARAMETER Experiment Name: At_Germinating_Seeds_P Parameter: Age (hr) Value: 24 vs. 0
  misc_feature: MA Experiment 20000180 PARAMETER Experiment Name: At_Germinating_Seeds_P Parameter: Tissue Value: Germinating Seeds
  misc_feature: MA Experiment ID: 20000182 Result: Up-regulated in Transcription
  misc_feature: MA Experiment 20000182 PARAMETER Experiment Name: At_2mM_SA_P Parameter: Age (day) Value: 14
  misc_feature: MA Experiment 20000182 PARAMETER Experiment Name: At_2mM_SA_P Parameter: Organism Value: A. thaliana
  misc_feature: MA Experiment 20000182 PARAMETER Experiment Name: At_2mM_SA_P Parameter: Plant Line Value: WS
  misc_feature: MA Experiment 20000182 PARAMETER Experiment Name: At_2mM_SA_P Parameter: Timepoint (hr) Value: 6
  misc_feature: MA Experiment 20000182 PARAMETER Experiment Name: At_2mM_SA_P Parameter: Tissue Value: Aerial
  misc_feature: MA Experiment 20000182 PARAMETER Experiment Name: At_2mM_SA_P Parameter: Treatment Value: 2mM SA vs. No Treatment
  misc_feature: MA Experiment ID: 20000184 Result: Down-regulated in Transcription
  misc_feature: MA Experiment 20000184 PARAMETER Experiment Name: At_Shoots__P Parameter: Age (day) Value: 7
  misc_feature: MA Experiment 20000184 PARAMETER Experiment Name: At_Shoots__P Parameter: Tissue Value: Shoots vs. Whole Plant
  misc_feature: MA Experiment ID: 20000224 Result: Down-regulated in Transcription
  misc_feature: MA Experiment ID: 20000234 Result: Down-regulated in Transcription
  misc_feature: MA Experiment 20000234 PARAMETER Experiment Name: At_Siliques_P Parameter: Age (day) Value: 21
  misc_feature: MA Experiment 20000234 PARAMETER Experiment Name: At_Siliques_P Parameter: Organism Value: A. thaliana
  misc_feature: MA Experiment 20000234 PARAMETER Experiment Name: At_Siliques_P Parameter: Plant Line Value: WS
  misc_feature: MA Experiment 20000234 PARAMETER Experiment Name: At_Siliques_P Parameter: Tissue Value: Less Than 5mm Siliques vs. Whole Plant
  misc_feature: MA Experiment ID: 20000265 Result: Down-regulated in Transcription
  misc_feature: MA Experiment 20000265 PARAMETER Experiment Name: At_Open_Flower_P Parameter: Age (day) Value: 21
  misc_feature: MA Experiment 20000265 PARAMETER Experiment Name: At_Open_Flower_P Parameter: Plant Line Value: WS
  misc_feature: MA Experiment 20000265 PARAMETER Experiment Name: At_Open_Flower_P Parameter: Tissue Value: Closed Flower vs. Whole Plant
  misc_feature: MA Experiment ID: 20000267 Result: Up-regulated in Transcription
  misc_feature: MA Experiment 20000267 PARAMETER Experiment Name: At_Drought_P Parameter: Age (day) Value: 7
  misc_feature: MA Experiment 20000267 PARAMETER Experiment Name: At_Drought_P Parameter: Organism Value: A. thaliana
  misc_feature: MA Experiment 20000267 PARAMETER Experiment Name: At_Drought_P Parameter: Plant Line Value: WS
  misc_feature: MA Experiment 20000267 PARAMETER Experiment Name: At_Drought_P Parameter: Timepoint (hr) Value: 6
  misc_feature: MA Experiment 20000267 PARAMETER Experiment Name: At_Drought_P Parameter: Tissue Value: Whole Plant
  misc_feature: MA Experiment 20000267 PARAMETER Experiment Name: At_Drought_P Parameter: Treatment Value: Drought vs. No Drought
  misc_feature: MA Experiment ID: 20000268 Result: Up-regulated in Transcription
  misc_feature: MA Experiment 20000268 PARAMETER Experiment Name: At_100mM_NaCl__P Parameter: Age (day) Value: 14
  misc_feature: MA Experiment 20000268 PARAMETER Experiment Name: At_100mM_NaCl__P Parameter: Organism Value: A. thaliana
  misc_feature: MA Experiment 20000268 PARAMETER Experiment Name: At_100mM_NaCl__P Parameter: Plant Line Value: WS
  misc_feature: MA Experiment 20000268 PARAMETER Experiment Name: At_100mM_NaCl__P Parameter: Timepoint (hr) Value: 6
  misc_feature: MA Experiment 20000268 PARAMETER Experiment Name: At_100mM_NaCl__P Parameter: Tissue Value: Whole Plant
  misc_feature: MA Experiment 20000268 PARAMETER Experiment Name: At_100mM_NaCl__P Parameter: Treatment Value: 100mM NaCl vs. No Treatment
  misc_feature: MA Experiment ID: 20000286 Result: Down-regulated in Transcription
  misc_feature: MA Experiment 20000286 PARAMETER Experiment Name: At_Open_Flower_P Parameter: Age (day) Value: 21
  misc_feature: MA Experiment 20000286 PARAMETER Experiment Name: At_Open_Flower_P Parameter: Plant Line Value: WS
  misc_feature: MA Experiment 20000286 PARAMETER Experiment Name: At_Open_Flower_P Parameter: Tissue Value: Half Open vs. Whole Plant
  misc_feature: MA Experiment ID: 20000436 Result: Up-regulated in Transcription
  misc_feature: MA Experiment 20000436 PARAMETER Experiment Name: At_Drought_P Parameter: Age (day) Value: 7
  misc_feature: MA Experiment 20000436 PARAMETER Experiment Name: At_Drought_P Parameter: Organism Value: A. thaliana
  misc_feature: MA Experiment 20000436 PARAMETER Experiment Name: At_Drought_P Parameter: Plant Line Value: WS
  misc_feature: MA Experiment 20000436 PARAMETER Experiment Name: At_Drought_P Parameter: Timepoint (hr) Value: 12
  misc_feature: MA Experiment 20000436 PARAMETER Experiment Name: At_Drought_P Parameter: Tissue Value: Whole Plant
  misc_feature: MA Experiment 20000436 PARAMETER Experiment Name: At_Drought_P Parameter: Treatment Value: Drought vs. No Drought
  misc_feature: MA Experiment ID: 20000437 Result: Up-regulated in Transcription
  misc_feature: MA Experiment 20000437 PARAMETER Experiment Name: At_Drought_P Parameter: Age (day) Value: 8
  misc_feature: MA Experiment 20000437 PARAMETER Experiment Name: At_Drought_P Parameter: Organism Value: A. thaliana
  misc_feature: MA Experiment 20000437 PARAMETER Experiment Name: At_Drought_P Parameter: Plant Line Value: WS
  misc_feature: MA Experiment 20000437 PARAMETER Experiment Name: At_Drought_P Parameter: Timepoint (hr) Value: 24
  misc_feature: MA Experiment 20000437 PARAMETER Experiment Name: At_Drought_P Parameter: Tissue Value: Whole Plant
  misc_feature: MA Experiment 20000437 PARAMETER Experiment Name: At_Drought_P Parameter: Treatment Value: Drought vs. No Drought
  misc_feature: MA Experiment ID: 20000438 Result: Down-regulated in Transcription
  misc_feature: MA Experiment 20000438 PARAMETER Experiment Name: At_Shoots__P Parameter: Age (day) Value: 14
  misc_feature: MA Experiment 20000438 PARAMETER Experiment Name: At_Shoots__P Parameter: Tissue Value: Shoots vs. Whole Plant
  misc_feature: MA Experiment ID: 20000439 Result: Down-regulated in Transcription
  misc_feature: MA Experiment 20000439 PARAMETER Experiment Name: At_Roots__P Parameter: Age (day) Value: 14 vs. 21
  misc_feature: MA Experiment 20000439 PARAMETER Experiment Name: At_Roots__P Parameter: Organism Value: A. thaliana
  misc_feature: MA Experiment 20000439 PARAMETER Experiment Name: At_Roots__P Parameter: Tissue Value: Roots vs. Whole Plant
  misc_feature: MA Experiment ID: 20000451 Result: Down-regulated in Transcription
  misc_feature: MA Experiment 20000451 PARAMETER Experiment Name: At_CS6879_Shoots-Roots_P Parameter: Age (day) Value: 14
  misc_feature: MA Experiment 20000451 PARAMETER Experiment Name: At_CS6879_Shoots-Roots_P Parameter: Organism Value: A. thaliana
  misc_feature: MA Experiment 20000451 PARAMETER Experiment Name: At_CS6879_Shoots-Roots_P Parameter: Plant Line Value: CS6879 vs. WS
  misc_feature: MA Experiment 20000451 PARAMETER Experiment Name: At_CS6879_Shoots-Roots_P Parameter: Tissue Value: Roots
  misc_feature: MA Experiment ID: 20000495 Result: Down-regulated in Transcription
  misc_feature: MA Experiment 20000495 PARAMETER Experiment Name: At_Guard_Cells_P Parameter: Harvest Date Value: 8/2/2002
  misc_feature: MA Experiment 20000495 PARAMETER Experiment Name: At_Guard_Cells_P Parameter: Organism Value: A. thaliana
  misc_feature: MA Experiment 20000495 PARAMETER Experiment Name: At_Guard_Cells_P Parameter: Tissue Value: Guard Cells vs. Leaves
  misc_feature: MA Experiment ID: 20001451 Result: Up-regulated in Transcription
  misc_feature: MA Experiment 20001451 PARAMETER Experiment Name: At_Far-red-induction_P Parameter: Age (day) Value: 7
  misc_feature: MA Experiment 20001451 PARAMETER Experiment Name: At_Far-red-induction_P Parameter: Light Value: Far-red vs. White
  misc_feature: MA Experiment 20001451 PARAMETER Experiment Name: At_Far-red-induction_P Parameter: Organism Value: A. thaliana
  misc_feature: MA Experiment 20001451 PARAMETER Experiment Name: At_Far-red-induction_P Parameter: Plant Line Value: Columbia
  misc_feature: MA Experiment 20001451 PARAMETER Experiment Name: At_Far-red-induction_P Parameter: Timepoint (hr) Value: 24
  misc_feature: MA Experiment 20001451 PARAMETER Experiment Name: At_Far-red-induction_P Parameter: Tissue Value: Whole Plant
  misc_feature: MA Experiment ID: 20001556 Result: Down-regulated in Transcription
  misc_feature: MA Experiment 20001556 PARAMETER Experiment Name: At_Drought_Soil_Dry_P Parameter: Age (day) Value: 26
  misc_feature: MA Experiment 20001556 PARAMETER Experiment Name: At_Drought_Soil_Dry_P Parameter: Organism Value: A. thaliana
  misc_feature: MA Experiment 20001556 PARAMETER Experiment Name: At_Drought_Soil_Dry_P Parameter: Plant Line Value: WS
  misc_feature: MA Experiment 20001556 PARAMETER Experiment Name: At_Drought_Soil_Dry_P Parameter: Post Timepoint (hr) Value: None
  misc_feature: MA Experiment 20001556 PARAMETER Experiment Name: At_Drought_Soil_Dry_P Parameter: Post-Treatment Value: None
  misc_feature: MA Experiment 20001556 PARAMETER Experiment Name: At_Drought_Soil_Dry_P Parameter: Timepoint (day) Value: 12
  misc_feature: MA Experiment 20001556 PARAMETER Experiment Name: At_Drought_Soil_Dry_P Parameter: Treatment Value: Drought vs. No Drought
  misc_feature: MA Experiment ID: 20001557 Result: Down-regulated in Transcription
  misc_feature: MA Experiment 20001557 PARAMETER Experiment Name: At_Drought_Soil_Dry_P Parameter: Age (day) Value: 27
  misc_feature: MA Experiment 20001557 PARAMETER Experiment Name: At_Drought_Soil_Dry_P Parameter: Organism Value: A. thaliana
  misc_feature: MA Experiment 20001557 PARAMETER Experiment Name: At_Drought_Soil_Dry_P Parameter: Plant Line Value: WS
  misc_feature: MA Experiment 20001557 PARAMETER Experiment Name: At_Drought_Soil_Dry_P Parameter: Post Timepoint (hr) Value: 3
  misc_feature: MA Experiment 20001557 PARAMETER Experiment Name: At_Drought_Soil_Dry_P Parameter: Post-Treatment Value: Re-Water vs. No Drought
  misc_feature: MA Experiment 20001557 PARAMETER Experiment Name: At_Drought_Soil_Dry_P Parameter: Timepoint (day) Value: 13
  misc_feature: MA Experiment 20001557 PARAMETER Experiment Name: At_Drought_Soil_Dry_P Parameter: Treatment Value: Drought vs. No Drought
  misc_feature: MA Experiment ID: 20001558 Result: Down-regulated in Transcription
  misc_feature: MA Experiment 20001558 PARAMETER Experiment Name: At_Drought_Soil_Dry_P Parameter: Age (day) Value: 27
  misc_feature: MA Experiment 20001558 PARAMETER Experiment Name: At_Drought_Soil_Dry_P Parameter: Organism Value: A. thaliana
  misc_feature: MA Experiment 20001558 PARAMETER Experiment Name: At_Drought_Soil_Dry_P Parameter: Plant Line Value: WS
  misc_feature: MA Experiment 20001558 PARAMETER Experiment Name: At_Drought_Soil_Dry_P Parameter: Post Timepoint (hr) Value: 6
  misc_feature: MA Experiment 20001558 PARAMETER Experiment Name: At_Drought_Soil_Dry_P Parameter: Post-Treatment Value: Re-Water vs. No Drought
  misc_feature: MA Experiment 20001558 PARAMETER Experiment Name: At_Drought_Soil_Dry_P Parameter: Timepoint (day) Value: 13
  misc_feature: MA Experiment 20001558 PARAMETER Experiment Name: At_Drought_Soil_Dry_P Parameter: Treatment Value: Drought vs. No Drought
  misc_feature: MA Experiment ID: 20001560 Result: Down-regulated in Transcription
  misc_feature: MA Experiment 20001560 PARAMETER Experiment Name: At_Drought_Soil_Dry_P Parameter: Age (day) Value: 28
  misc_feature: MA Experiment 20001560 PARAMETER Experiment Name: At_Drought_Soil_Dry_P Parameter: Organism Value: A. thaliana
  misc_feature: MA Experiment 20001560 PARAMETER Experiment Name: At_Drought_Soil_Dry_P Parameter: Plant Line Value: WS
  misc_feature: MA Experiment 20001560 PARAMETER Experiment Name: At_Drought_Soil_Dry_P Parameter: Post Timepoint (hr) Value: None
  misc_feature: MA Experiment 20001560 PARAMETER Experiment Name: At_Drought_Soil_Dry_P Parameter: Post-Treatment Value: None
  misc_feature: MA Experiment 20001560 PARAMETER Experiment Name: At_Drought_Soil_Dry_P Parameter: Timepoint (day) Value: 14
  misc_feature: MA Experiment 20001560 PARAMETER Experiment Name: At_Drought_Soil_Dry_P Parameter: Treatment Value: Drought vs. No Drought
ataattagatatatgtttttaaattgcaaaaaaaaagtgtacaaagagcgtgaaatccgcggtggcttggacccctcccgagtcctcaacactatataacacactttcttctctaatctccatcacctcttattttcatctgcttttgaatttcaaaccttcacataaaaaaaatacttttgaatccgtgtttcattcatcgaatctttttccgataactatggctgaggaaatcaagaatgttcctgaacaggaggtgccaaaggtagcaacagaggaatcatcggcagaggttacagatcgtggattgttcgatttcttgggaaagaagaaagacgaaacaaaaccagaggagactccgatcgcttcagagtttgagcagaaggttcatatttcagagccggagccagaggttaaacacgaaagtcttcttgaaaagcttcaccgaagcgacagttcttctagctcctcaagtgaggaagaaggttcagatggtgagaagaggaagaagaagaaggagaagaagaagccaactactgaagttgaggtaaaggaggaagagaagaaagggtttatggagaagttgaaagagaagcttcctggacacaagaaacctgaagacggttcagccgtcgctgcggcaccggtggttgttcctcctcctgtggaagaagcgcatccagtggagaagaaagggattcttgagaagattaaggagaagcttccaggataccaccctaagaccaccgtagaggaggagaagaaagataaagaataagaagattatcattaaagatattaagaataatgatggttgatttgctttgtttttttttttttttattgtgatgattgatcatcttttgcttttgtgatgtgtaagtttgttggcttttttgttgattacaatttcttattttctcttgtatatggtttttaaaaacaaaagatctcaaggtattttaatggtatgaatattttcatttgattaagtgatatggatgatataattttatgt

SEQ ID NO: 101957 - protein, 185 aa, Arabidopsis thaliana [sequence omitted]

SEQ ID NO: 101958 - DNA, 1466 bp, Arabidopsis thaliana
  misc_feature (1)..(1466): Ceres Seq. ID no. 13609160
  misc_feature: MA Experiment ID: 108434 Result: Down-regulated in Transcription
  misc_feature: MA Experiment 108434 PARAMETER Experiment Name: At_Root_Tips_cDNA_P Parameter: Tissue Value: Root Tips
  misc_feature: MA Experiment ID: 108463 Result: Up-regulated in Transcription
  misc_feature: MA Experiment 108463 PARAMETER Experiment Name: At_Germinating_Seeds_cDNA_P Parameter: Age (day) Value: 3 vs. 0
  misc_feature: MA Experiment 108463 PARAMETER Experiment Name: At_Germinating_Seeds_cDNA_P Parameter: Tissue Value: Germinating Seeds
  misc_feature: MA Experiment ID: 108464 Result: Up-regulated in Transcription
  misc_feature: MA Experiment 108464 PARAMETER Experiment Name: At_Germinating_Seeds_cDNA_P Parameter: Age (day) Value: 4 vs. 0
  misc_feature: MA Experiment 108464 PARAMETER Experiment Name: At_Germinating_Seeds_cDNA_P Parameter: Tissue Value: Germinating Seeds
  misc_feature: MA Experiment ID: 108488 Result: Down-regulated in Transcription
  misc_feature: MA Experiment ID: 108573 Result: Up-regulated in Transcription
  misc_feature: MA Experiment 108573 PARAMETER Experiment Name: At_Drought_cDNA_P Parameter: Timepoint (hr) Value: 6
  misc_feature: MA Experiment 108573 PARAMETER Experiment Name: At_Drought_cDNA_P Parameter: Tissue Value: Aerial
  misc_feature: MA Experiment 108573 PARAMETER Experiment Name: At_Drought_cDNA_P Parameter: Treatment Value: Drought vs. No Drought
  misc_feature: MA Experiment ID: 108577 Result: Up-regulated in Transcription
  misc_feature: MA Experiment 108577 PARAMETER Experiment Name: At_42deg_Heat_cDNA_P Parameter: Temperature (deg C) Value: 42 vs. 22
  misc_feature: MA Experiment 108577 PARAMETER Experiment Name: At_42deg_Heat_cDNA_P Parameter: Timepoint (hr) Value: 6
  misc_feature: MA Experiment 108577 PARAMETER Experiment Name: At_42deg_Heat_cDNA_P Parameter: Tissue Value: Aerial
  misc_feature: MA Experiment ID: 108668 Result: Up-regulated in Transcription
  misc_feature: MA Experiment 108668 PARAMETER Experiment Name: At_2mM_SA_cDNA_P Parameter: Plant Line Value: WS
  misc_feature: MA Experiment 108668 PARAMETER Experiment Name: At_2mM_SA_cDNA_P Parameter: Timepoint (hr) Value: 6
  misc_feature: MA Experiment 108668 PARAMETER Experiment Name: At_2mM_SA_cDNA_P Parameter: Treatment Value: 2mM SA vs. No Treatment
  misc_feature: MA Experiment ID: 20000089 Result: Down-regulated in Transcription
  misc_feature: MA Experiment ID: 20000144 Result: Up-regulated in Transcription
  misc_feature: MA Experiment 20000144 PARAMETER Experiment Name: At_42deg_Heat_cDNA_P Parameter: Temperature (deg C) Value: 42 vs. 22
  misc_feature: MA Experiment 20000144 PARAMETER Experiment Name: At_42deg_Heat_cDNA_P Parameter: Timepoint (hr) Value: 1
  misc_feature: MA Experiment 20000144 PARAMETER Experiment Name: At_42deg_Heat_cDNA_P Parameter: Tissue Value: Aerial
  misc_feature: MA Experiment ID: 20000169 Result: Up-regulated in Transcription
  misc_feature: MA Experiment 20000169 PARAMETER Experiment Name: At_100uM_ABA_P Parameter: Age (day) Value: 14
  misc_feature: MA Experiment 20000169 PARAMETER Experiment Name: At_100uM_ABA_P Parameter: Organism Value: A. thaliana
  misc_feature: MA Experiment 20000169 PARAMETER Experiment Name: At_100uM_ABA_P Parameter: Plant Line Value: WS
  misc_feature: MA Experiment 20000169 PARAMETER Experiment Name: At_100uM_ABA_P Parameter: Timepoint (hr) Value: 6
  misc_feature: MA Experiment 20000169 PARAMETER Experiment Name: At_100uM_ABA_P Parameter: Tissue Value: Aerial
  misc_feature: MA Experiment 20000169 PARAMETER Experiment Name: At_100uM_ABA_P Parameter: Treatment Value: 100uM ABA vs. No Treatment
  misc_feature: MA Experiment ID: 20000180 Result: Up-regulated in Transcription
  misc_feature: MA Experiment 20000180 PARAMETER Experiment Name: At_Germinating_Seeds_P Parameter: Age (hr) Value: 24 vs. 0
  misc_feature: MA Experiment 20000180 PARAMETER Experiment Name: At_Germinating_Seeds_P Parameter: Tissue Value: Germinating Seeds
  misc_feature: MA Experiment ID: 20000182 Result: Up-regulated in Transcription
  misc_feature: MA Experiment 20000182 PARAMETER Experiment Name: At_2mM_SA_P Parameter: Age (day) Value: 14
  misc_feature: MA Experiment 20000182 PARAMETER Experiment Name: At_2mM_SA_P Parameter: Organism Value: A. thaliana
  misc_feature: MA Experiment 20000182 PARAMETER Experiment Name: At_2mM_SA_P Parameter: Plant Line Value: WS
  misc_feature: MA Experiment 20000182 PARAMETER Experiment Name: At_2mM_SA_P Parameter: Timepoint (hr) Value: 6
  misc_feature: MA Experiment 20000182 PARAMETER Experiment Name: At_2mM_SA_P Parameter: Tissue Value: Aerial
  misc_feature: MA Experiment 20000182 PARAMETER Experiment Name: At_2mM_SA_P Parameter: Treatment Value: 2mM SA vs. No Treatment
  misc_feature: MA Experiment ID: 20000185 Result: Down-regulated in Transcription
  misc_feature: MA Experiment 20000185 PARAMETER Experiment Name: At_Roots__P Parameter: Age (day) Value: 7 vs. 21
  misc_feature: MA Experiment 20000185 PARAMETER Experiment Name: At_Roots__P Parameter: Organism Value: A. thaliana
  misc_feature: MA Experiment 20000185 PARAMETER Experiment Name: At_Roots__P Parameter: Tissue Value: Roots vs. Whole Plant
  misc_feature: MA Experiment ID: 20000437 Result: Up-regulated in Transcription
  misc_feature: MA Experiment 20000437 PARAMETER Experiment Name: At_Drought_P Parameter: Age (day) Value: 8
  misc_feature: MA Experiment 20000437 PARAMETER Experiment Name: At_Drought_P Parameter: Organism Value: A. thaliana
  misc_feature: MA Experiment 20000437 PARAMETER Experiment Name: At_Drought_P Parameter: Plant Line Value: WS
  misc_feature: MA Experiment 20000437 PARAMETER Experiment Name: At_Drought_P Parameter: Timepoint (hr) Value: 24
  misc_feature: MA Experiment 20000437 PARAMETER Experiment Name: At_Drought_P Parameter: Tissue Value: Whole Plant
  misc_feature: MA Experiment 20000437 PARAMETER Experiment Name: At_Drought_P Parameter: Treatment Value: Drought vs. No Drought
  misc_feature: MA Experiment ID: 20000451 Result: Down-regulated in Transcription
  misc_feature: MA Experiment 20000451 PARAMETER Experiment Name: At_CS6879_Shoots-Roots_P Parameter: Age (day) Value: 14
  misc_feature: MA Experiment 20000451 PARAMETER Experiment Name: At_CS6879_Shoots-Roots_P Parameter: Organism Value: A. thaliana
  misc_feature: MA Experiment 20000451 PARAMETER Experiment Name: At_CS6879_Shoots-Roots_P Parameter: Plant Line Value: CS6879 vs. WS
  misc_feature: MA Experiment 20000451 PARAMETER Experiment Name: At_CS6879_Shoots-Roots_P Parameter: Tissue Value: Roots
  misc_feature: MA Experiment ID: 20000794 Result: Up-regulated in Transcription
  misc_feature: MA Experiment 20000794 PARAMETER Experiment Name: At_Petals_P Parameter: Age (day) Value: 23-25 days
  misc_feature: MA Experiment 20000794 PARAMETER Experiment Name: At_Petals_P Parameter: Plant Line Value: WS
  misc_feature: MA Experiment 20000794 PARAMETER Experiment Name: At_Petals_P Parameter: Tissue Value: Petals vs. Whole plant
  misc_feature: MA Experiment ID: 20001248 Result: Down-regulated in Transcription
  misc_feature: MA Experiment 20001248 PARAMETER Experiment Name: At_Far-red-induction_P Parameter: Age (day) Value: 7
  misc_feature: MA Experiment 20001248 PARAMETER Experiment Name: At_Far-red-induction_P Parameter: Light Value: Far-red vs. White
  misc_feature: MA Experiment 20001248 PARAMETER Experiment Name: At_Far-red-induction_P Parameter: Organism Value: A. thaliana
  misc_feature: MA Experiment 20001248 PARAMETER Experiment Name: At_Far-red-induction_P Parameter: Plant Line Value: Columbia
  misc_feature: MA Experiment 20001248 PARAMETER Experiment Name: At_Far-red-induction_P Parameter: Timepoint (hr) Value: 4
  misc_feature: MA Experiment 20001248 PARAMETER Experiment Name: At_Far-red-induction_P Parameter: Tissue Value: Whole Plant
  misc_feature: MA Experiment ID: 20001904 Result: Up-regulated in Transcription
  misc_feature: MA Experiment 20001904 PARAMETER Experiment Name: At_Drought_Reproduction_P Parameter: Age (day) Value: 37
  misc_feature: MA Experiment 20001904 PARAMETER Experiment Name: At_Drought_Reproduction_P Parameter: Organism Value: A. thaliana
  misc_feature: MA Experiment 20001904 PARAMETER Experiment Name: At_Drought_Reproduction_P Parameter: Plant Line Value: WS
  misc_feature: MA Experiment 20001904 PARAMETER Experiment Name: At_Drought_Reproduction_P Parameter: Timepoint (day) Value: 7
  misc_feature: MA Experiment 20001904 PARAMETER Experiment Name: At_Drought_Reproduction_P Parameter: Tissue Value: Rosettes
  misc_feature: MA Experiment 20001904 PARAMETER Experiment Name: At_Drought_Reproduction_P Parameter: Treatment Value: Drought vs. No Drought
  misc_feature: MA Experiment ID: 20001906 Result: Up-regulated in Transcription
  misc_feature: MA Experiment 20001906 PARAMETER Experiment Name: At_Drought_Reproduction_P Parameter: Age (day) Value: 35
  misc_feature: MA Experiment 20001906 PARAMETER Experiment Name: At_Drought_Reproduction_P Parameter: Organism Value: A. thaliana
  misc_feature: MA Experiment 20001906 PARAMETER Experiment Name: At_Drought_Reproduction_P Parameter: Plant Line Value: WS
  misc_feature: MA Experiment 20001906 PARAMETER Experiment Name: At_Drought_Reproduction_P Parameter: Timepoint (day) Value: 5
  misc_feature: MA Experiment 20001906 PARAMETER Experiment Name: At_Drought_Reproduction_P Parameter: Tissue Value: Siliques
  misc_feature: MA Experiment 20001906 PARAMETER Experiment Name: At_Drought_Reproduction_P Parameter: Treatment Value: Drought vs. No Drought
  misc_feature: MA Experiment ID: 20001908 Result: Up-regulated in Transcription
  misc_feature: MA Experiment 20001908 PARAMETER Experiment Name: At_Drought_Reproduction_P Parameter: Age (day) Value: 40
  misc_feature: MA Experiment 20001908 PARAMETER Experiment Name: At_Drought_Reproduction_P Parameter: Organism Value: A. thaliana
  misc_feature: MA Experiment 20001908 PARAMETER Experiment Name: At_Drought_Reproduction_P Parameter: Plant Line Value: WS
  misc_feature: MA Experiment 20001908 PARAMETER Experiment Name: At_Drought_Reproduction_P Parameter: Timepoint (day) Value: 10
  misc_feature: MA Experiment 20001908 PARAMETER Experiment Name: At_Drought_Reproduction_P Parameter: Tissue Value: Siliques
  misc_feature: MA Experiment 20001908 PARAMETER Experiment Name: At_Drought_Reproduction_P Parameter: Treatment Value: Drought vs. No Drought
gatttagcttcttcgtttccttggtaatcgttctgttttttcgttgattactgtttgaggttttcattgaatcttgtctcgacatgggctactataacaatgtctttgatgaatgcaacgaccaaactgatatcggtcgggttatacgcgatggaagggaagtcattctccaagcatataattgggaatctcataaatatgattggtggagaaacttggatggtaaagttcctgacatcgcgaaatccggctttacttctgcatggttgccaccaccatctcagtctcttgcaccggaaggttatcttccacaggacctttattcactaaactcagcatatggctctgagcatctattgaaatccttactgcgcaagatgaaacaatacaaagttagagctatggctgatatagtcatcaatcatcgtgttgggacaactagaggacatggtggaatgtataaccgttatgatggaatttcattaccgtgggatgaacacgccgtgacttcttgtaccggaggactgggtaaccgaagcacaggggataatttcaatggagttccaaatgttgatcacactcagcattttgttaggaaagatataattggatggcttcgttggttacgcaacaccgtcgggtttcaagatttccgttttgactttgctaggggttattcagcaaactatgtgaaggaatacattggcgcagcgaaaccattattctcggttggagaatgttgggattcttgcaattacaatggccatggtctagactataatcaagatagccatagacagcgtataatcagttggatcgatgcgacgggacagatctctgctgcatttgacttcacaactaaaggaattctgcaggaagccgtaaagggtcagtattggcgtttatgtgatgcccaagggaagccaccgggtgtaatgggatggtggccttcaagagctgtcacattccttgataaccatgacactggctctactcaggctcattggccgttcccttcacaccacgttatggagggctatgcatatatacttactcatcccggcattccctgtgtgttctacgatcacttttacgattggggaagctcaatacatgatcagattgtcaaactgattgacattaggaggcgacaagatatccacagtaggtcaactgtccgtgttttaaaagcagaatctaacttatatgcagccattgttggtgagaaaatatgtatgaagcttggagacggctcttggtgcccttctggtagagactggactctagcaacaagtggccatcgctatgccgtctggcacaagtaattcttttgtgtctatctagctttgagtccaaagaaaaatatatgtaattcattttctgtaccgggttttactataatgtcatgcccttacgtcttcatgacgtaagattttataagttatatttatgaatgtaaaatttgc

SEQ ID NO: 101959 - protein, 413 aa, Arabidopsis thaliana; identical to SEQ ID NO: 41296
  peptide (1)..(413): Ceres Seq. ID no. 13609161
  misc_feature (1)..(413): Homolog of NCBI NO: 15222959 NR Description: alpha-amylase (1,4-alpha-D-glucan
  misc_feature (1)..(413): Homolog of NCBI NO: 25289325 NR Description: protein T23E18.6 [imported] - Arabidopsis >gi|6573706|gb|AAF17626.1|AC009978_2 T23E18.6 [Arabidopsis
  misc_feature (1)..(413): Homolog of NCBI NO: 7532799 NR Description: alpha-amylase [Malus x domestica]
  misc_feature (9)..(413): Homolog of NCBI NO: 1220453 NR Description: alpha-amylase
  misc_feature (18)..(413): Homolog of NCBI NO: 38346145 NR Description: OSJNBb0118P14.5 [Oryza sativa (japonica
  misc_feature (24)..(411): Homolog of NCBI NO: 18409378 NR Description: alpha-amylase (1,4-alpha-D-glucan putative [Arabidopsis thaliana] >gi|15215738|gb|AAK91414.1| [Arabidopsis thaliana] >gi|23308479|gb|AAN18209.1|
  misc_feature (24)..(411): Homolog of NCBI NO: 25404842 NR Description: probable alpha-amylase T17F3.14 [imported] -
  misc_feature (24)..(411): Homolog of NCBI NO: 34910588 NR Description: putative alpha-amylase [Oryza sativa (japonica
  misc_feature (26)..(413): Homolog of NCBI NO: 166985 NR Description: alpha-amylase
  misc_feature (26)..(413): Homolog of NCBI NO: 2851583 NR Description: Alpha-amylase type B isozyme precursor

SEQ ID NO: 101960 - protein, 315 aa, Arabidopsis thaliana; identical to SEQ ID NO: 41297
  peptide (1)..(315): Ceres Seq. ID no. 13609162
  misc_feature (1)..(315): Homolog of NCBI NO: 15222959 NR Description: alpha-amylase (1,4-alpha-D-glucan
  misc_feature (1)..(315): Homolog of NCBI NO: 25289325 NR Description: protein T23E18.6 [imported] - Arabidopsis >gi|6573706|gb|AAF17626.1|AC009978_2 T23E18.6 [Arabidopsis
  misc_feature (1)..(315): Homolog of NCBI NO: 7532799 NR Description: alpha-amylase [Malus x domestica]
  misc_feature (1)..(315): Homolog of NCBI NO: 1220453 NR Description: alpha-amylase
  misc_feature (1)..(315): Homolog of NCBI NO: 38346145 NR Description: OSJNBb0118P14.5 [Oryza sativa (japonica
  misc_feature (1)..(313): Homolog of NCBI NO: 18409378 NR Description: alpha-amylase (1,4-alpha-D-glucan putative [Arabidopsis thaliana] >gi|15215738|gb|AAK91414.1| [Arabidopsis thaliana] >gi|23308479|gb|AAN18209.1|
  misc_feature (1)..(313): Homolog of NCBI NO: 25404842 NR Description: probable alpha-amylase T17F3.14 [imported] -
  misc_feature (1)..(313): Homolog of NCBI NO: 34910588 NR Description: putative alpha-amylase [Oryza sativa (japonica
  misc_feature (1)..(315): Homolog of NCBI NO: 166985 NR Description: alpha-amylase
  misc_feature (1)..(315): Homolog of NCBI NO: 2851583 NR Description: Alpha-amylase type B isozyme precursor

SEQ ID NO: 101961 - protein, 307 aa, Arabidopsis thaliana; identical to SEQ ID NO: 41298
  peptide (1)..(307): Ceres Seq. ID no. 13609163
  misc_feature (1)..(307): Homolog of NCBI NO: 15222959 NR Description: alpha-amylase (1,4-alpha-D-glucan
  misc_feature (1)..(307): Homolog of NCBI NO: 25289325 NR Description: protein T23E18.6 [imported] - Arabidopsis >gi|6573706|gb|AAF17626.1|AC009978_2 T23E18.6 [Arabidopsis
  misc_feature (1)..(307): Homolog of NCBI NO: 7532799 NR Description: alpha-amylase [Malus x domestica]
  misc_feature (1)..(307): Homolog of NCBI NO: 1220453 NR Description: alpha-amylase
  misc_feature (1)..(307): Homolog of NCBI NO: 38346145 NR Description: OSJNBb0118P14.5 [Oryza sativa (japonica
  misc_feature (1)..(305): Homolog of NCBI NO: 18409378 NR Description: alpha-amylase (1,4-alpha-D-glucan putative [Arabidopsis thaliana] >gi|15215738|gb|AAK91414.1| [Arabidopsis thaliana] >gi|23308479|gb|AAN18209.1|
  misc_feature (1)..(305): Homolog of NCBI NO: 25404842 NR Description: probable alpha-amylase T17F3.14 [imported] -
  misc_feature (1)..(305): Homolog of NCBI NO: 34910588 NR Description: putative alpha-amylase [Oryza sativa (japonica
  misc_feature (1)..(307): Homolog of NCBI NO: 166985 NR Description: alpha-amylase
  misc_feature (1)..(307): Homolog of NCBI NO: 2851583 NR Description: Alpha-amylase type B isozyme precursor

SEQ ID NO: 101962 - DNA, 1296 bp, Arabidopsis thaliana
  misc_feature (1)..(1296): Ceres Seq. ID no. 13609168
  misc_feature: MA Experiment ID: 20000180 Result: Up-regulated in Transcription
  misc_feature: MA Experiment 20000180 PARAMETER Experiment Name: At_Germinating_Seeds_P Parameter: Age (hr) Value: 24 vs. 0
  misc_feature: MA Experiment 20000180 PARAMETER Experiment Name: At_Germinating_Seeds_P Parameter: Tissue Value: Germinating Seeds
tgaatttcgaaaaatcagtccgttgtgaaagcccaagaataaggattctataatttcaggtctcatttaattatataacctatctacactttgatctccgacaattcactttcccaataagaaccaactgagagagagagagcgccggagaagaagaattttagagagcgatggacgagggagttatagcagtttccgccatggatgctttcgagaagcttgagaaagttggtgaagggacatacgggaaagtttacagagccagagagaaagctaccgggaaaatcgtcgctctaaagaagacgcgtctccatgaggacgaagaaggcgttccttccaccactctccgcgagatctccattttgcgaatgctcgctcgtgatcctcacgtcgtcaggttaatggatgttaagcaaggactaagcaaagaaggcaaaactgtactgtacctggtttttgaatacatggacactgatgtcaagaaattcatcagaagtttccgtagcactggcaagaacattccaacccaaactatcaagagcttgatgtatcaactatgcaaaggtatggcattctgccatggtcacgggatattgcacagagatctcaagcctcacaatctcttgatggatcccaagacaatgaggctcaaaatagcagatcttggtttagccagagccttcactctgccaatgaagaagtatacccatgagatattaactctttggtatagagctccagaggttcttcttggtgccacccattactctacagctgtggatatgtggtctgttggctgcatatttgctgaacttgtgaccaaccaagcaatctttcagggagactctgagctccaacagctcctccatattttcaagttgtttgggacacccaatgaagaaatgtggccaggagtgagcacactcaagaactggcatgaatacccacagtggaaaccatcgactctatcctctgctgttccaaacctcgacgaggctggagttgatcttctatctaaaatgctgcagtacgagccagcgaaacgaatctcagcaaagatggctatggagcatccttactttgatgatctgccagaaaagtcctctctctaaggatttaaaatcttcagttagtatctttccaagttttatggtttttctagttttgcttctttcaagcatatctctagtgtgctgcttccccctctatgaatcatcctttctttagcataatatatcacttctgattgttgtttctttctattcgaatatttggattaacggctttaatgttctt

SEQ ID NO: 101963 - protein, 313 aa, Arabidopsis thaliana; identical to SEQ ID NO: 25957
  peptide (1)..(313): Ceres Seq. ID no. 13609169
  misc_feature (14)..(304): Pfam Name: Protein kinase domain Pfam Description: Protein kinase domain
  misc_feature (1)..(313): Homolog of NCBI NO: 15223081 NR Description: cell division control protein, putative
  misc_feature (1)..(313): Homolog of NCBI NO: 14488071 NR Description: At1g76540/F14G6_14 [Arabidopsis thaliana]
  misc_feature (11)..(313): Homolog of NCBI NO: 21537217 NR Description: putative cell division control protein cdc2
  misc_feature (7)..(313): Homolog of NCBI NO: 15218072 NR Description: cell division control protein, putative
  misc_feature (11)..(313): Homolog of NCBI NO: 21536682 NR Description: putative cell division control protein cdc2
  misc_feature (6)..(313): Homolog of NCBI NO: 7434327 NR Description: probable cdc2-like protein kinase cdc2MsF -
  misc_feature (7)..(313): Homolog of NCBI NO: 11125685 NR Description: B2-type cyclin dependent kinase [Lycopersicon
  misc_feature (9)..(313): Homolog of NCBI NO: 5921447 NR Description: CELL DIVISION CONTROL PROTEIN 2 HOMOLOG D
  misc_feature (11)..(307): Homolog of NCBI NO: 7489567 NR Description: protein kinase cdc2 homolog - rice
  misc_feature (11)..(253): Homolog of NCBI NO: 11558194 NR Description: cyclin dependent kinase (cdc2b) [Chenopodium

SEQ ID NO: 101964 - protein, 303 aa, Arabidopsis thaliana; identical to SEQ ID NO: 25958
  peptide (1)..(303): Ceres Seq. ID no. 13609170
  misc_feature (4)..(294): Pfam Name: Protein kinase domain Pfam Description: Protein kinase domain
  misc_feature (1)..(303): Homolog of NCBI NO: 15223081 NR Description: cell division control protein, putative
  misc_feature (1)..(303): Homolog of NCBI NO: 14488071 NR Description: At1g76540/F14G6_14 [Arabidopsis thaliana]
  misc_feature (1)..(303): Homolog of NCBI NO: 21537217 NR Description: putative cell division control protein cdc2
  misc_feature (1)..(303): Homolog of NCBI NO: 15218072 NR Description: cell division control protein, putative
  misc_feature (1)..(303): Homolog of NCBI NO: 21536682 NR Description: putative cell division control protein cdc2
  misc_feature (1)..(303): Homolog of NCBI NO: 7434327 NR Description: probable cdc2-like protein kinase cdc2MsF -
  misc_feature (1)..(303): Homolog of NCBI NO: 11125685 NR Description: B2-type cyclin dependent kinase [Lycopersicon
  misc_feature (1)..(303): Homolog of NCBI NO: 5921447 NR Description: CELL DIVISION CONTROL PROTEIN 2 HOMOLOG D
  misc_feature (1)..(297): Homolog of NCBI NO: 7489567 NR Description: protein kinase cdc2 homolog - rice
  misc_feature (1)..(243): Homolog of NCBI NO: 11558194 NR Description: cyclin dependent kinase (cdc2b) [Chenopodium

SEQ ID NO: 101965 - protein, 247 aa, Arabidopsis thaliana; identical to SEQ ID NO: 25959
  peptide (1)..(247): Ceres Seq. ID no. 13609171
  misc_feature (1)..(238): Pfam Name: Protein kinase domain Pfam Description: Protein kinase domain
  misc_feature (1)..(247): Homolog of NCBI NO: 15223081 NR Description: cell division control protein, putative
  misc_feature (1)..(247): Homolog of NCBI NO: 14488071 NR Description: At1g76540/F14G6_14 [Arabidopsis thaliana]
  misc_feature (1)..(247): Homolog of NCBI NO: 21537217 NR Description: putative cell division control protein cdc2
  misc_feature (1)..(247): Homolog of NCBI NO: 15218072 NR Description: cell division control protein, putative
  misc_feature (1)..(247): Homolog of NCBI NO: 21536682 NR Description: putative cell division control protein cdc2
  misc_feature (1)..(247): Homolog of NCBI NO: 7434327 NR Description: probable cdc2-like protein kinase cdc2MsF -
  misc_feature (1)..(247): Homolog of NCBI NO: 11125685 NR Description: B2-type cyclin dependent kinase [Lycopersicon
  misc_feature (1)..(247): Homolog of NCBI NO: 5921447 NR Description: CELL DIVISION CONTROL PROTEIN 2 HOMOLOG D
  misc_feature (1)..(241): Homolog of NCBI NO: 7489567 NR Description: protein kinase cdc2 homolog - rice
  misc_feature (1)..(187): Homolog of NCBI NO: 11558194 NR Description: cyclin dependent kinase (cdc2b) [Chenopodium

SEQ ID NO: 101966 - DNA, 1255 bp, Arabidopsis thaliana
  misc_feature (1)..(1255): Ceres Seq. ID no. 13609177
  misc_feature: MA Experiment ID: 20000173 Result: Down-regulated in Transcription
  misc_feature: MA Experiment 20000173 PARAMETER Experiment Name: At_42deg_Heat_P Parameter: Age (day) Value: 14
  misc_feature: MA Experiment 20000173 PARAMETER Experiment Name: At_42deg_Heat_P Parameter: Organism Value: A. thaliana
  misc_feature: MA Experiment 20000173 PARAMETER Experiment Name: At_42deg_Heat_P Parameter: Plant Line Value: WS
  misc_feature: MA Experiment 20000173 PARAMETER Experiment Name: At_42deg_Heat_P Parameter: Temperature (deg C) Value: 42 vs. 22
  misc_feature: MA Experiment 20000173 PARAMETER Experiment Name: At_42deg_Heat_P Parameter: Timepoint (hr) Value: 6
  misc_feature: MA Experiment 20000173 PARAMETER Experiment Name: At_42deg_Heat_P Parameter: Tissue Value: Aerial
  misc_feature: MA Experiment ID: 20000179 Result: Up-regulated in Transcription
  misc_feature: MA Experiment 20000179 PARAMETER Experiment Name: At_Germinating_Seeds_P Parameter: Age (hr) Value: 6 vs. 0
  misc_feature: MA Experiment 20000179 PARAMETER Experiment Name: At_Germinating_Seeds_P Parameter: Tissue Value: Germinating Seeds
  misc_feature: MA Experiment ID: 20000180 Result: Up-regulated in Transcription
  misc_feature: MA Experiment 20000180 PARAMETER Experiment Name: At_Germinating_Seeds_P Parameter: Age (hr) Value: 24 vs. 0
  misc_feature: MA Experiment 20000180 PARAMETER Experiment Name: At_Germinating_Seeds_P Parameter: Tissue Value: Germinating Seeds
  misc_feature: MA Experiment ID: 20000184 Result: Down-regulated in Transcription
  misc_feature: MA Experiment 20000184 PARAMETER Experiment Name: At_Shoots__P Parameter: Age (day) Value: 7
  misc_feature: MA Experiment 20000184 PARAMETER Experiment Name: At_Shoots__P Parameter: Tissue Value: Shoots vs. Whole Plant
  misc_feature: MA Experiment ID: 20000495 Result: Up-regulated in Transcription
  misc_feature: MA Experiment 20000495 PARAMETER Experiment Name: At_Guard_Cells_P Parameter: Harvest Date Value: 8/2/2002
  misc_feature: MA Experiment 20000495 PARAMETER Experiment Name: At_Guard_Cells_P Parameter: Organism Value: A. thaliana
  misc_feature: MA Experiment 20000495 PARAMETER Experiment Name: At_Guard_Cells_P Parameter: Tissue Value: Guard Cells vs. Leaves
  misc_feature: MA Experiment ID: 20001248 Result: Up-regulated in Transcription
  misc_feature: MA Experiment 20001248 PARAMETER Experiment Name: At_Far-red-induction_P Parameter: Age (day) Value: 7
  misc_feature: MA Experiment 20001248 PARAMETER Experiment Name: At_Far-red-induction_P Parameter: Light Value: Far-red vs. White
  misc_feature: MA Experiment 20001248 PARAMETER Experiment Name: At_Far-red-induction_P Parameter: Organism Value: A. thaliana
  misc_feature: MA Experiment 20001248 PARAMETER Experiment Name: At_Far-red-induction_P Parameter: Plant Line Value: Columbia
  misc_feature: MA Experiment 20001248 PARAMETER Experiment Name: At_Far-red-induction_P Parameter: Timepoint (hr) Value: 4
  misc_feature: MA Experiment 20001248 PARAMETER Experiment Name: At_Far-red-induction_P Parameter: Tissue Value: Whole Plant
  misc_feature: MA Experiment ID: 20001450 Result: Up-regulated in Transcription
  misc_feature: MA Experiment 20001450 PARAMETER Experiment Name: At_Far-red-induction_P Parameter: Age (day) Value: 7
  misc_feature: MA Experiment 20001450 PARAMETER Experiment Name: At_Far-red-induction_P Parameter: Light Value: Far-red vs. White
  misc_feature: MA Experiment 20001450 PARAMETER Experiment Name: At_Far-red-induction_P Parameter: Organism Value: A. thaliana
  misc_feature: MA Experiment 20001450 PARAMETER Experiment Name: At_Far-red-induction_P Parameter: Plant Line Value: Columbia
  misc_feature: MA Experiment 20001450 PARAMETER Experiment Name: At_Far-red-induction_P Parameter: Timepoint (hr) Value: 8
  misc_feature: MA Experiment 20001450 PARAMETER Experiment Name: At_Far-red-induction_P Parameter: Tissue Value: Whole Plant
  misc_feature: MA Experiment ID: 20001557 Result: Down-regulated in Transcription
  misc_feature: MA Experiment 20001557 PARAMETER Experiment Name: At_Drought_Soil_Dry_P Parameter: Age (day) Value: 27
  misc_feature: MA Experiment 20001557 PARAMETER Experiment Name: At_Drought_Soil_Dry_P Parameter: Organism Value: A. thaliana
  misc_feature: MA Experiment 20001557 PARAMETER Experiment Name: At_Drought_Soil_Dry_P Parameter: Plant Line Value: WS
  misc_feature: MA Experiment 20001557 PARAMETER Experiment Name: At_Drought_Soil_Dry_P Parameter: Post Timepoint (hr) Value: 3
  misc_feature: MA Experiment 20001557 PARAMETER Experiment Name: At_Drought_Soil_Dry_P Parameter: Post-Treatment Value: Re-Water vs. No Drought
  misc_feature: MA Experiment 20001557 PARAMETER Experiment Name: At_Drought_Soil_Dry_P Parameter: Timepoint (day) Value: 13
  misc_feature: MA Experiment 20001557 PARAMETER Experiment Name: At_Drought_Soil_Dry_P Parameter: Treatment Value: Drought vs. No Drought
atcgatcgccttctgaattttccggcggaaaagcaaatgtccgttaacgacagtatcgatcctcggttcgtattccacgttgaagatgaatctttgcgtttccgtgtgggagattcaggtactaagatccgggagctcgaaaccgtcggcgatcgccatttcagaacccagcaaggtttctgcggaaatagaattgagaaagatgaaaccatgtattccgatggagatgatgaagagtacgacgtttctatccgaagacgaactgctctgattcagcctggtattgattccggtaacaattatgattctgctgcagctgaagaaaccaacagagaaagtaaaaatccagttggttgggaactggttgtgagagaagatggggaaggtaattcaacgattgatcgacatgaaatggagtttaaggtgaggatcactaaaccagatggtaacgtatctaattcccaccgtaacacgcaacaaaagcgagattttgcttctgtggagaaggagagagtcactactactagtgtcagctcttgggagtctctcaaggccatcctctctgatcctgtcaccggagccttgatgaatgatgctaccatactgccttgtggacattcttttggcgccgggggattaaaagaagttaaaaaaatgaaagcatgtttcacatgttcccaacctactttagaaggatcagaaaagccaaatctctctctcagaattgtagttcatgctttccgccaagaagaagattcagatcatattcacacgctgaaaagaaggaaagaaaggtcggatcagaagagaagtttctgtatcccaaacatcactgaaactcctaagagtagccgaggcatacagtttcctttctccattggagatcatattatcatagagggaaacaaaaggacgcctccaaggtttgtcggacgcatagctgttataatgacacaatgcttaaatggatggtacgttgtgaagacagtggacaattcagagtctatcaagttacaacattgctcacttgccaagatttcagacaattcatctacgaaggtaacagtagctgaaatgccaccgtcttggctctaactcgtagaaagcaaatatctgtggctgcagaaatcagcatctgtaattttttcattcagagaaagtagttactacgtttcattatgtaatataggaacgagacaacaattttctgtactaaatccagtgttttcattcatacaaggaaactttgctcatc

SEQ ID NO: 101967 - protein, 364 aa, Arabidopsis thaliana
  peptide (1)..(364): Ceres Seq. ID no. 13609178
  misc_feature (1)..(364): Homolog of NCBI NO: 30688352 NR Description: expressed protein [Arabidopsis thaliana]
  misc_feature (1)..(364): Homolog of NCBI NO: 27413505 NR Description: hypothetical protein [Arabidopsis thaliana]
  misc_feature (1)..(324): Homolog of NCBI NO: 30688358 NR Description: expressed protein [Arabidopsis thaliana]
  misc_feature (13)..(192): Homolog of NCBI NO: 25370811 NR Description: hypothetical protein At2g40640 [imported] - thaliana >gi|20196871|gb|AAM14813.1| hypothetical protein
  misc_feature (74)..(364): Homolog of NCBI NO: 28876015 NR Description: hypothetical protein [Oryza sativa (japonica
  misc_feature (169)..(349): Homolog of NCBI NO: 30685540 NR Description: expressed protein [Arabidopsis thaliana]
  misc_feature (191)..(349): Homolog of NCBI NO: 11994201 NR Description: gb|AAF35943.1~gene_id:MPN9.14~similar to unknown
  misc_feature (27)..(219): Homolog of NCBI NO: 10176735 NR Description: gene_id:K18I23.3~unknown protein [Arabidopsis
  misc_feature (27)..(219): Homolog of NCBI NO: 30680842 NR Description: expressed protein [Arabidopsis thaliana]
  misc_feature (169)..(268): Homolog of NCBI NO: 20453175 NR Description: At3g19895 [Arabidopsis thaliana]
IDRLLNFPAEKQMSVNDSIDPRFVFHVEDESLRFRVGDSGTKIRELETVGDRHFRTQQGFCGNRIEKDETMYSDGDDEEYDVSIRRRTALIQPGIDSGNNYDSAAAEETNRESKNPVGWELVVREDGEGNSTIDRHEMEFKVRITKPDGNVSNSHRNTQQKRDFASVEKERVTTTSVSSWESLKAILSDPVTGALMNDATILPCGHSFGAGGLKEVKKMKACFTCSQPTLEGSEKPNLSLRIVVHAFRQEEDSDHIHTLKRRKERSDQKRSFCIPNITETPKSSRGIQFPFSIGDHIIIEGNKRTPPRFVGRIAVIMTQCLNGWYVVKTVDNSESIKLQHCSLAKISDNSSTKVTVAEMPPSWL

SEQ ID NO: 101968 - protein, 352 aa, Arabidopsis thaliana; identical to SEQ ID NO: 27650
  peptide (1)..(352): Ceres Seq. ID no. 13609179
  misc_feature (1)..(352): Homolog of NCBI NO: 30688352 NR Description: expressed protein [Arabidopsis thaliana]
  misc_feature (1)..(352): Homolog of NCBI NO: 27413505 NR Description: hypothetical protein [Arabidopsis thaliana]
  misc_feature (1)..(312): Homolog of NCBI NO: 30688358 NR Description: expressed protein [Arabidopsis thaliana]
  misc_feature (1)..(180): Homolog of NCBI NO: 25370811 NR Description: hypothetical protein At2g40640 [imported] - thaliana >gi|20196871|gb|AAM14813.1| hypothetical protein
  misc_feature (62)..(352): Homolog of NCBI NO: 28876015 NR Description: hypothetical protein [Oryza sativa (japonica
  misc_feature (157)..(337): Homolog of NCBI NO: 30685540 NR Description: expressed protein [Arabidopsis thaliana]
  misc_feature (179)..(337): Homolog of NCBI NO: 11994201 NR Description: gb|AAF35943.1~gene_id:MPN9.14~similar to unknown
  misc_feature (15)..(207): Homolog of NCBI NO: 10176735 NR Description: gene_id:K18I23.3~unknown protein [Arabidopsis
  misc_feature (15)..(207): Homolog of NCBI NO: 30680842 NR Description: expressed protein [Arabidopsis thaliana]
  misc_feature (157)..(256): Homolog of NCBI NO: 20453175 NR Description: At3g19895 [Arabidopsis thaliana]

SEQ ID NO: 101969 - protein, 294 aa, Arabidopsis thaliana
  peptide (1)..(294): Ceres Seq. ID no. 13609180
  misc_feature (1)..(294): Homolog of NCBI NO: 30688352 NR Description: expressed protein [Arabidopsis thaliana]
  misc_feature (1)..(294): Homolog of NCBI NO: 27413505 NR Description: hypothetical protein [Arabidopsis thaliana]
  misc_feature (1)..(254): Homolog of NCBI NO: 30688358 NR Description: expressed protein [Arabidopsis thaliana]
  misc_feature (1)..(122): Homolog of NCBI NO: 25370811 NR Description: hypothetical protein At2g40640 [imported] - thaliana >gi|20196871|gb|AAM14813.1| hypothetical protein
  misc_feature (4)..(294): Homolog of NCBI NO: 28876015 NR Description: hypothetical protein [Oryza sativa (japonica
  misc_feature (99)..(279): Homolog of NCBI NO: 30685540 NR Description: expressed protein [Arabidopsis thaliana]
  misc_feature (121)..(279): Homolog of NCBI NO: 11994201 NR Description: gb|AAF35943.1~gene_id:MPN9.14~similar to unknown
  misc_feature (1)..(149): Homolog of NCBI NO: 10176735 NR Description: gene_id:K18I23.3~unknown protein [Arabidopsis
  misc_feature (1)..(149): Homolog of NCBI NO: 30680842 NR Description: expressed protein [Arabidopsis thaliana]
  misc_feature (99)..(198): Homolog of NCBI NO: 20453175 NR Description: At3g19895 [Arabidopsis thaliana]
MYSDGDDEEYDVSIRRRTALIQPGIDSGNNYDSAAAEETNRESKNPVGWELVVREDGEGNSTIDRHEMEFKVRITKPDGNVSNSHRNTQQKRDFASVEKERVTTTSVSSWESLKAILSDPVTGALMNDATILPCGHSFGAGGLKEVKKMKACFTCSQPTLEGSEKPNLSLRIVVHAFRQEEDSDHIHTLKRRKERSDQKRSFCIPNITETPKSSRGIQFPFSIGDHIIIEGNKRTPPRFVGRIAVIMTQCLNGWYVVKTVDNSESIKLQHCSLAKISDNSSTKVTVAEMPPSWL

SEQ ID NO: 101970 - DNA, 1248 bp, Arabidopsis thaliana
  misc_feature (1)..(1248): Ceres Seq. ID no. 13609192
  misc_feature: MA Experiment ID: 108433 Result: Up-regulated in Transcription
  misc_feature: MA Experiment 108433 PARAMETER Experiment Name: At_rhl_Mutant2_cDNA_P Parameter: Age (day) Value: 7
  misc_feature: MA Experiment 108433 PARAMETER Experiment Name: At_rhl_Mutant2_cDNA_P Parameter: Organism Value: A. thaliana
  misc_feature: MA Experiment 108433 PARAMETER Experiment Name: At_rhl_Mutant2_cDNA_P Parameter: Plant Line Value: rhl Mutant vs. wt landsburg
  misc_feature: MA Experiment 108433 PARAMETER Experiment Name: At_rhl_Mutant2_cDNA_P Parameter: Tissue Value: Roots
  misc_feature: MA Experiment ID: 108434 Result: Down-regulated in Transcription
  misc_feature: MA Experiment 108434 PARAMETER Experiment Name: At_Root_Tips_cDNA_P Parameter: Tissue Value: Root Tips
  misc_feature: MA Experiment ID: 108463 Result: Up-regulated in Transcription
  misc_feature: MA Experiment 108463 PARAMETER Experiment Name: At_Germinating_Seeds_cDNA_P Parameter: Age (day) Value: 3 vs. 0
  misc_feature: MA Experiment 108463 PARAMETER Experiment Name: At_Germinating_Seeds_cDNA_P Parameter: Tissue Value: Germinating Seeds
  misc_feature: MA Experiment ID: 108464 Result: Up-regulated in Transcription
  misc_feature: MA Experiment 108464 PARAMETER Experiment Name: At_Germinating_Seeds_cDNA_P Parameter: Age (day) Value: 4 vs. 0
  misc_feature: MA Experiment 108464 PARAMETER Experiment Name: At_Germinating_Seeds_cDNA_P Parameter: Tissue Value: Germinating Seeds
  misc_feature: MA Experiment ID: 108473 Result: Up-regulated in Transcription
  misc_feature: MA Experiment 108473 PARAMETER Experiment Name: At_Drought_Flowers_cDNA_P Parameter: Timepoint (hr) Value: 7 d
  misc_feature: MA Experiment 108473 PARAMETER Experiment Name: At_Drought_Flowers_cDNA_P Parameter: Tissue Value: Flower
  misc_feature: MA Experiment 108473 PARAMETER Experiment Name: At_Drought_Flowers_cDNA_P Parameter: Treatment Value: Drought vs. No Drought
  misc_feature: MA Experiment ID: 108488 Result: Down-regulated in Transcription
  misc_feature: MA Experiment ID: 108561 Result: Up-regulated in Transcription
  misc_feature: MA Experiment 108561 PARAMETER Experiment Name: At_100uM_ABA_cDNA_P Parameter: Timepoint (hr) Value: 6
  misc_feature: MA Experiment 108561 PARAMETER Experiment Name: At_100uM_ABA_cDNA_P Parameter: Tissue Value: Aerial
  misc_feature: MA Experiment 108561 PARAMETER Experiment Name: At_100uM_ABA_cDNA_P Parameter: Treatment Value: 100uM ABA vs. No Treatment
  misc_feature: MA Experiment ID: 20000069 Result: Up-regulated in Transcription
  misc_feature: MA Experiment 20000069 PARAMETER Experiment Name: At_100uM_ABA_Mutants_cDNA_P Parameter: Plant Line Value: CS23
  misc_feature: MA Experiment 20000069 PARAMETER Experiment Name: At_100uM_ABA_Mutants_cDNA_P Parameter: Timepoint (hr) Value: 6
  misc_feature: MA Experiment 20000069 PARAMETER Experiment Name: At_100uM_ABA_Mutants_cDNA_P Parameter: Tissue Value: Aerial
  misc_feature: MA Experiment 20000069 PARAMETER Experiment Name: At_100uM_ABA_Mutants_cDNA_P Parameter: Treatment Value: 100uM ABA vs. No Treatment
  misc_feature: MA Experiment ID: 20000070 Result: Up-regulated in Transcription
  misc_feature: MA Experiment 20000070 PARAMETER Experiment Name: At_100uM_ABA_Mutants_cDNA_P Parameter: Plant Line Value: CS24
  misc_feature: MA Experiment 20000070 PARAMETER Experiment Name: At_100uM_ABA_Mutants_cDNA_P Parameter: Timepoint (hr) Value: 6
  misc_feature: MA Experiment 20000070 PARAMETER Experiment Name: At_100uM_ABA_Mutants_cDNA_P Parameter: Tissue Value: Aerial
  misc_feature: MA Experiment 20000070 PARAMETER Experiment Name: At_100uM_ABA_Mutants_cDNA_P Parameter: Treatment Value: 100uM ABA vs. No Treatment
  misc_feature: MA Experiment ID: 20000071 Result: Up-regulated in Transcription
  misc_feature: MA Experiment 20000071 PARAMETER Experiment Name: At_100uM_ABA_Mutants_cDNA_P Parameter: Plant Line Value: CS8104
  misc_feature: MA Experiment 20000071 PARAMETER Experiment Name: At_100uM_ABA_Mutants_cDNA_P Parameter: Timepoint (hr) Value: 6
  misc_feature: MA Experiment 20000071 PARAMETER Experiment Name: At_100uM_ABA_Mutants_cDNA_P Parameter: Tissue Value: Aerial
  misc_feature: MA Experiment 20000071 PARAMETER Experiment Name: At_100uM_ABA_Mutants_cDNA_P Parameter: Treatment Value: 100uM ABA vs. No Treatment
  misc_feature: MA Experiment ID: 20000117 Result: Up-regulated in Transcription
  misc_feature: MA Experiment 20000117 PARAMETER Experiment Name: At_100uM_ABA_Mutants_cDNA_P Parameter: Plant Line Value: Columbia
  misc_feature: MA Experiment 20000117 PARAMETER Experiment Name: At_100uM_ABA_Mutants_cDNA_P Parameter: Timepoint (hr) Value: 6
  misc_feature: MA Experiment 20000117 PARAMETER Experiment Name: At_100uM_ABA_Mutants_cDNA_P Parameter: Tissue Value: Aerial
  misc_feature: MA Experiment 20000117 PARAMETER Experiment Name: At_100uM_ABA_Mutants_cDNA_P Parameter: Treatment Value: 100uM ABA vs. No Treatment
  misc_feature: MA Experiment ID: 20000185 Result: Up-regulated in Transcription
  misc_feature: MA Experiment 20000185 PARAMETER Experiment Name: At_Roots__P Parameter: Age (day) Value: 7 vs. 21
  misc_feature: MA Experiment 20000185 PARAMETER Experiment Name: At_Roots__P Parameter: Organism Value: A. thaliana
  misc_feature: MA Experiment 20000185 PARAMETER Experiment Name: At_Roots__P Parameter: Tissue Value: Roots vs. Whole Plant
  misc_feature: MA Experiment ID: 20000227 Result: Down-regulated in Transcription
  misc_feature: MA Experiment 20000227 PARAMETER Experiment Name: At_Root-Tips-vs-Tops_P Parameter: Tissue Value: Root Tips vs. Root Tops
  misc_feature: MA Experiment ID: 20000265 Result: Down-regulated in Transcription
  misc_feature: MA Experiment 20000265 PARAMETER Experiment Name: At_Open_Flower_P Parameter: Age (day) Value: 21
  misc_feature: MA Experiment 20000265 PARAMETER Experiment Name: At_Open_Flower_P Parameter: Plant Line Value: WS
  misc_feature: MA Experiment 20000265 PARAMETER Experiment Name: At_Open_Flower_P Parameter: Tissue Value: Closed Flower vs. Whole Plant
  misc_feature: MA Experiment ID: 20000439 Result: Up-regulated in Transcription
  misc_feature: MA Experiment 20000439 PARAMETER Experiment Name: At_Roots__P Parameter: Age (day) Value: 14 vs. 21
  misc_feature: MA Experiment 20000439 PARAMETER Experiment Name: At_Roots__P Parameter: Organism Value: A. thaliana
  misc_feature: MA Experiment 20000439 PARAMETER Experiment Name: At_Roots__P Parameter: Tissue Value: Roots vs. Whole Plant
  misc_feature: MA Experiment ID: 20000453 Result: Up-regulated in Transcription
  misc_feature: MA Experiment 20000453 PARAMETER Experiment Name: At_100uM_ABA_P Parameter: Age (day) Value: 15
  misc_feature: MA Experiment 20000453 PARAMETER Experiment Name: At_100uM_ABA_P Parameter: Organism Value: A. thaliana
  misc_feature: MA Experiment 20000453 PARAMETER Experiment Name: At_100uM_ABA_P Parameter: Plant Line Value: WS
  misc_feature: MA Experiment 20000453 PARAMETER Experiment Name: At_100uM_ABA_P Parameter: Timepoint (hr) Value: 24
  misc_feature: MA Experiment 20000453 PARAMETER Experiment Name: At_100uM_ABA_P Parameter: Tissue Value: Aerial
  misc_feature: MA Experiment 20000453 PARAMETER Experiment Name: At_100uM_ABA_P Parameter: Treatment Value: 100uM ABA vs. No Treatment
  misc_feature: MA Experiment ID: 20000495 Result: Up-regulated in Transcription
  misc_feature: MA Experiment 20000495 PARAMETER Experiment Name: At_Guard_Cells_P Parameter: Harvest Date Value: 8/2/2002
  misc_feature: MA Experiment 20000495 PARAMETER Experiment Name: At_Guard_Cells_P Parameter: Organism Value: A. thaliana
  misc_feature: MA Experiment 20000495 PARAMETER Experiment Name: At_Guard_Cells_P Parameter: Tissue Value: Guard Cells vs. Leaves
  misc_feature: MA Experiment ID: 20000527 Result: Down-regulated in Transcription
  misc_feature: MA Experiment 20000527 PARAMETER Experiment Name: At_10percent_PEG_P Parameter: Age (day) Value: 20
  misc_feature: MA Experiment 20000527 PARAMETER Experiment Name: At_10percent_PEG_P Parameter: Organism Value: A. thaliana
  misc_feature: MA Experiment 20000527 PARAMETER Experiment Name: At_10percent_PEG_P Parameter: Plant Line Value: WS
  misc_feature: MA Experiment 20000527 PARAMETER Experiment Name: At_10percent_PEG_P Parameter: Timepoint (day) Value: 20
  misc_feature: MA Experiment 20000527 PARAMETER Experiment Name: At_10percent_PEG_P Parameter: Tissue Value: Whole Plant
  misc_feature: MA Experiment 20000527 PARAMETER Experiment Name: At_10percent_PEG_P Parameter: Treatment Value: 10percent PEG vs. No Treatment
  misc_feature: MA Experiment ID: 20001556 Result: Down-regulated in Transcription
  misc_feature: MA Experiment 20001556 PARAMETER Experiment Name: At_Drought_Soil_Dry_P Parameter: Age (day) Value: 26
  misc_feature: MA Experiment 20001556 PARAMETER Experiment Name: At_Drought_Soil_Dry_P Parameter: Organism Value: A. thaliana
  misc_feature: MA Experiment 20001556 PARAMETER Experiment Name: At_Drought_Soil_Dry_P Parameter: Plant Line Value: WS
  misc_feature: MA Experiment 20001556 PARAMETER Experiment Name: At_Drought_Soil_Dry_P Parameter: Post Timepoint (hr) Value: None
  misc_feature: MA Experiment 20001556 PARAMETER Experiment Name: At_Drought_Soil_Dry_P Parameter: Post-Treatment Value: None
  misc_feature: MA Experiment 20001556 PARAMETER Experiment Name: At_Drought_Soil_Dry_P Parameter: Timepoint (day) Value: 12
  misc_feature: MA Experiment 20001556 PARAMETER Experiment Name: At_Drought_Soil_Dry_P Parameter: Treatment Value: Drought vs. No Drought
atgtatgtgtgtgagtataaatataagttggttcttgaacatcattgcatgttgattaatcacacagcacaaataagagttagaaaaatgggagtgtacttaggtaagtattgttatataatgataataatgttagtgttggtgttgggaaaagaagtgagaagccagttgttaaaaaatggttattattcaacttcatgtccaaaagctgagtcgatagttagatccactgttgaatctcactttgattctgatcccacaatttcccctggcttgcttaggcttcatttccatgactgttttgttcagggttgtgatggttcggttttaatcaaagggaaatctgcggagcaagctgctctaccaaatcttggtctaagaggtttagaagtgatcgatgatgctaaagcccggcttgaggcggtgtgtccaggagttgtgtcatgtgcagatatacttgcacttgctgctcgtgactctgttgacttgagtgatgggccaagctggcgagtaccaacgggtcgtaaagacgggagaatctcgttggcaactgaagcatcgaatctaccttctccacttgactctgttgctgttcaaaagcaaaagtttcaagataaaggattggatactcatgatctagttactctactaggtgcacatacaattggacaaaccgactgtctcttcttccgttaccgtttatacaacttcacggtgaccggaaactccgatccaaccataagcccatcgtttcttacacagctcaagactctttgtcctcccaatggagacggttcgaaacgtgttgctcttgacattggtagcccctcaaaattcgatgaaagtttcttcaagaacttacgcgacggaaacgctattctagagtcggaccaacggctttggtcggacgccgagacaaatgccgtggtgaagaagtatgcgagtcgtcttagaggtttgttagggtttaggtttgattatgagtttggtaaagctatgattaagatgagttccattgatgtaaagactgacgttgatggcgaggttaggaaagtttgttccaaggtgaactagtttgaataaagacatatagtatatgtattcggtttctctatgtttcagatttctaatcactgaatgcatgttacgtaattgtcgtctttcaatatttatttttcagttttttatttctctagaaaaaatagtgagtttgttttggatggtaaaacagtatatgctaatctttat

SEQ ID NO: 101971 - protein, 357 aa, Arabidopsis thaliana
  peptide (1)..(357): Ceres Seq. ID no. 13609193
  misc_feature (1)..(357): Homolog of NCBI NO: 7433068 NR Description: probable peroxidase (EC 1.11.1.7), cationic - thaliana >gi|3241946|gb|AAC23733.1| putative peroxidase
  misc_feature (30)..(357): Homolog of NCBI NO: 30688665 NR Description: peroxidase, putative [Arabidopsis thaliana] Peroxidase 25 precursor (Atperox P25) >gi|22655091|gb|AAM98136.1| peroxidase [Arabidopsis thaliana] >gi|30984554|gb|AAP42740.1|
  misc_feature (49)..(357): Homolog of NCBI NO: 7433080 NR Description: probable peroxidase (EC 1.11.1.7) (clone PC36) - (fragment) >gi|1781334|emb|CAA71494.1| peroxidase [Spinacia
  misc_feature (40)..(357): Homolog of NCBI NO: 19698452 NR Description: bacterial-induced gaiacol peroxidase [Gossypium
  misc_feature (40)..(357): Homolog of NCBI NO: 34910234 NR Description: putative peroxidase [Oryza sativa (japonica >gi|15128218|dbj|BAB62546.1| putative peroxidase [Oryza sativa
  misc_feature (40)..(357): Homolog of NCBI NO: 7433065 NR Description: peroxidase (EC 1.11.1.7) precursor, - tomato >gi|1161566|emb|CAA64413.1| peroxidase [Lycopersicon
  misc_feature (31)..(357): Homolog of NCBI NO: 129808 NR Description: Cationic peroxidase 2 precursor (PNPC2)
  misc_feature (37)..(357): Homolog of NCBI NO: 17066703 NR Description: peroxidase [Capsicum annuum]
  misc_feature (34)..(357): Homolog of NCBI NO: 5381255 NR Description: peroxidase [Nicotiana tabacum]
  misc_feature (62)..(339): Homolog of NCBI NO: 6573301 NR Description: peroxidase 4 precursor [Phaseolus vulgaris]
MYVCEYKYKLVLEHHCMLINHTAQIRVRKMGVYLGKYCYIMIIMLVLVLGKEVRSQLLKNGYYSTSCPKAESIVRSTVESHFDSDPTISPGLLRLHFHDCFVQGCDGSVLIKGKSAEQAALPNLGLRGLEVIDDAKARLEAVCPGVVSCADILALAARDSVDLSDGPSWRVPTGRKDGRISLATEASNLPSPLDSVAVQKQKFQDKGLDTHDLVTLLGAHTIGQTDCLFFRYRLYNFTVTGNSDPTISPSFLTQLKTLCPPNGDGSKRVALDIGSPSKFDESFFKNLRDGNAILESDQRLWSDAETNAVVKKYASRLRGLLGFRFDYEFGKAMIKMSSIDVKTDVDGEVRKVCSKVN

SEQ ID NO: 101972 - protein, 341 aa, Arabidopsis thaliana; identical to SEQ ID NO: 36756
  peptide (1)..(341): Ceres Seq. ID no. 13609194
  misc_feature (1)..(341): Homolog of NCBI NO: 7433068 NR Description: probable peroxidase (EC 1.11.1.7), cationic - thaliana >gi|3241946|gb|AAC23733.1| putative peroxidase
  misc_feature (14)..(341): Homolog of NCBI NO: 30688665 NR Description: peroxidase, putative [Arabidopsis thaliana] Peroxidase 25 precursor (Atperox P25) >gi|22655091|gb|AAM98136.1| peroxidase [Arabidopsis thaliana] >gi|30984554|gb|AAP42740.1|
  misc_feature (33)..(341): Homolog of NCBI NO: 7433080 NR Description: probable peroxidase (EC 1.11.1.7) (clone PC36) - (fragment) >gi|1781334|emb|CAA71494.1| peroxidase [Spinacia
  misc_feature (24)..(341): Homolog of NCBI NO: 19698452 NR Description: bacterial-induced gaiacol peroxidase [Gossypium
  misc_feature (24)..(341): Homolog of NCBI NO: 34910234 NR Description: putative peroxidase [Oryza sativa (japonica >gi|15128218|dbj|BAB62546.1| putative peroxidase [Oryza sativa
  misc_feature (24)..(341): Homolog of NCBI NO: 7433065 NR Description: peroxidase (EC 1.11.1.7) precursor, - tomato >gi|1161566|emb|CAA64413.1| peroxidase [Lycopersicon
  misc_feature (15)..(341): Homolog of NCBI NO: 129808 NR Description: Cationic peroxidase 2 precursor (PNPC2)
  misc_feature (21)..(341): Homolog of NCBI NO: 17066703 NR Description: peroxidase [Capsicum annuum]
  misc_feature (18)..(341): Homolog of NCBI NO: 5381255 NR Description: peroxidase [Nicotiana tabacum]
  misc_feature (46)..(323): Homolog of NCBI NO: 6573301 NR Description: peroxidase 4 precursor [Phaseolus vulgaris]

SEQ ID NO: 101973 - protein, 328 aa, Arabidopsis thaliana; identical to SEQ ID NO: 36757
  peptide (1)..(328): Ceres Seq. ID no. 13609195
  misc_feature (1)..(328): Homolog of NCBI NO: 7433068 NR Description: probable peroxidase (EC 1.11.1.7), cationic - thaliana >gi|3241946|gb|AAC23733.1| putative peroxidase
  misc_feature (1)..(328): Homolog of NCBI NO: 30688665 NR Description: peroxidase, putative [Arabidopsis thaliana] Peroxidase 25 precursor (Atperox P25) >gi|22655091|gb|AAM98136.1| peroxidase [Arabidopsis thaliana] >gi|30984554|gb|AAP42740.1|
  misc_feature (20)..(328): Homolog of NCBI NO: 7433080 NR Description: probable peroxidase (EC 1.11.1.7) (clone PC36) - (fragment) >gi|1781334|emb|CAA71494.1| peroxidase [Spinacia
  misc_feature (11)..(328): Homolog of NCBI NO: 19698452 NR Description: bacterial-induced gaiacol peroxidase [Gossypium
  misc_feature (11)..(328): Homolog of NCBI NO: 34910234 NR Description: putative peroxidase [Oryza sativa (japonica >gi|15128218|dbj|BAB62546.1| putative peroxidase [Oryza sativa
  misc_feature (11)..(328): Homolog of NCBI NO: 7433065 NR Description: peroxidase (EC 1.11.1.7) precursor, - tomato >gi|1161566|emb|CAA64413.1| peroxidase [Lycopersicon
  misc_feature (2)..(328): Homolog of NCBI NO: 129808 NR Description: Cationic peroxidase 2 precursor (PNPC2)
  misc_feature (8)..(328): Homolog of NCBI NO: 17066703 NR Description: peroxidase [Capsicum annuum]
  misc_feature (5)..(328): Homolog of NCBI NO: 5381255 NR Description: peroxidase [Nicotiana tabacum]
  misc_feature (33)..(310): Homolog of NCBI NO: 6573301 NR Description: peroxidase 4 precursor [Phaseolus vulgaris]

SEQ ID NO: 101974 - DNA, 820 bp, Arabidopsis thaliana
  misc_feature (1)..(820): Ceres Seq. ID no. 13609215
  misc_feature: MA Experiment ID: 20001807 Result: Up-regulated in Transcription
  misc_feature: MA Experiment 20001807 PARAMETER Experiment Name: At_50mM_NH4NO3_L-to-H_Sub_P Parameter: Timepoint (hr) Value: 6
  misc_feature: MA Experiment 20001807 PARAMETER Experiment Name: At_50mM_NH4NO3_L-to-H_Sub_P Parameter: Tissue Value: Leaf
  misc_feature: MA Experiment 20001807 PARAMETER Experiment Name: At_50mM_NH4NO3_L-to-H_Sub_P Parameter: Treatment Value: 50mM NH4NO3 vs 100mM Mannitol
gatcttttcgaagagcggaagctaaggagaggcgaattcgaatcgagaagatggtgtctgggtcagggatatgttcaaagcgtgtcgttgttgacgcacgtcaccatatgtgtggtcgtcttgcttcgatcatagctaaagagttgctcaatggacagagtgttgttgttgtccgatgtgaggagatttgtttgtctggtggtttggttcgtcagaagatgaagtacatgaggtttcttaggaaacgcatgaacactaaaccttctcatggtcctattcatttccgtgctccgtctaagatcttctggcgtaccgttcgtgggatgattccacacaagaccaagcgtggtgctgctgctcttgcacgtttgaaggtgtttgagggagtaccacctccttatgacaaggtcaagagaatggtcattcctgatgctctcaaggtgttgaggcttcaggctggtcacaagtactgcttgttgggacgtttgtcttctgaagttggctggaaccattacgataccatcaaggagcttgaggtgaagagaaaggagaggtcacaagctttgtatgagcgtaagaagcaactcaccaagctcagggcaaaggccgagaaggttgcagaggagaaacttggatcccagctcgatgttcttgcatcgatcaagtactgaagaaaatcagcatctatcttttggtttaactcttgttttggtttttatctattcagattttgttttcttccttgtatcactgttgaagtttatcacctcatttcagttttatttatcagttgatacttcaatccttagggatgagttct

SEQ ID NO: 101975 - protein, 222 aa, Arabidopsis thaliana
  peptide (1)..(222): Ceres Seq. ID no. 13609216
  misc_feature (27)..(143): Pfam Name: Ribosomal protein L13 Pfam Description: Ribosomal protein L13
  misc_feature (17)..(222): Homolog of NCBI NO: 15230197 NR Description: 60S ribosomal protein L13A (RPL13aB) [Arabidopsis
  misc_feature (17)..(222): Homolog of NCBI NO: 19423912 NR Description: putative 60S ribosomal protein [Arabidopsis
  misc_feature (17)..(222): Homolog of NCBI NO: 15231394 NR Description: 60S ribosomal protein L13A (RPL13aA) [Arabidopsis
  misc_feature (17)..(222): Homolog of NCBI NO: 15235617 NR Description: 60S ribosomal protein L13A (RPL13aC) [Arabidopsis
  misc_feature (17)..(222): Homolog of NCBI NO: 15239698 NR Description: 60S ribosomal protein L13A (RPL13aD) [Arabidopsis
  misc_feature (17)..(222): Homolog of NCBI NO: 21326116 NR Description: putative 60S ribosomal protein [Sorghum bicolor]
  misc_feature (17)..(222): Homolog of NCBI NO: 33146452 NR Description: putative 60S ribosomal protein [Oryza sativa
  misc_feature (17)..(222): Homolog of NCBI NO: 37718812 NR Description: putative ribosomal protein L13a [Oryza sativa
  misc_feature (17)..(222): Homolog of NCBI NO: 3914535 NR Description: 60S RIBOSOMAL PROTEIN L13A
  misc_feature (17)..(175): Homolog of NCBI NO: 34899414 NR Description: putative 60S ribosomal protein [Oryza sativa
SFRRAEAKERRIRIEKMVSGSGICSKRVVVDARHHMCGRLASIIAKELLNGQSVVVVRCEEICLSGGLVRQKMKYMRFLRKRMNTKPSHGPIHFRAPSKIFWRTVRGMIPHKTKRGAAALARLKVFEGVPPPYDKVKRMVIPDALKVLRLQAGHKYCLLGRLSSEVGWNHYDTIKELEVKRKERSQALYERKKQLTKLRAKAEKVAEEKLGSQLDVLASIKY

SEQ ID NO: 101976 - protein, 206 aa, Arabidopsis thaliana [sequence omitted]

SEQ ID NO: 101977 - protein, 187 aa, Arabidopsis thaliana; identical to SEQ ID NO: 37119
  peptide (1)..(187): Ceres Seq. ID no. 13609218
  misc_feature (1)..(108): Pfam Name: Ribosomal protein L13 Pfam Description: Ribosomal protein L13
  misc_feature (1)..(187): Homolog of NCBI NO: 15230197 NR Description: 60S ribosomal protein L13A (RPL13aB) [Arabidopsis
  misc_feature (1)..(187): Homolog of NCBI NO: 19423912 NR Description: putative 60S ribosomal protein [Arabidopsis
  misc_feature (1)..(187): Homolog of NCBI NO: 15231394 NR Description: 60S ribosomal protein L13A (RPL13aA) [Arabidopsis
  misc_feature (1)..(187): Homolog of NCBI NO: 15235617 NR Description: 60S ribosomal protein L13A (RPL13aC) [Arabidopsis
  misc_feature (1)..(187): Homolog of NCBI NO: 15239698 NR Description: 60S ribosomal protein L13A (RPL13aD) [Arabidopsis
  misc_feature (1)..(187): Homolog of NCBI NO: 21326116 NR Description: putative 60S ribosomal protein [Sorghum bicolor]
  misc_feature (1)..(187): Homolog of NCBI NO: 33146452 NR Description: putative 60S ribosomal protein [Oryza sativa
  misc_feature (1)..(187): Homolog of NCBI NO: 37718812 NR Description: putative ribosomal protein L13a [Oryza sativa
  misc_feature (1)..(187): Homolog of NCBI NO: 3914535 NR Description: 60S RIBOSOMAL PROTEIN L13A
  misc_feature (1)..(140): Homolog of NCBI NO: 34899414 NR Description: putative 60S ribosomal protein [Oryza sativa

SEQ ID NO: 101978 - DNA, 674 bp, Arabidopsis thaliana
  misc_feature (1)..(674): Ceres Seq. ID no. 13609223
  misc_feature: MA Experiment ID: 108433 Result: Up-regulated in Transcription
  misc_feature: MA Experiment 108433 PARAMETER Experiment Name: At_rhl_Mutant2_cDNA_P Parameter: Age (day) Value: 7
  misc_feature: MA Experiment 108433 PARAMETER Experiment Name: At_rhl_Mutant2_cDNA_P Parameter: Organism Value: A. thaliana
  misc_feature: MA Experiment 108433 PARAMETER Experiment Name: At_rhl_Mutant2_cDNA_P Parameter: Plant Line Value: rhl Mutant vs. wt landsburg
  misc_feature: MA Experiment 108433 PARAMETER Experiment Name: At_rhl_Mutant2_cDNA_P Parameter: Tissue Value: Roots
  misc_feature: MA Experiment ID: 108434 Result: Down-regulated in Transcription
  misc_feature: MA Experiment 108434 PARAMETER Experiment Name: At_Root_Tips_cDNA_P Parameter: Tissue Value: Root Tips
  misc_feature: MA Experiment ID: 108461 Result: Up-regulated in Transcription
  misc_feature: MA Experiment 108461 PARAMETER Experiment Name: At_Germinating_Seeds_cDNA_P Parameter: Age (day) Value: 1 vs. 0
  misc_feature: MA Experiment 108461 PARAMETER Experiment Name: At_Germinating_Seeds_cDNA_P Parameter: Tissue Value: Germinating Seeds
  misc_feature: MA Experiment ID: 108462 Result: Up-regulated in Transcription
  misc_feature: MA Experiment 108462 PARAMETER Experiment Name: At_Germinating_Seeds_cDNA_P Parameter: Age (day) Value: 2 vs. 0
  misc_feature: MA Experiment 108462 PARAMETER Experiment Name: At_Germinating_Seeds_cDNA_P Parameter: Tissue Value: Germinating Seeds
  misc_feature: MA Experiment ID: 108463 Result: Up-regulated in Transcription
  misc_feature: MA Experiment 108463 PARAMETER Experiment Name: At_Germinating_Seeds_cDNA_P Parameter: Age (day) Value: 3 vs. 0
  misc_feature: MA Experiment 108463 PARAMETER Experiment Name: At_Germinating_Seeds_cDNA_P Parameter: Tissue Value: Germinating Seeds
  misc_feature: MA Experiment ID: 108668 Result: Up-regulated in Transcription
  misc_feature: MA Experiment 108668 PARAMETER Experiment Name: At_2mM_SA_cDNA_P Parameter: Plant Line Value: WS
  misc_feature: MA Experiment 108668 PARAMETER Experiment Name: At_2mM_SA_cDNA_P Parameter: Timepoint (hr) Value: 6
  misc_feature: MA Experiment 108668 PARAMETER Experiment Name: At_2mM_SA_cDNA_P Parameter: Treatment Value: 2mM SA vs. No Treatment
  misc_feature: MA Experiment ID: 20000111 Result: Down-regulated in Transcription
  misc_feature: MA Experiment 20000111 PARAMETER Experiment Name: At_42deg_Heat_cDNA_P Parameter: Temperature (deg C) Value: 42 vs. 22
  misc_feature: MA Experiment 20000111 PARAMETER Experiment Name: At_42deg_Heat_cDNA_P Parameter: Timepoint (hr) Value: 6
  misc_feature: MA Experiment 20000111 PARAMETER Experiment Name: At_42deg_Heat_cDNA_P Parameter: Tissue Value: Aerial
  misc_feature: MA Experiment ID: 20000180 Result: Up-regulated in Transcription
  misc_feature: MA Experiment 20000180 PARAMETER Experiment Name: At_Germinating_Seeds_P Parameter: Age (hr) Value: 24 vs. 0
  misc_feature: MA Experiment 20000180 PARAMETER Experiment Name: At_Germinating_Seeds_P Parameter: Tissue Value: Germinating Seeds
  misc_feature: MA Experiment ID: 20000213 Result: Up-regulated in Transcription
  misc_feature: MA Experiment 20000213 PARAMETER Experiment Name: At_4deg_Cold_P Parameter: Timepoint (hr) Value: 2
  misc_feature: MA Experiment ID: 20000224 Result: Down-regulated in Transcription
  misc_feature: MA Experiment ID: 20000227 Result: Down-regulated in Transcription
  misc_feature: MA Experiment 20000227 PARAMETER Experiment Name: At_Root-Tips-vs-Tops_P Parameter: Tissue Value: Root Tips vs. Root Tops
  misc_feature: MA Experiment ID: 20000234 Result: Down-regulated in Transcription
  misc_feature: MA Experiment 20000234 PARAMETER Experiment Name: At_Siliques_P Parameter: Age (day) Value: 21
  misc_feature: MA Experiment 20000234 PARAMETER Experiment Name: At_Siliques_P Parameter: Organism Value: A. thaliana
  misc_feature: MA Experiment 20000234 PARAMETER Experiment Name: At_Siliques_P Parameter: Plant Line Value: WS
  misc_feature: MA Experiment 20000234 PARAMETER Experiment Name: At_Siliques_P Parameter: Tissue Value: Less Than 5mm Siliques vs. Whole Plant
  misc_feature: MA Experiment ID: 20000235 Result: Down-regulated in Transcription
  misc_feature: MA Experiment 20000235 PARAMETER Experiment Name: At_Siliques_P Parameter: Age (day) Value: 21
  misc_feature: MA Experiment 20000235 PARAMETER Experiment Name: At_Siliques_P Parameter: Organism Value: A. thaliana
  misc_feature: MA Experiment 20000235 PARAMETER Experiment Name: At_Siliques_P Parameter: Plant Line Value: WS
  misc_feature: MA Experiment 20000235 PARAMETER Experiment Name: At_Siliques_P Parameter: Tissue Value: 5-10mm Siliques vs. Whole Plant
  misc_feature: MA Experiment ID: 20000265 Result: Down-regulated in Transcription
  misc_feature: MA Experiment 20000265 PARAMETER Experiment Name: At_Open_Flower_P Parameter: Age (day) Value: 21
  misc_feature: MA Experiment 20000265 PARAMETER Experiment Name: At_Open_Flower_P Parameter: Plant Line Value: WS
  misc_feature: MA Experiment 20000265 PARAMETER Experiment Name: At_Open_Flower_P Parameter: Tissue Value: Closed Flower vs. Whole Plant
  misc_feature: MA Experiment ID: 20000268 Result: Down-regulated in Transcription
  misc_feature: MA Experiment 20000268 PARAMETER Experiment Name: At_100mM_NaCl__P Parameter: Age (day) Value: 14
  misc_feature: MA Experiment 20000268 PARAMETER Experiment Name: At_100mM_NaCl__P Parameter: Organism Value: A. thaliana
  misc_feature: MA Experiment 20000268 PARAMETER Experiment Name: At_100mM_NaCl__P Parameter: Plant Line Value: WS
  misc_feature: MA Experiment 20000268 PARAMETER Experiment Name: At_100mM_NaCl__P Parameter: Timepoint (hr) Value: 6
  misc_feature: MA Experiment 20000268 PARAMETER Experiment Name: At_100mM_NaCl__P Parameter: Tissue Value: Whole Plant
  misc_feature: MA Experiment 20000268 PARAMETER Experiment Name: At_100mM_NaCl__P Parameter: Treatment Value: 100mM NaCl vs. No Treatment
  misc_feature: MA Experiment ID: 20000286 Result: Down-regulated in Transcription
  misc_feature: MA Experiment 20000286 PARAMETER Experiment Name: At_Open_Flower_P Parameter: Age (day) Value: 21
  misc_feature: MA Experiment 20000286 PARAMETER Experiment Name: At_Open_Flower_P Parameter: Plant Line Value: WS
  misc_feature: MA Experiment 20000286 PARAMETER Experiment Name: At_Open_Flower_P Parameter: Tissue Value: Half Open vs. Whole Plant
  misc_feature: MA Experiment ID: 20000436 Result: Down-regulated in Transcription
  misc_feature: MA Experiment 20000436 PARAMETER Experiment Name: At_Drought_P Parameter: Age (day) Value: 7
  misc_feature: MA Experiment 20000436 PARAMETER Experiment Name: At_Drought_P Parameter: Organism Value: A. thaliana
  misc_feature: MA Experiment 20000436 PARAMETER Experiment Name: At_Drought_P Parameter: Plant Line Value: WS
  misc_feature: MA Experiment 20000436 PARAMETER Experiment Name: At_Drought_P Parameter: Timepoint (hr) Value: 12
  misc_feature: MA Experiment 20000436 PARAMETER Experiment Name: At_Drought_P Parameter: Tissue Value: Whole Plant
  misc_feature: MA Experiment 20000436 PARAMETER Experiment Name: At_Drought_P Parameter: Treatment Value: Drought vs. No Drought
  misc_feature: MA Experiment ID: 20000496 Result: Down-regulated in Transcription
  misc_feature: MA Experiment 20000496 PARAMETER Experiment Name: At_Guard_Cells_P Parameter: Harvest Date Value: 7/19/2002
  misc_feature: MA Experiment 20000496 PARAMETER Experiment Name: At_Guard_Cells_P Parameter: Organism Value: Canola
  misc_feature: MA Experiment 20000496 PARAMETER Experiment Name: At_Guard_Cells_P Parameter: Tissue Value: Guard Cells vs. Leaves
  misc_feature: MA Experiment ID: 20000573 Result: Down-regulated in Transcription
  misc_feature: MA Experiment 20000573 PARAMETER Experiment Name: At_100uM_ABA_Mutants__P Parameter: Organism Value: A. thaliana
  misc_feature: MA Experiment 20000573 PARAMETER Experiment Name: At_100uM_ABA_Mutants__P Parameter: Plant Line Value: CS22 vs. Ler wt
  misc_feature: MA Experiment 20000573 PARAMETER Experiment Name: At_100uM_ABA_Mutants__P Parameter: Timepoint (hr) Value: N/A
  misc_feature: MA Experiment 20000573 PARAMETER Experiment Name: At_100uM_ABA_Mutants__P Parameter: Tissue Value: Whole Plant
  misc_feature: MA Experiment 20000573 PARAMETER Experiment Name: At_100uM_ABA_Mutants__P Parameter: Treatment Value: None
  misc_feature: MA Experiment ID: 20000574 Result: Down-regulated in Transcription
  misc_feature: MA Experiment 20000574 PARAMETER Experiment Name: At_100uM_ABA_Mutants__P Parameter: Organism Value: A. thaliana
  misc_feature: MA Experiment 20000574 PARAMETER Experiment Name: At_100uM_ABA_Mutants__P Parameter: Plant Line Value: CS23 vs. Ler wt
  misc_feature: MA Experiment 20000574 PARAMETER Experiment Name: At_100uM_ABA_Mutants__P Parameter: Timepoint (hr) Value: N/A
  misc_feature: MA Experiment 20000574 PARAMETER Experiment Name: At_100uM_ABA_Mutants__P Parameter: Tissue Value: Whole Plant
  misc_feature: MA Experiment 20000574 PARAMETER Experiment Name: At_100uM_ABA_Mutants__P Parameter: Treatment Value: None
  misc_feature: MA Experiment ID: 20001247 Result: Up-regulated in Transcription
  misc_feature: MA Experiment 20001247 PARAMETER Experiment Name: At_Far-red-induction_P Parameter: Age (day) Value: 7
  misc_feature: MA Experiment 20001247 PARAMETER Experiment Name: At_Far-red-induction_P Parameter: Light Value: Far-red vs. White
  misc_feature: MA Experiment 20001247 PARAMETER Experiment Name: At_Far-red-induction_P Parameter: Organism Value: A. thaliana
  misc_feature: MA Experiment 20001247 PARAMETER Experiment Name: At_Far-red-induction_P Parameter: Plant Line Value: Columbia
  misc_feature: MA Experiment 20001247 PARAMETER Experiment Name: At_Far-red-induction_P Parameter: Timepoint (hr) Value: 1
  misc_feature: MA Experiment 20001247 PARAMETER Experiment Name: At_Far-red-induction_P Parameter: Tissue Value: Whole Plant
  misc_feature: MA Experiment ID: 20001451 Result: Up-regulated in Transcription
  misc_feature: MA Experiment 20001451 PARAMETER Experiment Name: At_Far-red-induction_P Parameter: Age (day) Value: 7
  misc_feature: MA Experiment 20001451 PARAMETER Experiment Name: At_Far-red-induction_P Parameter: Light Value: Far-red vs. White
  misc_feature: MA Experiment 20001451 PARAMETER Experiment Name: At_Far-red-induction_P Parameter: Organism Value: A. thaliana
  misc_feature: MA Experiment 20001451 PARAMETER Experiment Name: At_Far-red-induction_P Parameter: Plant Line Value: Columbia
  misc_feature: MA Experiment 20001451 PARAMETER Experiment Name: At_Far-red-induction_P Parameter: Timepoint (hr) Value: 24
  misc_feature: MA Experiment 20001451 PARAMETER Experiment Name: At_Far-red-induction_P Parameter: Tissue Value: Whole Plant
  misc_feature: MA Experiment ID: 20001554 Result: Down-regulated in Transcription
  misc_feature: MA Experiment 20001554 PARAMETER Experiment Name: At_Drought_Soil_Dry_P Parameter: Age (day) Value: 21
  misc_feature: MA Experiment 20001554 PARAMETER Experiment Name: At_Drought_Soil_Dry_P Parameter: Organism Value: A. thaliana
  misc_feature: MA Experiment 20001554 PARAMETER Experiment Name: At_Drought_Soil_Dry_P Parameter: Plant Line Value: WS
  misc_feature: MA Experiment 20001554 PARAMETER Experiment Name: At_Drought_Soil_Dry_P Parameter: Post Timepoint (hr) Value: None
  misc_feature: MA Experiment 20001554 PARAMETER Experiment Name: At_Drought_Soil_Dry_P Parameter: Post-Treatment Value: None
  misc_feature: MA Experiment 20001554 PARAMETER Experiment Name: At_Drought_Soil_Dry_P Parameter: Timepoint (day) Value: 7
  misc_feature: MA Experiment 20001554 PARAMETER Experiment Name: At_Drought_Soil_Dry_P Parameter: Treatment Value: Drought vs. No Drought
  misc_feature: MA Experiment ID: 20001555 Result: Down-regulated in Transcription
  misc_feature: MA Experiment 20001555 PARAMETER Experiment Name: At_Drought_Soil_Dry_P Parameter: Age (day) Value: 24
  misc_feature: MA Experiment 20001555 PARAMETER Experiment Name: At_Drought_Soil_Dry_P Parameter: Organism Value: A. thaliana
  misc_feature: MA Experiment 20001555 PARAMETER Experiment Name: At_Drought_Soil_Dry_P Parameter: Plant Line Value: WS
  misc_feature: MA Experiment 20001555 PARAMETER Experiment Name: At_Drought_Soil_Dry_P Parameter: Post Timepoint (hr) Value: None
  misc_feature: MA Experiment 20001555 PARAMETER Experiment Name: At_Drought_Soil_Dry_P Parameter: Post-Treatment Value: None
  misc_feature: MA Experiment 20001555 PARAMETER Experiment Name: At_Drought_Soil_Dry_P Parameter: Timepoint (day) Value: 10
  misc_feature: MA Experiment 20001555 PARAMETER Experiment Name: At_Drought_Soil_Dry_P Parameter: Treatment Value: Drought vs. No Drought
  misc_feature: MA Experiment ID: 20001556 Result: Down-regulated in Transcription
  misc_feature: MA Experiment 20001556 PARAMETER Experiment Name: At_Drought_Soil_Dry_P Parameter: Age (day) Value: 26
  misc_feature: MA Experiment 20001556 PARAMETER Experiment Name: At_Drought_Soil_Dry_P Parameter: Organism Value: A. thaliana
  misc_feature: MA Experiment 20001556 PARAMETER Experiment Name: At_Drought_Soil_Dry_P Parameter: Plant Line Value: WS
  misc_feature: MA Experiment 20001556 PARAMETER Experiment Name: At_Drought_Soil_Dry_P Parameter: Post Timepoint (hr) Value: None
  misc_feature: MA Experiment 20001556 PARAMETER Experiment Name: At_Drought_Soil_Dry_P Parameter: Post-Treatment Value: None
  misc_feature: MA Experiment 20001556 PARAMETER Experiment Name: At_Drought_Soil_Dry_P Parameter: Timepoint (day) Value: 12
  misc_feature: MA Experiment 20001556 PARAMETER Experiment Name: At_Drought_Soil_Dry_P Parameter: Treatment Value: Drought vs. No Drought
  misc_feature: MA Experiment ID: 20001559 Result: Down-regulated in Transcription
  misc_feature: MA Experiment 20001559 PARAMETER Experiment Name: At_Drought_Soil_Dry_P Parameter: Age (day) Value: 28
  misc_feature: MA Experiment 20001559 PARAMETER Experiment Name: At_Drought_Soil_Dry_P Parameter: Organism Value: A. thaliana
  misc_feature: MA Experiment 20001559 PARAMETER Experiment Name: At_Drought_Soil_Dry_P Parameter: Plant Line Value: WS
  misc_feature: MA Experiment 20001559 PARAMETER Experiment Name: At_Drought_Soil_Dry_P Parameter: Post Timepoint (hr) Value: 29
  misc_feature: MA Experiment 20001559 PARAMETER Experiment Name: At_Drought_Soil_Dry_P Parameter: Post-Treatment Value: Re-Water vs. No Drought
  misc_feature: MA Experiment 20001559 PARAMETER Experiment Name: At_Drought_Soil_Dry_P Parameter: Timepoint (day) Value: 14
  misc_feature: MA Experiment 20001559 PARAMETER Experiment Name: At_Drought_Soil_Dry_P Parameter: Treatment Value: Drought vs. No Drought
  misc_feature: MA Experiment ID: 20001904 Result: Down-regulated in Transcription
  misc_feature: MA Experiment 20001904 PARAMETER Experiment Name: At_Drought_Reproduction_P Parameter: Age (day) Value: 37
  misc_feature: MA Experiment 20001904 PARAMETER Experiment Name: At_Drought_Reproduction_P Parameter: Organism Value: A. thaliana
  misc_feature: MA Experiment 20001904 PARAMETER Experiment Name: At_Drought_Reproduction_P Parameter: Plant Line Value: WS
  misc_feature: MA Experiment 20001904 PARAMETER Experiment Name: At_Drought_Reproduction_P Parameter: Timepoint (day) Value: 7
  misc_feature: MA Experiment 20001904 PARAMETER Experiment Name: At_Drought_Reproduction_P Parameter: Tissue Value: Rosettes
  misc_feature: MA Experiment 20001904 PARAMETER Experiment Name: At_Drought_Reproduction_P Parameter: Treatment Value: Drought vs. No Drought
  misc_feature: MA Experiment ID: 20001907 Result: Down-regulated in Transcription
  misc_feature: MA Experiment 20001907 PARAMETER Experiment Name: At_Drought_Reproduction_P Parameter: Age (day) Value: 37
  misc_feature: MA Experiment 20001907 PARAMETER Experiment Name: At_Drought_Reproduction_P Parameter: Organism Value: A. thaliana
  misc_feature: MA Experiment 20001907 PARAMETER Experiment Name: At_Drought_Reproduction_P Parameter: Plant Line Value: WS
  misc_feature: MA Experiment 20001907 PARAMETER Experiment Name: At_Drought_Reproduction_P Parameter: Timepoint (day) Value: 7
  misc_feature: MA Experiment 20001907 PARAMETER Experiment Name: At_Drought_Reproduction_P Parameter: Tissue Value: Siliques
  misc_feature: MA Experiment 20001907 PARAMETER Experiment Name: At_Drought_Reproduction_P Parameter: Treatment Value: Drought vs. No Drought
attcatctccaaactttcaaaaaaaaacctaaaacaaaaaaaatctctttccttcttctttctccatcaatggcgtcaacaaaaccaaccgatcaaatcaaacaactcaaagatatcttcgctcgtttcgacatggacaaggacggaagcttaacgcagctagaactcgccgctcttctgcgttctctcggaatcaaacctcgcagcgatcaaatctctcttctgttgaaccaaatcgaccgtaacggtaacggatccgtagagttcgacgagctggtcgtggcgatattgccggatataaacgaagaggttttgataaatcaagaacagttgatggaggttttccgttcgtttgatcgtgacggaaacggttcaataacggcggcggaacttgctgggtcaatggctaaaatgggacatccgttgacttaccgtgaattaacggaaatgatgacggaagctgattctaacggtgacggtgttattagttttaatgagttttctcatattatggctaaatcggctgctgattttcttggattaaccgcttcttgatctgttttgttttaattactctctttttttcttctcctgtcaatgcaacttgtgcaatttaacaatgtgctaatcttcattaatttatttatgactcgtttggtgtgacgtaaaaattt

SEQ ID NO: 101979 - protein, 184 aa, Arabidopsis thaliana
  peptide (1)..(184): Ceres Seq. ID no. 13609224
  misc_feature (146)..(174): Pfam Name: EF hand Pfam Description: EF hand
  misc_feature (24)..(184): Homolog of NCBI NO: 15230858 NR Description: calmodulin, putative [Arabidopsis thaliana]
  misc_feature (24)..(184): Homolog of NCBI NO: 28393082 NR Description: putative calmodulin [Arabidopsis thaliana]
  misc_feature (31)..(181): Homolog of NCBI NO: 15221797 NR Description: calmodulin, putative [Arabidopsis thaliana]
  misc_feature (31)..(183): Homolog of NCBI NO: 34912426 NR Description: P0681B11.17 [Oryza sativa (japonica
  misc_feature (31)..(177): Homolog of NCBI NO: 15228441 NR Description: calmodulin, putative [Arabidopsis thaliana] putative calmodulin [Arabidopsis thaliana]
  misc_feature (31)..(177): Homolog of NCBI NO: 13359053 NR Description: P0436D06.14 [Oryza sativa (japonica
  misc_feature (20)..(177): Homolog of NCBI NO: 15222618 NR Description: calmodulin, putative [Arabidopsis thaliana]
  misc_feature (24)..(171): Homolog of NCBI NO: 3800847 NR Description: VU91B calmodulin [synthetic construct]
  misc_feature (24)..(171): Homolog of NCBI NO: 1345661 NR Description: Calmodulin >gi|71678|pir||MCPP calmodulin - tetraurelia >gi|159994|gb|AAA29443.1| calmodulin
  misc_feature (24)..(171): Homolog of NCBI NO: 13386230 NR Description: RIKEN cDNA 2310068O22 [Mus musculus]
IHLQTFKKKPKTKKISFLLLSPSMASTKPTDQIKQLKDIFARFDMDKDGSLTQLELAALLRSLGIKPRSDQISLLLNQIDRNGNGSVEFDELVVAILPDINEEVLINQEQLMEVFRSFDRDGNGSITAAELAGSMAKMGHPLTYRELTEMMTEADSNGDGVISFNEFSHIMAKSAADFLGLTAS

SEQ ID NO: 101980 - protein, 161 aa, Arabidopsis thaliana; identical to SEQ ID NO: 78739
  peptide (1)..(161): Ceres Seq. ID no. 13609225
  misc_feature (123)..(151): Pfam Name: EF hand Pfam Description: EF hand
  misc_feature (1)..(161): Homolog of NCBI NO: 15230858 NR Description: calmodulin, putative [Arabidopsis thaliana]
  misc_feature (1)..(161): Homolog of NCBI NO: 28393082 NR Description: putative calmodulin [Arabidopsis thaliana]
  misc_feature (8)..(158): Homolog of NCBI NO: 15221797 NR Description: calmodulin, putative [Arabidopsis thaliana]
  misc_feature (8)..(160): Homolog of NCBI NO: 34912426 NR Description: P0681B11.17 [Oryza sativa (japonica
  misc_feature (8)..(154): Homolog of NCBI NO: 15228441 NR Description: calmodulin, putative [Arabidopsis thaliana] putative calmodulin [Arabidopsis thaliana]
  misc_feature (8)..(154): Homolog of NCBI NO: 13359053 NR Description: P0436D06.14 [Oryza sativa (japonica
  misc_feature (1)..(154): Homolog of NCBI NO: 15222618 NR Description: calmodulin, putative [Arabidopsis thaliana]
  misc_feature (1)..(148): Homolog of NCBI NO: 3800847 NR Description: VU91B calmodulin [synthetic construct]
  misc_feature (1)..(148): Homolog of NCBI NO: 1345661 NR Description: Calmodulin >gi|71678|pir||MCPP calmodulin - tetraurelia >gi|159994|gb|AAA29443.1| calmodulin
  misc_feature (1)..(148): Homolog of NCBI NO: 13386230 NR Description: RIKEN cDNA 2310068O22 [Mus musculus]

SEQ ID NO: 101981 - protein, 140 aa, Arabidopsis thaliana; identical to SEQ ID NO: 78740
  peptide (1)..(140): Ceres Seq. ID no. 13609226
  misc_feature (102)..(130): Pfam Name: EF hand Pfam Description: EF hand
  misc_feature (1)..(140): Homolog of NCBI NO: 15230858 NR Description: calmodulin, putative [Arabidopsis thaliana]
  misc_feature (1)..(140): Homolog of NCBI NO: 28393082 NR Description: putative calmodulin [Arabidopsis thaliana]
  misc_feature (1)..(137): Homolog of NCBI NO: 15221797 NR Description: calmodulin, putative [Arabidopsis thaliana]
  misc_feature (1)..(139): Homolog of NCBI NO: 34912426 NR Description: P0681B11.17 [Oryza sativa (japonica
  misc_feature (1)..(133): Homolog of NCBI NO: 15228441 NR Description: calmodulin, putative [Arabidopsis thaliana] putative calmodulin [Arabidopsis thaliana]
  misc_feature (1)..(133): Homolog of NCBI NO: 13359053 NR Description: P0436D06.14 [Oryza sativa (japonica
  misc_feature (1)..(133): Homolog of NCBI NO: 15222618 NR Description: calmodulin, putative [Arabidopsis thaliana]
  misc_feature (1)..(127): Homolog of NCBI NO: 3800847 NR Description: VU91B calmodulin [synthetic construct]
  misc_feature (1)..(127): Homolog of NCBI NO: 1345661 NR Description: Calmodulin >gi|71678|pir||MCPP calmodulin - tetraurelia >gi|159994|gb|AAA29443.1| calmodulin
  misc_feature (1)..(127): Homolog of NCBI NO: 13386230 NR Description: RIKEN cDNA 2310068O22 [Mus musculus]

SEQ ID NO: 101982 - DNA, 1685 bp, Arabidopsis thaliana
  misc_feature (1)..(1685): Ceres Seq. ID no. 13609227
  misc_feature: MA Experiment ID: 20000314 Result: Up-regulated in Transcription
  misc_feature: MA Experiment 20000314 PARAMETER Experiment Name: At_14day_Shoots-Roots_Sub_P Parameter: Age (day) Value: 14
  misc_feature: MA Experiment 20000314 PARAMETER Experiment Name: At_14day_Shoots-Roots_Sub_P Parameter: Organism Value: A. thaliana
  misc_feature: MA Experiment 20000314 PARAMETER Experiment Name: At_14day_Shoots-Roots_Sub_P Parameter: Plant Line Value: WS
  misc_feature: MA Experiment 20000314 PARAMETER Experiment Name: At_14day_Shoots-Roots_Sub_P Parameter: Tissue Value: Roots vs. Whole Plant
actccattccactctcgtcccgcttcgcctcttttagggcgcaaccaagagacagagaagaagagagagactcgtaagcaacaataaccaatagctctctctctctctctctctctctcctctgctgattcttcgctgactcttgcctcctcgacgtcgtcttcggctttgtagcatctcgccgaagcgtcgttgatttgagagagacccaatttggattgttagaaaatgggttacataggagctcatggtgtagctgctcttaagaaacacaaatacagtggtgttgatcactcttatcttgccaaatatgttctccaacctttttggaaccgttttgtcaaaatcttccctctatggatgccccccaacatgataacacttatggggttcatgtttcttctcacatctgctctcttaggctatatatactcacctaagttggattctccacctcctcgatgggtccactttgcacacggcttacttctgtttttatatcagacatttgatgcggttgatgggaagcaagcacgaagaacaaattcatctagcccactaggagagctttttgaccatggttgcgatgcacttggctgtgcgttagaaacaatggcatatgggagtactgctatgtgtggaagagatactttctggttttgggttatttctgctgttccattttttggagcaacatgggaacactattttaccaatacgcttactcttccggtagtcaatggtcctacagaaggtcttgcacttatatactgtggccatttcttcacagccattgttggtgcggagtggtgggctcagccgtttgggaagtcgattcctttgtttagttgggttccgtttttgaacgagatgcaaatgtccagaataatactattctccatgattttctttgctgttataccaacccttgcaatcaacacgtctaatgtttacaaagttgtacattcaagaaatggaagcatgcttctagcattagctatgctatatcccttagtcacgttaattgcaggagttctgatttgggattacttgtctccaattgatctcataagaaactaccctcacttagttgtgttgggaactggtcttgcatttggattccttgtgggaagaatgattctagctcacttatgtgacgaaccaaaaggattgaaaacaaacatgtgtatgtcactgctttaccttccatttgcactagcaaatgctctaaccgctagactcaacgacggggttcctcttgtggatgagttttgggttcttcttggatattgtatattcacattgtcactatatgcgcattttgcaacttcagtcattcatgagatcacaactgcacttggaatctactgcttcaggattactcggaaagaagcttgaagaaacaaaatgtgattgaaatttttatttataagaaaaagcaaatcttaagggagaaaaaaaatgcaaatcccaacacgaatctgaatattttgttacttggaattaaaaatgattgactgatatgcttttggatgtatactcattaatgtttttgttttagtgttttttttcttgttcggttgaaatagggtaattcatgtagaacctttttgtgtaacgtttctaagaaaaaaaaatatgggattgttctagatttttttttttaatttaaacctcgttattga

SEQ ID NO: 101983 - protein, 389 aa, Arabidopsis thaliana; identical to SEQ ID NO: 44528
  peptide (1)..(389): Ceres Seq. ID no. 13609228
  misc_feature (86)..(231): Pfam Name: CDP-alcohol phosphatidyltransferase Pfam Description: CDP-alcohol phosphatidyltransferase
  misc_feature (1)..(389): Homolog of NCBI NO: 15229490 NR Description: aminoalcoholphosphotransferase, putative thaliana] >gi|30695829|ref|NP_850744.1| putative [Arabidopsis thaliana] >gi|3661595|gb|AAC61769.1|
  misc_feature (1)..(389): Homolog of NCBI NO: 7488522 NR Description: ethanolaminephosphotransferase homolog - turnip
  misc_feature (1)..(389): Homolog of NCBI NO: 15222885 NR Description: aminoalcoholphosphotransferase [Arabidopsis
  misc_feature (1)..(387): Homolog of NCBI NO: 30313359 NR Description: aminoalcoholphosphotransferase [Brassica rapa
  misc_feature (1)..(389): Homolog of NCBI NO: 5917787 NR Description: aminoalcoholphosphotransferase [Brassica rapa]
  misc_feature (1)..(389): Homolog of NCBI NO: 3927806 NR Description: aminoalcoholphosphotransferase [Pimpinella
  misc_feature (1)..(389): Homolog of NCBI NO: 7488701 NR Description: probable ethanolaminephosphotransferase (EC - soybean >gi|530088|gb|AAA67719.1|
  misc_feature (1)..(328): Homolog of NCBI NO: 18390098 NR Description: aminoalcoholphosphotransferase [Sorghum bicolor]
  misc_feature (1)..(389): Homolog of NCBI NO: 27762264 NR Description: aminoalcoholphosphotransferase [Brassica napus]
  misc_feature (12)..(387): Homolog of NCBI NO: 2425056 NR Description: LipB [Dictyostelium discoideum]

SEQ ID NO: 101984 - protein, 345 aa, Arabidopsis thaliana; identical to SEQ ID NO: 44529
  peptide (1)..(345): Ceres Seq. ID no. 13609229
  misc_feature (42)..(187): Pfam Name: CDP-alcohol phosphatidyltransferase Pfam Description: CDP-alcohol phosphatidyltransferase
  misc_feature (1)..(345): Homolog of NCBI NO: 15229490 NR Description: aminoalcoholphosphotransferase, putative thaliana] >gi|30695829|ref|NP_850744.1| putative [Arabidopsis thaliana] >gi|3661595|gb|AAC61769.1|
  misc_feature (1)..(345): Homolog of NCBI NO: 7488522 NR Description: ethanolaminephosphotransferase homolog - turnip
  misc_feature (1)..(345): Homolog of NCBI NO: 15222885 NR Description: aminoalcoholphosphotransferase [Arabidopsis
  misc_feature (1)..(343): Homolog of NCBI NO: 30313359 NR Description: aminoalcoholphosphotransferase [Brassica rapa
  misc_feature (1)..(345): Homolog of NCBI NO: 5917787 NR Description: aminoalcoholphosphotransferase [Brassica rapa]
  misc_feature (1)..(345): Homolog of NCBI NO: 3927806 NR Description: aminoalcoholphosphotransferase [Pimpinella
  misc_feature (1)..(345): Homolog of NCBI NO: 7488701 NR Description: probable ethanolaminephosphotransferase (EC - soybean >gi|530088|gb|AAA67719.1|
  misc_feature (1)..(284): Homolog of NCBI NO: 18390098 NR Description: aminoalcoholphosphotransferase [Sorghum bicolor]
  misc_feature (1)..(345): Homolog of NCBI NO: 27762264 NR Description: aminoalcoholphosphotransferase [Brassica napus]
  misc_feature (1)..(343): Homolog of NCBI NO: 2425056 NR Description: LipB [Dictyostelium discoideum]

SEQ ID NO: 101985 - protein, 341 aa, Arabidopsis thaliana; identical to SEQ ID NO: 44530
  peptide (1)..(341): Ceres Seq. ID no. 13609230
  misc_feature (38)..(183): Pfam Name: CDP-alcohol phosphatidyltransferase Pfam Description: CDP-alcohol phosphatidyltransferase
  misc_feature (1)..(341): Homolog of NCBI NO: 15229490 NR Description: aminoalcoholphosphotransferase, putative thaliana] >gi|30695829|ref|NP_850744.1| putative [Arabidopsis thaliana] >gi|3661595|gb|AAC61769.1|
  misc_feature (1)..(341): Homolog of NCBI NO: 7488522 NR Description: ethanolaminephosphotransferase homolog - turnip
  misc_feature (1)..(341): Homolog of NCBI NO: 15222885 NR Description: aminoalcoholphosphotransferase [Arabidopsis
  misc_feature (1)..(339): Homolog of NCBI NO: 30313359 NR Description: aminoalcoholphosphotransferase [Brassica rapa
  misc_feature (1)..(341): Homolog of NCBI NO: 5917787 NR Description: aminoalcoholphosphotransferase [Brassica rapa]
  misc_feature (1)..(341): Homolog of NCBI NO: 3927806 NR Description: aminoalcoholphosphotransferase [Pimpinella
  misc_feature (1)..(341): Homolog of NCBI NO: 7488701 NR Description: probable ethanolaminephosphotransferase (EC - soybean >gi|530088|gb|AAA67719.1|
  misc_feature (1)..(280): Homolog of NCBI NO: 18390098 NR Description: aminoalcoholphosphotransferase [Sorghum bicolor]
  misc_feature (1)..(341): Homolog of NCBI NO: 27762264 NR Description: aminoalcoholphosphotransferase [Brassica napus]
  misc_feature (1)..(339): Homolog of NCBI NO: 2425056 NR Description: LipB [Dictyostelium discoideum]

SEQ ID NO: 101986 - DNA, 1950 bp, Arabidopsis thaliana
  misc_feature (1)..(1950): Ceres Seq. ID no. 13609231
  misc_feature: MA Experiment ID: 108569 Result: Up-regulated in Transcription
  misc_feature: MA Experiment 108569 PARAMETER Experiment Name: At_0.001%_MeJA__cDNA_P Parameter: Timepoint (hr) Value: 6
  misc_feature: MA Experiment 108569 PARAMETER Experiment Name: At_0.001%_MeJA__cDNA_P Parameter: Tissue Value: Aerial
  misc_feature: MA Experiment 108569 PARAMETER Experiment Name: At_0.001%_MeJA__cDNA_P Parameter: Treatment Value: 0.001% MeJA vs. No Treatment
  misc_feature: MA Experiment ID: 108573 Result: Up-regulated in Transcription
  misc_feature: MA Experiment 108573 PARAMETER Experiment Name: At_Drought_cDNA_P Parameter: Timepoint (hr) Value: 6
  misc_feature: MA Experiment 108573 PARAMETER Experiment Name: At_Drought_cDNA_P Parameter: Tissue Value: Aerial
  misc_feature: MA Experiment 108573 PARAMETER Experiment Name: At_Drought_cDNA_P Parameter: Treatment Value: Drought vs. No Drought
  misc_feature: MA Experiment ID: 20000224 Result: Down-regulated in Transcription
  misc_feature: MA Experiment ID: 20001905 Result: Up-regulated in Transcription
  misc_feature: MA Experiment 20001905 PARAMETER Experiment Name: At_Drought_Reproduction_P Parameter: Age (day) Value: 40
  misc_feature: MA Experiment 20001905 PARAMETER Experiment Name: At_Drought_Reproduction_P Parameter: Organism Value: A. thaliana
  misc_feature: MA Experiment 20001905 PARAMETER Experiment Name: At_Drought_Reproduction_P Parameter: Plant Line Value: WS
  misc_feature: MA Experiment 20001905 PARAMETER Experiment Name: At_Drought_Reproduction_P Parameter: Timepoint (day) Value: 10
  misc_feature: MA Experiment 20001905 PARAMETER Experiment Name: At_Drought_Reproduction_P Parameter: Tissue Value: Rosettes
  misc_feature: MA Experiment 20001905 PARAMETER Experiment Name: At_Drought_Reproduction_P Parameter: Treatment Value: Drought vs. No Drought
ttgaggagaaaattgagccgtgtttgtgttgagatgtctatgatcgatgagccgttgtacccaatcgccgtacttatagacgagttaaaaaacgatgatattcagctaagattgaattccatcagaaggctttctacgatcgctcgtgctcttggggaagagaggactagaaaggaattgatccctttccttagcgaaaacaatgacgatgatgatgaggttttattagcaatggctgaagaattgggtgtgtttattccttatgttggtggtgttgagtatgcacatgttcttcttccacctttggaaactctttcgactgtcgaagaaacttgtgttagggagaaagctgttgagtcgctttgtagagttggctctcagatgagggagagtgacttggttgatcatttcatttcgttagttaagcgacttgccgctggtgagtggttcacagctagagtatcggcttgcggtgttttccatattgcatacccgagcgcgccggatatgttgaagactgagttaagatcgttgtatactcagctttgtcaggatgatatgccgatggtaaggagagctgcagcaactaatcttgggaaatttgctgctacggttgaatcagcgcatttgaagaccgacgttatgtccatgtttgaggatcttactcaagatgatcaagattctgttagattattggccgttgagggttgtgctgctcttgggaaattgttggagcctcaggattgtgtccaacacattcttcccgtgattgttaatttctcgcaggataagtcttggcgtgtgcgctatatggttgcaaatcaactctacgagctttgtgaagccgtgggacctgagcctactaggacggagctggtgcctgcatatgtgcgcctacttcgtgataatgaagctgaagtacgcatagcagctgccggaaaagttacaaagttttgtcggattctaaaccctgaaattgctatccagcacattctcccctgtgtgaaggagctatcatcagactcttctcagcatgtcagatctgcattggcctcagttataatgggaatggctccagtcttgggtaaggatgcaacaattgagcatctccttccaatctttctttctctattgaaagatgagttcccggatgtacgcttgaacattatcagcaaacttgaccaagtgaatcaggttattgggattgatctactatcacaatccttgttgccagctattgtagaacttgctgaagatagacactggagagtaagacttgctataatcgagtatatccctttgttggcaagtcagttaggtgttggcttctttgacgataagcttggtgctctttgcatgcaatggttacaagacaaggttcactcaatccgcgatgctgctgctaacaatctcaagcggcttgctgaggaatttggtcctgaatgggcaatgcaacatatagttcctcaggttcttgagatggttaacaaccctcactatctctaccgaatgaccattttgcgtgcggtgtctcttcttgcacctgtaatgggctcagagattacatgctctaagctcttacctgtagtaatgactgcatctaaagacagagttccaaacatcaaattcaacgtcgctaaagtacttcaatccctcattccaatagttgatcaatcggttgtggagaagacgattcgtcctgggcttgtggagctaagcgaggatccagatgttgatgtcaggtttttcgcaaaccaagctctacaatctattgacaatgtgatgatgtctagctaaaaccattagatcttgtctctctgcttataatcgttttctatttgattgaaaaaaaaaacaaatctcaagacttttgtaacgtagtagtggattctcgtcttgtgttttttattacacgcaaactactagagtgcctcggtacgggttttgtcc

SEQ ID NO: 101987 - protein, 598 aa, Arabidopsis thaliana
  peptide (1)..(598): Ceres Seq. ID no. 13609232
  misc_feature (245)..(283): Pfam Name: HEAT repeat Pfam Description: HEAT repeat
  misc_feature (12)..(598): Homolog of NCBI NO: 15230896 NR Description: serine/threonine protein phosphatase 2A, 65 KDa subunit A [Arabidopsis thaliana] >gi|7939566|dbj|BAA95767.1| phosphotase 2a 65kd regulatory subunit [Arabidopsis regulatory
  misc_feature (12)..(598): Homolog of NCBI NO: 1076389 NR Description: phosphoprotein phosphatase 2A 65K regulatory
  misc_feature (12)..(598): Homolog of NCBI NO: 22329534 NR Description: serine/threonine protein phosphatase 2A subunit, putative [Arabidopsis thaliana] protein phosphatase 2A regulatory subunit, putative [Arabidopsis
  misc_feature (12)..(598): Homolog of NCBI NO: 25313492 NR Description: probable protein phosphotase 2a 65K chain - thaliana >gi|9958062|gb|AAG09551.1|AC011810_10 Putative protein
  misc_feature (14)..(598): Homolog of NCBI NO: 11094365 NR Description: Ser/Thr specific protein phosphatase 2A A
  misc_feature (12)..(597): Homolog of NCBI NO: 7447393 NR Description: phosphoprotein phosphatase (EC 3.1.3.16) 2A
  misc_feature (12)..(598): Homolog of NCBI NO: 5679684 NR Description: phosphatase 2A regulatory A subunit [Oryza >gi|5679686|emb|CAB51804.1| protein phosphatase 2A A subunit
  misc_feature (12)..(598): Homolog of NCBI NO: 11094367 NR Description: Ser/Thr specific protein phosphatase 2A A
  misc_feature (12)..(592): Homolog of NCBI NO: 15222601 NR Description: serine/threonine protein phosphatase 2A, 65 KDa subunit A [Arabidopsis thaliana] >gi|25313494|pir||B86385
  misc_feature (12)..(592): Homolog of NCBI NO: 1254996 NR Description: serine/threonine protein phosphatase type 2A
LRRKLSRVCVEMSMIDEPLYPIAVLIDELKNDDIQLRLNSIRRLSTIARALGEERTRKELIPFLSENNDDDDEVLLAMAEELGVFIPYVGGVEYAHVLLPPLETLSTVEETCVREKAVESLCRVGSQMRESDLVDHFISLVKRLAAGEWFTARVSACGVFHIAYPSAPDMLKTELRSLYTQLCQDDMPMVRRAAATNLGKFAATVESAHLKTDVMSMFEDLTQDDQDSVRLLAVEGCAALGKLLEPQDCVQHILPVIVNFSQDKSWRVRYMVANQLYELCEAVGPEPTRTELVPAYVRLLRDNEAEVRIAAAGKVTKFCRILNPEIAIQHILPCVKELSSDSSQHVRSALASVIMGMAPVLGKDATIEHLLPIFLSLLKDEFPDVRLNIISKLDQVNQVIGIDLLSQSLLPAIVELAEDRHWRVRLAIIEYIPLLASQLGVGFFDDKLGALCMQWLQDKVHSIRDAAANNLKRLAEEFGPEWAMQHIVPQVLEMVNNPHYLYRMTILRAVSLLAPVMGSEITCSKLLPVVMTASKDRVPNIKFNVAKVLQSLIPIVDQSVVEKTIRPGLVELSEDPDVDVRFFANQALQSIDNVMMSS

SEQ ID NO: 101988 - protein, 587 aa, Arabidopsis thaliana; identical to SEQ ID NO: 22173
  peptide (1)..(587): Ceres Seq. ID no. 13609233
  misc_feature (234)..(272): Pfam Name: HEAT repeat Pfam Description: HEAT repeat
  misc_feature (1)..(587): Homolog of NCBI NO: 15230896 NR Description: serine/threonine protein phosphatase 2A, 65 KDa subunit A [Arabidopsis thaliana] >gi|7939566|dbj|BAA95767.1| phosphotase 2a 65kd regulatory subunit [Arabidopsis regulatory
  misc_feature (1)..(587): Homolog of NCBI NO: 1076389 NR Description: phosphoprotein phosphatase 2A 65K regulatory
  misc_feature (1)..(587): Homolog of NCBI NO: 22329534 NR Description: serine/threonine protein phosphatase 2A subunit, putative [Arabidopsis thaliana] protein phosphatase 2A regulatory subunit, putative [Arabidopsis
  misc_feature (1)..(587): Homolog of NCBI NO: 25313492 NR Description: probable protein phosphotase 2a 65K chain - thaliana >gi|9958062|gb|AAG09551.1|AC011810_10 Putative protein
  misc_feature (3)..(587): Homolog of NCBI NO: 11094365 NR Description: Ser/Thr specific protein phosphatase 2A A
  misc_feature (1)..(586): Homolog of NCBI NO: 7447393 NR Description: phosphoprotein phosphatase (EC 3.1.3.16) 2A
  misc_feature (1)..(587): Homolog of NCBI NO: 5679684 NR Description: phosphatase 2A regulatory A subunit [Oryza >gi|5679686|emb|CAB51804.1| protein phosphatase 2A A subunit
  misc_feature (1)..(587): Homolog of NCBI NO: 11094367 NR Description: Ser/Thr specific protein phosphatase 2A A
  misc_feature (1)..(581): Homolog of NCBI NO: 15222601 NR Description: serine/threonine protein phosphatase 2A, 65 KDa subunit A [Arabidopsis thaliana] >gi|25313494|pir||B86385
  misc_feature (1)..(581): Homolog of NCBI NO: 1254996 NR Description: serine/threonine protein phosphatase type 2A

SEQ ID NO: 101989 - protein, 585 aa, Arabidopsis thaliana; identical to SEQ ID NO: 22174
  peptide (1)..(585): Ceres Seq. ID no. 13609234
  misc_feature (232)..(270): Pfam Name: HEAT repeat Pfam Description: HEAT repeat
  misc_feature (1)..(585): Homolog of NCBI NO: 15230896 NR Description: serine/threonine protein phosphatase 2A, 65 KDa subunit A [Arabidopsis thaliana] >gi|7939566|dbj|BAA95767.1| phosphotase 2a 65kd regulatory subunit [Arabidopsis regulatory
  misc_feature (1)..(585): Homolog of NCBI NO: 1076389 NR Description: phosphoprotein phosphatase 2A 65K regulatory
  misc_feature (1)..(585): Homolog of NCBI NO: 22329534 NR Description: serine/threonine protein phosphatase 2A subunit, putative [Arabidopsis thaliana] protein phosphatase 2A regulatory subunit, putative [Arabidopsis
  misc_feature (1)..(585): Homolog of NCBI NO: 25313492 NR Description: probable protein phosphotase 2a 65K chain - thaliana >gi|9958062|gb|AAG09551.1|AC011810_10 Putative protein
  misc_feature (1)..(585): Homolog of NCBI NO: 11094365 NR Description: Ser/Thr specific protein phosphatase 2A A
  misc_feature (1)..(584): Homolog of NCBI NO: 7447393 NR Description: phosphoprotein phosphatase (EC 3.1.3.16) 2A
  misc_feature (1)..(585): Homolog of NCBI NO: 5679684 NR Description: phosphatase 2A regulatory A subunit [Oryza >gi|5679686|emb|CAB51804.1| protein phosphatase 2A A subunit
  misc_feature (1)..(585): Homolog of NCBI NO: 11094367 NR Description: Ser/Thr specific protein phosphatase 2A A
  misc_feature (1)..(579): Homolog of NCBI NO: 15222601 NR Description: serine/threonine protein phosphatase 2A, 65 KDa subunit A [Arabidopsis thaliana] >gi|25313494|pir||B86385
  misc_feature (1)..(579): Homolog of NCBI NO: 1254996 NR Description: serine/threonine protein phosphatase type 2A

SEQ ID NO: 101990 - DNA, 1216 bp, Arabidopsis thaliana
  misc_feature (1)..(1216): Ceres Seq. ID no. 13609235
  misc_feature: MA Experiment ID: 108434 Result: Up-regulated in Transcription
  misc_feature: MA Experiment 108434 PARAMETER Experiment Name: At_Root_Tips_cDNA_P Parameter: Tissue Value: Root Tips
  misc_feature: MA Experiment ID: 108576 Result: Down-regulated in Transcription
  misc_feature: MA Experiment 108576 PARAMETER Experiment Name: At_42deg_Heat_cDNA_P Parameter: Temperature (deg C) Value: 42 vs. 22
  misc_feature: MA Experiment 108576 PARAMETER Experiment Name: At_42deg_Heat_cDNA_P Parameter: Timepoint (hr) Value: 1
  misc_feature: MA Experiment 108576 PARAMETER Experiment Name: At_42deg_Heat_cDNA_P Parameter: Tissue Value: Aerial
  misc_feature: MA Experiment ID: 108577 Result: Down-regulated in Transcription
  misc_feature: MA Experiment 108577 PARAMETER Experiment Name: At_42deg_Heat_cDNA_P Parameter: Temperature (deg C) Value: 42 vs. 22
  misc_feature: MA Experiment 108577 PARAMETER Experiment Name: At_42deg_Heat_cDNA_P Parameter: Timepoint (hr) Value: 6
  misc_feature: MA Experiment 108577 PARAMETER Experiment Name: At_42deg_Heat_cDNA_P Parameter: Tissue Value: Aerial
tcatttcattgattacttgaaggatgatgtccgaattgttcgagacatacctgactggttcactgacaaagcagagctattctctagtataagaagaacagtcaaaaacattcccaaatatgcagcagcccaattttatattgacaatgttttacctcggataaaggagaagaagataatggccttgaagccttttgtcgatcgacttgggtatgacaatgtacctcaagaaatcaacagattacgatgccgtgtaaattatcatgctctcaaatttcttccagagatagagcagatggctgattcacttgtttctagaatgagaaatcgcactggaaatccaaatccatatatggctcttcatcttagattcgagaaaggaatggttggtctatcgttctgtgattttgtggggacaagggaagagaaagttaaaatggcagaatacagacaaaaggaatggcctcggcgtttcaagaatggttcccatctctggcagctcgccttgcagaagcgcaaagaaggtcgatgccctcttgagccaggagaagttgctgtgatcctacgtgcaatgggctatccaaaagaaacacaaatctatgttgcatctggtcaagtctatggcggtcaaaaccgtatggctccactaagaaacatgttcccaaatttggtaacaaaggaggatttagcaggcaaagaggaactaacaacgtttagaaaacacgttacaagtcttgcggctctagatttcttggtgtgcttgaaatcagatgtatttgtgatgacacacggtggaaactttgcaaaactgatcatcggagcgcgtagatatatggggcatcgccagaaatcaatcaaaccggataaagggttgatgtcgaaatcatttggggatccttacatgggatgggcaacttttgtggaagatgtagttgtaacccatcaaacacgaaccggtttacctgaagaaactttccctaactatgatctttgggaaaatcctctcactccatgcatgtgtaaagcttgatgatgatgcttttgtttggtcttggattttgtctgatgaggagcaacaaactatagagattcgtagttttcttcttcttcttcttcttttttgacctttcaaatctttgaagtcttcatttaccatctttgtaatcattttgatattatgtaaagttcctagtgatgaaaaaaaagtttctttttt

SEQ ID NO: 101991 - protein, 342 aa, Arabidopsis thaliana; identical to SEQ ID NO: 23731
  peptide (1)..(342): Ceres Seq. ID no. 13609236
  misc_feature (1)..(306): Pfam Name: Plant protein family Pfam Description: Plant protein family
  misc_feature (1)..(342): Homolog of NCBI NO: 9294295 NR Description: contains similarity to the auxin-independent
  misc_feature (1)..(342): Homolog of NCBI NO: 21618319 NR Description: unknown [Arabidopsis thaliana]
  misc_feature (60)..(342): Homolog of NCBI NO: 18404918 NR Description: expressed protein [Arabidopsis thaliana]
  misc_feature (2)..(341): Homolog of NCBI NO: 15226282 NR Description: axi 1 protein from Nicotiana tabacum -related thaliana] >gi|25410909|pir||C84425 similar to axi 1 protein from
  misc_feature (90)..(342): Homolog of NCBI NO: 15144512 NR Description: putative auxin growth promotor protein
  misc_feature (1)..(123): Homolog of NCBI NO: 15144512 NR Description: putative auxin growth promotor protein
  misc_feature (88)..(341): Homolog of NCBI NO: 15233855 NR Description: PsRT17-1 like protein [Arabidopsis thaliana]
  misc_feature (1)..(109): Homolog of NCBI NO: 15233855 NR Description: PsRT17-1 like protein [Arabidopsis thaliana]
  misc_feature (88)..(341): Homolog of NCBI NO: 31711716 NR Description: At4g24530 [Arabidopsis thaliana]
  misc_feature (1)..(109): Homolog of NCBI NO: 31711716 NR Description: At4g24530 [Arabidopsis thaliana]

SEQ ID NO: 101992 - protein, 283 aa, Arabidopsis thaliana; identical to SEQ ID NO: 23732
  peptide (1)..(283): Ceres Seq. ID no. 13609237
  misc_feature (1)..(247): Pfam Name: Plant protein family Pfam Description: Plant protein family
  misc_feature (1)..(283): Homolog of NCBI NO: 9294295 NR Description: contains similarity to the auxin-independent
  misc_feature (1)..(283): Homolog of NCBI NO: 21618319 NR Description: unknown [Arabidopsis thaliana]
  misc_feature (1)..(283): Homolog of NCBI NO: 18404918 NR Description: expressed protein [Arabidopsis thaliana]
  misc_feature (1)..(282): Homolog of NCBI NO: 15226282 NR Description: axi 1 protein from Nicotiana tabacum -related thaliana] >gi|25410909|pir||C84425 similar to axi 1 protein from
  misc_feature (31)..(283): Homolog of NCBI NO: 15144512 NR Description: putative auxin growth promotor protein
  misc_feature (1)..(64): Homolog of NCBI NO: 15144512 NR Description: putative auxin growth promotor protein
  misc_feature (29)..(282): Homolog of NCBI NO: 15233855 NR Description: PsRT17-1 like protein [Arabidopsis thaliana]
  misc_feature (1)..(50): Homolog of NCBI NO: 15233855 NR Description: PsRT17-1 like protein [Arabidopsis thaliana]
  misc_feature (29)..(282): Homolog of NCBI NO: 31711716 NR Description: At4g24530 [Arabidopsis thaliana]
  misc_feature (1)..(50): Homolog of NCBI NO: 31711716 NR Description: At4g24530 [Arabidopsis thaliana]

SEQ ID NO: 101993 - protein, 244 aa, Arabidopsis thaliana; identical to SEQ ID NO: 23733
  peptide (1)..(244): Ceres Seq. ID no. 13609238
  misc_feature (1)..(208): Pfam Name: Plant protein family Pfam Description: Plant protein family
  misc_feature (1)..(244): Homolog of NCBI NO: 9294295 NR Description: contains similarity to the auxin-independent
  misc_feature (1)..(244): Homolog of NCBI NO: 21618319 NR Description: unknown [Arabidopsis thaliana]
  misc_feature (1)..(244): Homolog of NCBI NO: 18404918 NR Description: expressed protein [Arabidopsis thaliana]
  misc_feature (1)..(243): Homolog of NCBI NO: 15226282 NR Description: axi 1 protein from Nicotiana tabacum -related thaliana] >gi|25410909|pir||C84425 similar to axi 1 protein from
  misc_feature (1)..(244): Homolog of NCBI NO: 15144512 NR Description: putative auxin growth promotor protein
  misc_feature (1)..(25): Homolog of NCBI NO: 15144512 NR Description: putative auxin growth promotor protein
  misc_feature (1)..(243): Homolog of NCBI NO: 15233855 NR Description: PsRT17-1 like protein [Arabidopsis thaliana]
  misc_feature (1)..(11): Homolog of NCBI NO: 15233855 NR Description: PsRT17-1 like protein [Arabidopsis thaliana]
  misc_feature (1)..(243): Homolog of NCBI NO: 31711716 NR Description: At4g24530 [Arabidopsis thaliana]
  misc_feature (1)..(11): Homolog of NCBI NO: 31711716 NR Description: At4g24530 [Arabidopsis thaliana]

SEQ ID NO: 101994 - DNA, 1256 bp, Arabidopsis thaliana
  misc_feature (1)..(1256): Ceres Seq. ID no. 13609239
  misc_feature: MA Experiment ID: 20001248 Result: Up-regulated in Transcription
  misc_feature: MA Experiment 20001248 PARAMETER Experiment Name: At_Far-red-induction_P Parameter: Age (day) Value: 7
  misc_feature: MA Experiment 20001248 PARAMETER Experiment Name: At_Far-red-induction_P Parameter: Light Value: Far-red vs. White
  misc_feature: MA Experiment 20001248 PARAMETER Experiment Name: At_Far-red-induction_P Parameter: Organism Value: A. thaliana
  misc_feature: MA Experiment 20001248 PARAMETER Experiment Name: At_Far-red-induction_P Parameter: Plant Line Value: Columbia
  misc_feature: MA Experiment 20001248 PARAMETER Experiment Name: At_Far-red-induction_P Parameter: Timepoint (hr) Value: 4
  misc_feature: MA Experiment 20001248 PARAMETER Experiment Name: At_Far-red-induction_P Parameter: Tissue Value: Whole Plant
agaagaagaagacgaagcagaggaatctagggtttatgctacattgaagcaaagatggttacgagcagcgatcaaatccaaaatggttctgaagagcaatcaaaaagatcagagatttacacatacgaagcaccatggcagatctacgcaatgaactggagcattcgtcgagacaagaagtatcggctcgcaatcacaagcctcatcgagcaatatccgaatcgcgtcgaaattgttcagcttgatgaatcaaatggtgagattcgttcagatccaaatctctgcttcgaacatccttacccaccaacgaaaaccagtttcatacccgataaagaatgtcaaagacccgatcttttagctacttctagtgatttccttcgtttatggcgaatctctgatgatgaatctcgtgttgagcttaagtcttgtcttagtagtgataagaatagtgagtttagtggtccaatcacttcatttgattggaatgaagctgagcctagacgaattggtacttctagtattgataccacttgtactatttgggatatagagcgtgaagttgttgatacccagcttattgctcatgataaagaggtttatgacattgcttggggtggtgttggtgtctttgcctctgtctcagaggatggttccgttagagtgtttgatctccgtgataaggagcattcgacgattatctacgagagtggtgagcctagtactcctttggtgcgacttagttggaacaagcaggatccgaggtatatggctactgttatcatgggcagtgctaaaattgttgtgttggatattcggtttccggctcttcctgtcgtggagcttcagcgacatcaggctagtgtcaatgctatagcttgggctcctcatagctcttcccatatctgctccgctggagatgattctcaggcgttgatttgggatatatcttccatgggacagcatgttgaaggtggtctggatccgattctagcttacacagccggcgctgaggttgagcagcttcagtggtcatcttctcagcctgattgggttgccattgccttctctaacaagctgcagattctccgggtctgattatgttttacagatttctgttggatacttggatgtaaaaactcgttgctattgttgattaatgatcttttgatctctgactctaagcctcattgagtttcctttcatagtatggtctgtgtaggaactatgtaccttcaaaattgtgaataactagcttt

SEQ ID NO: 101995 - protein, 346 aa, Arabidopsis thaliana; identical to SEQ ID NO: 35123
  peptide (1)..(346): Ceres Seq. ID no. 13609240
  misc_feature (1)..(346): Homolog of NCBI NO: 15231593 NR Description: transducin / WD-40 repeat protein family thaliana] >gi|1402884|emb|CAA66815.1| unknown [Arabidopsis
  misc_feature (1)..(346): Homolog of NCBI NO: 28393624 NR Description: putative transcriptional regulator protein
  misc_feature (1)..(346): Homolog of NCBI NO: 15222113 NR Description: flower pigmentation protein ATAN11 [Arabidopsis
  misc_feature (1)..(346): Homolog of NCBI NO: 2290528 NR Description: ATAN11 [Arabidopsis thaliana]
  misc_feature (1)..(346): Homolog of NCBI NO: 21593264 NR Description: flower pigmentation protein ATAN11 [Arabidopsis
  misc_feature (1)..(346): Homolog of NCBI NO: 22324803 NR Description: WD-repeat protein GhTTG2 [Gossypium hirsutum]
  misc_feature (1)..(346): Homolog of NCBI NO: 22324809 NR Description: WD-repeat protein GhTTG4 [Gossypium hirsutum]
  misc_feature (33)..(346): Homolog of NCBI NO: 13346196 NR Description: WD1521 [Gossypium hirsutum]
  misc_feature (217)..(346): Homolog of NCBI NO: 37719680 NR Description: WD40 repeat protein [Zea mays]
  misc_feature (11)..(116): Homolog of NCBI NO: 37719680 NR Description: WD40 repeat protein [Zea mays]

SEQ ID NO: 101996 - protein, 314 aa, Arabidopsis thaliana; identical to SEQ ID NO: 35124
  peptide (1)..(314): Ceres Seq. ID no. 13609241
  misc_feature (1)..(314): Homolog of NCBI NO: 15231593 NR Description: transducin / WD-40 repeat protein family thaliana] >gi|1402884|emb|CAA66815.1| unknown [Arabidopsis
  misc_feature (1)..(314): Homolog of NCBI NO: 28393624 NR Description: putative transcriptional regulator protein
  misc_feature (1)..(314): Homolog of NCBI NO: 15222113 NR Description: flower pigmentation protein ATAN11 [Arabidopsis
  misc_feature (1)..(314): Homolog of NCBI NO: 2290528 NR Description: ATAN11 [Arabidopsis thaliana]
  misc_feature (1)..(314): Homolog of NCBI NO: 21593264 NR Description: flower pigmentation protein ATAN11 [Arabidopsis
  misc_feature (1)..(314): Homolog of NCBI NO: 22324803 NR Description: WD-repeat protein GhTTG2 [Gossypium hirsutum]
  misc_feature (1)..(314): Homolog of NCBI NO: 22324809 NR Description: WD-repeat protein GhTTG4 [Gossypium hirsutum]
  misc_feature (1)..(314): Homolog of NCBI NO: 13346196 NR Description: WD1521 [Gossypium hirsutum]
  misc_feature (185)..(314): Homolog of NCBI NO: 37719680 NR Description: WD40 repeat protein [Zea mays]
  misc_feature (1)..(84): Homolog of NCBI NO: 37719680 NR Description: WD40 repeat protein [Zea mays]

SEQ ID NO: 101997 - DNA, 1975 bp, Arabidopsis thaliana
  misc_feature (1)..(1975): Ceres Seq. ID no. 13609242
  misc_feature: MA Experiment ID: 20000286 Result: Down-regulated in Transcription
  misc_feature: MA Experiment 20000286 PARAMETER Experiment Name: At_Open_Flower_P Parameter: Age (day) Value: 21
  misc_feature: MA Experiment 20000286 PARAMETER Experiment Name: At_Open_Flower_P Parameter: Plant Line Value: WS
  misc_feature: MA Experiment 20000286 PARAMETER Experiment Name: At_Open_Flower_P Parameter: Tissue Value: Half Open vs. Whole Plant
  misc_feature: MA Experiment ID: 20001248 Result: Down-regulated in Transcription
  misc_feature: MA Experiment 20001248 PARAMETER Experiment Name: At_Far-red-induction_P Parameter: Age (day) Value: 7
  misc_feature: MA Experiment 20001248 PARAMETER Experiment Name: At_Far-red-induction_P Parameter: Light Value: Far-red vs. White
  misc_feature: MA Experiment 20001248 PARAMETER Experiment Name: At_Far-red-induction_P Parameter: Organism Value: A. thaliana
  misc_feature: MA Experiment 20001248 PARAMETER Experiment Name: At_Far-red-induction_P Parameter: Plant Line Value: Columbia
  misc_feature: MA Experiment 20001248 PARAMETER Experiment Name: At_Far-red-induction_P Parameter: Timepoint (hr) Value: 4
  misc_feature: MA Experiment 20001248 PARAMETER Experiment Name: At_Far-red-induction_P Parameter: Tissue Value: Whole Plant
  misc_feature: MA Experiment ID: 20001451 Result: Up-regulated in Transcription
  misc_feature: MA Experiment 20001451 PARAMETER Experiment Name: At_Far-red-induction_P Parameter: Age (day) Value: 7
  misc_feature: MA Experiment 20001451 PARAMETER Experiment Name: At_Far-red-induction_P Parameter: Light Value: Far-red vs. White
  misc_feature: MA Experiment 20001451 PARAMETER Experiment Name: At_Far-red-induction_P Parameter: Organism Value: A. thaliana
  misc_feature: MA Experiment 20001451 PARAMETER Experiment Name: At_Far-red-induction_P Parameter: Plant Line Value: Columbia
  misc_feature: MA Experiment 20001451 PARAMETER Experiment Name: At_Far-red-induction_P Parameter: Timepoint (hr) Value: 24
  misc_feature: MA Experiment 20001451 PARAMETER Experiment Name: At_Far-red-induction_P Parameter: Tissue Value: Whole Plant
acaaaattcctctttttttttatttaattaaaattgcatcaaaatgtttgttttcttgagccgaattattctattaagcgcattaaaaaagaaaaaaaaaaaagaaataggagctaatgtaatttagagaaactctatcaaagacttataataaccaaaacgaagacctattgtgaccaaatacaaagggtggggcagatcgtttctttgaatactatgatgtcttttagtttatgagttgctttatttctgatacttctcctccccattctcttatcctatcctcagccattgaaacctctgtgtcccaatttgttttgcagatcatccatgttaaaactattgtctgaaccacggtccccgtcaacattccacaccagattcccattacaccatagttaagcttgtaccccaataatagaccaaatgggattccaaacacgtaatagcaggcgatgttaacgtaggccaccactgcttgccatccagctcccacagccacactgataagacaggttggacattgttgatgacaatggaaagtgcaagtattggtgtgagttctttaacaagaatgatgactttttcgtctttcacaaaaagtgatggatattgatctctaaagatgagtagaatcattgatacaatgaatccgattagcgtcgatgttatcactgccacaagtagtgagaatttcgcggttcttggatggttagctcctaattcattagacactctcacacttacggctgtgttcatcccaatagcaatcatagcagtccatcccaaaatattcatccagatggagagggcagctacagagatttcagcattcttcaaatatccagcaaataatatgattgccataaaataccaaacctccaaactgagcataacagcagaagccaaagataatctaacgaaactccacaaattatgaaaagcctcccacgagaaaccagaccaagcctcaccacacgtaccactaaatatgtacacaagctgagccatgtcaatgaagcaccacgacgcgttaagcactacggctagacctggcataccccactggagcttcacaatgacaaaccacgtgagaggcacgtgtataacaagtgcaacagccgatatcacggccatgaccattatcttgctttgcgattgcaaaaatttagcggttggaaaattgatggcgtaggcaaagatttgagggatcatgtagatggaaaatattccggccgcgctagagattgccgccgtttgaccaatggacgcgaggataggggcggcgaaaatgtaaaggagagagaggataagagcagtcacgtttagtatcacccatgatcgttgcaagtaaacgccaagcattgacaattttcctgctccaaacgcttgtccacatagcgtttctaacgcacttcccattccaaccatgatgccgaatgagaagccggcaacgacggagttttcgacggagacagcggcaagagcgatggtgctgatgtgaccggcgaagacctgagtaatagcgccgagagaatattggttcacggatgtgaaaatggcgggaccggccaagtaccatagctttttggtttccacgttgaattccctaacgaagccaccgacggtggtgatcggaggaatatcgtcgacggataagaaaggaagatcagaacgttcttccgccgcagtgagaagcgtctccgttatatctttgtcttttgccatcttaagagaaagagatggagagattaaaggaggtcgaagactaaggaccaacgagtgaggatcttgggtttaatcattcatgaattatataggaaaaaaaatgttaatacgtgcgaccaaaaaaattgtttttatgatattaaggaaaaaatagctaatatagcaactagcatttaataaaatggctaaatgtagacaaaatcattgttgtattaatcaaattatggtatatattatggatggattc

SEQ ID NO: 101998 - protein, 104 aa, Arabidopsis thaliana
  peptide (1)..(104): Ceres Seq. ID no. 13609243
MSRIIDTMNPISVDVITATSSENFAVLGWLAPNSLDTLTLTAVFIPIAIIAVHPKIFIQMERAATEISAFFKYPANNMIAIKYQTSKLSITAEAKDNLTKLHKL

SEQ ID NO: 101999 - protein, 97 aa, Arabidopsis thaliana
  peptide (1)..(97): Ceres Seq. ID no. 13609244
MNPISVDVITATSSENFAVLGWLAPNSLDTLTLTAVFIPIAIIAVHPKIFIQMERAATEISAFFKYPANNMIAIKYQTSKLSITAEAKDNLTKLHKL

SEQ ID NO: 102000 - protein, 75 aa, Arabidopsis thaliana
  peptide (1)..(75): Ceres Seq. ID no. 13609245
  misc_feature (1)..(75): Homolog of NCBI NO: 18405005 NR Description: expressed protein [Arabidopsis thaliana]
MAGPAKYHSFLVSTLNSLTKPPTVVIGGISSTDKKGRSERSSAAVRSVSVISLSFAILRERDGEIKGGRRLRTNE

SEQ ID NO: 102001 - DNA, 1618 bp, Arabidopsis thaliana
  misc_feature (1)..(1618): Ceres Seq. ID no. 13609250
  misc_feature: MA Experiment ID: 108462 Result: Up-regulated in Transcription
  misc_feature: MA Experiment 108462 PARAMETER Experiment Name: At_Germinating_Seeds_cDNA_P Parameter: Age (day) Value: 2 vs. 0
  misc_feature: MA Experiment 108462 PARAMETER Experiment Name: At_Germinating_Seeds_cDNA_P Parameter: Tissue Value: Germinating Seeds
  misc_feature: MA Experiment ID: 108463 Result: Up-regulated in Transcription
  misc_feature: MA Experiment 108463 PARAMETER Experiment Name: At_Germinating_Seeds_cDNA_P Parameter: Age (day) Value: 3 vs. 0
  misc_feature: MA Experiment 108463 PARAMETER Experiment Name: At_Germinating_Seeds_cDNA_P Parameter: Tissue Value: Germinating Seeds
  misc_feature: MA Experiment ID: 108464 Result: Up-regulated in Transcription
  misc_feature: MA Experiment 108464 PARAMETER Experiment Name: At_Germinating_Seeds_cDNA_P Parameter: Age (day) Value: 4 vs. 0
  misc_feature: MA Experiment 108464 PARAMETER Experiment Name: At_Germinating_Seeds_cDNA_P Parameter: Tissue Value: Germinating Seeds
  misc_feature: MA Experiment ID: 108577 Result: Down-regulated in Transcription
  misc_feature: MA Experiment 108577 PARAMETER Experiment Name: At_42deg_Heat_cDNA_P Parameter: Temperature (deg C) Value: 42 vs. 22
  misc_feature: MA Experiment 108577 PARAMETER Experiment Name: At_42deg_Heat_cDNA_P Parameter: Timepoint (hr) Value: 6
  misc_feature: MA Experiment 108577 PARAMETER Experiment Name: At_42deg_Heat_cDNA_P Parameter: Tissue Value: Aerial
  misc_feature: MA Experiment ID: 108595 Result: Down-regulated in Transcription
  misc_feature: MA Experiment 108595 PARAMETER Experiment Name: At_Ler-pi_Ovule_cDNA_P Parameter: Plant Line Value: null
  misc_feature: MA Experiment ID: 20000113 Result: Down-regulated in Transcription
  misc_feature: MA Experiment 20000113 PARAMETER Experiment Name: At_42deg_Heat_cDNA_P Parameter: Temperature (deg C) Value: 42 vs. 22
  misc_feature: MA Experiment 20000113 PARAMETER Experiment Name: At_42deg_Heat_cDNA_P Parameter: Timepoint (hr) Value: 8
  misc_feature: MA Experiment 20000113 PARAMETER Experiment Name: At_42deg_Heat_cDNA_P Parameter: Tissue Value: Aerial
atgggtgaagaagctatagttctgtatcctgcaccaccaataggtcacttagtgtccatggttgagttaggtaaaaccatcctctccaaaaacccatctctctccatccacattatcttagttccaccgccttatcagccggaatcaaccgccacttacatctcctccgtctcctcctccttcccttcaataaccttccaccatcttcccgccgtcacaccgtactcctcctcctccacctctcgccaccaccacgaatctctcctcctagagatcctctgttttagcaacccaagtgtccaccgaactcttttctcactctctcggaatttcaatgtccgagcaatgatcatcgatttcttctgcaccgccgttttagacatcaccgctgacttcacgttcccggtttacttcttctacacctctggagccgcatgtctcgccttttccttctatctcccgaccatcgacgaaacaacccccggaaaaaacctcaaagacattcctacagttcatatccccggcgttcctccgatgaagggctccgatatgcctaaggcggtgctcgaacgagacgatgaggtctacgatgtttttataatgttcggtaaacagctctcgaagtcgtcagggattattatcaatacgtttgatgctttagaaaacagagccatcaaggccataacagaggagctctgttttcgcaatatttatccaattggaccgctcattgtaaacggaagaatcgaagatagaaacgacaacaaggcagtttcttgtctcaattggctggattcgcagccggaaaagagtgttgtgtttctctgttttggaagcttaggtttgttctcaaaagaacaggtgatagagattgctgttggtttagagaaaagtgggcagagattcttgtgggtggtccgtaatccacccgagttagaaaagacagaactggatttgaaatcactcttaccagaaggattcttaagccgaaccgaagacaaagggatggtcgtgaaatcatgggctccgcaagttccggttctgaatcataaagcagtcgggggattcgtcactcattgcggttggaattcaattcttgaagctgtttgtgctggtgtgccgatggtggcttggccgttgtacgctgagcagaggtttaatagagtgatgattgtggatgagatcaagattgcgatttcgatgaatgaatcagagacgggtttcgtgagctctacagaggtggagaaacgagtccaagagataattggggagtgtccggttagggagcgaaccatggctatgaagaacgcagccgaattagccttgacagaaactgattgcaattccgatggatgaatcagacatgggtttcgtgagctcaacggaggtggtgaatcgagaccgcgaggtactgctggatggtccggttaggaagaaaaccaaagaacgcagccgaatcagccttggcagaaaccggttcatctcatgccgtgttgactacgttactcctcagtcatggagcccaaaatgttcttaaaaatcaagccttgtagtattaattaatggtaggaatgtttctaaacttataaattcccatatctctaatgaatgatctttg

SEQ ID NO: 102002 - protein, 451 aa, Arabidopsis thaliana
  peptide (1)..(451): Ceres Seq. ID no. 13609251
  misc_feature (5)..(445): Pfam Name: UDP-glucoronosyl and UDP-glucosyl transferase Pfam Description: UDP-glucoronosyl and UDP-glucosyl transferase
  misc_feature (1)..(445): Homolog of NCBI NO: 18401158 NR Description: glycosyltransferase family [Arabidopsis thaliana]
  misc_feature (1)..(451): Homolog of NCBI NO: 18401155 NR Description: glycosyltransferase family [Arabidopsis thaliana]
  misc_feature (1)..(445): Homolog of NCBI NO: 21593785 NR Description: putative glucosyltransferase [Arabidopsis
  misc_feature (1)..(446): Homolog of NCBI NO: 30684106 NR Description: glycosyltransferase family [Arabidopsis thaliana]
  misc_feature (6)..(444): Homolog of NCBI NO: 22535568 NR Description: putative glucosyltransferase [Oryza sativa
  misc_feature (1)..(444): Homolog of NCBI NO: 19911189 NR Description: glucosyltransferase-3 [Vigna angularis]
  misc_feature (3)..(444): Homolog of NCBI NO: 19911193 NR Description: glucosyltransferase-5 [Vigna angularis]
  misc_feature (91)..(410): Homolog of NCBI NO: 17484017 NR Description: UDP-glycosyltransfersase [Jatropha curcas]
  misc_feature (3)..(444): Homolog of NCBI NO: 34910204 NR Description: putative flavonol glucosyltransferase [Oryza
  misc_feature (1)..(451): Homolog of NCBI NO: 34394683 NR Description: putative flavonol 3-O-glucosyltransferase [Oryza
MGEEAIVLYPAPPIGHLVSMVELGKTILSKNPSLSIHIILVPPPYQPESTATYISSVSSSFPSITFHHLPAVTPYSSSSTSRHHHESLLLEILCFSNPSVHRTLFSLSRNFNVRAMIIDFFCTAVLDITADFTFPVYFFYTSGAACLAFSFYLPTIDETTPGKNLKDIPTVHIPGVPPMKGSDMPKAVLERDDEVYDVFIMFGKQLSKSSGIIINTFDALENRAIKAITEELCFRNIYPIGPLIVNGRIEDRNDNKAVSCLNWLDSQPEKSVVFLCFGSLGLFSKEQVIEIAVGLEKSGQRFLWVVRNPPELEKTELDLKSLLPEGFLSRTEDKGMVVKSWAPQVPVLNHKAVGGFVTHCGWNSILEAVCAGVPMVAWPLYAEQRFNRVMIVDEIKIAISMNESETGFVSSTEVEKRVQEIIGECPVRERTMAMKNAAELALTETDCNSDG

SEQ ID NO: 102003 - protein, 432 aa, Arabidopsis thaliana
  peptide (1)..(432): Ceres Seq. ID no. 13609252
  misc_feature (1)..(426): Pfam Name: UDP-glucoronosyl and UDP-glucosyl transferase Pfam Description: UDP-glucoronosyl and UDP-glucosyl transferase
  misc_feature (1)..(426): Homolog of NCBI NO: 18401158 NR Description: glycosyltransferase family [Arabidopsis thaliana]
  misc_feature (1)..(432): Homolog of NCBI NO: 18401155 NR Description: glycosyltransferase family [Arabidopsis thaliana]
  misc_feature (1)..(426): Homolog of NCBI NO: 21593785 NR Description: putative glucosyltransferase [Arabidopsis
  misc_feature (1)..(427): Homolog of NCBI NO: 30684106 NR Description: glycosyltransferase family [Arabidopsis thaliana]
  misc_feature (1)..(425): Homolog of NCBI NO: 22535568 NR Description: putative glucosyltransferase [Oryza sativa
  misc_feature (1)..(425): Homolog of NCBI NO: 19911189 NR Description: glucosyltransferase-3 [Vigna angularis]
  misc_feature (1)..(425): Homolog of NCBI NO: 19911193 NR Description: glucosyltransferase-5 [Vigna angularis]
  misc_feature (72)..(391): Homolog of NCBI NO: 17484017 NR Description: UDP-glycosyltransfersase [Jatropha curcas]
  misc_feature (1)..(425): Homolog of NCBI NO: 34910204 NR Description: putative flavonol glucosyltransferase [Oryza
  misc_feature (1)..(432): Homolog of NCBI NO: 34394683 NR Description: putative flavonol 3-O-glucosyltransferase [Oryza
MVELGKTILSKNPSLSIHIILVPPPYQPESTATYISSVSSSFPSITFHHLPAVTPYSSSSTSRHHHESLLLEILCFSNPSVHRTLFSLSRNFNVRAMIIDFFCTAVLDITADFTFPVYFFYTSGAACLAFSFYLPTIDETTPGKNLKDIPTVHIPGVPPMKGSDMPKAVLERDDEVYDVFIMFGKQLSKSSGIIINTFDALENRAIKAITEELCFRNIYPIGPLIVNGRIEDRNDNKAVSCLNWLDSQPEKSVVFLCFGSLGLFSKEQVIEIAVGLEKSGQRFLWVVRNPPELEKTELDLKSLLPEGFLSRTEDKGMVVKSWAPQVPVLNHKAVGGFVTHCGWNSILEAVCAGVPMVAWPLYAEQRFNRVMIVDEIKIAISMNESETGFVSSTEVEKRVQEIIGECPVRERTMAMKNAAELALTETDCNSDG

SEQ ID NO: 102004 - protein, 336 aa, Arabidopsis thaliana
  peptide (1)..(336): Ceres Seq. ID no. 13609253
  misc_feature (1)..(330): Pfam Name: UDP-glucoronosyl and UDP-glucosyl transferase Pfam Description: UDP-glucoronosyl and UDP-glucosyl transferase
  misc_feature (1)..(330): Homolog of NCBI NO: 18401158 NR Description: glycosyltransferase family [Arabidopsis thaliana]
  misc_feature (1)..(336): Homolog of NCBI NO: 18401155 NR Description: glycosyltransferase family [Arabidopsis thaliana]
  misc_feature (1)..(330): Homolog of NCBI NO: 21593785 NR Description: putative glucosyltransferase [Arabidopsis
  misc_feature (1)..(331): Homolog of NCBI NO: 30684106 NR Description: glycosyltransferase family [Arabidopsis thaliana]
  misc_feature (1)..(329): Homolog of NCBI NO: 22535568 NR Description: putative glucosyltransferase [Oryza sativa
  misc_feature (1)..(329): Homolog of NCBI NO: 19911189 NR Description: glucosyltransferase-3 [Vigna angularis]
  misc_feature (1)..(329): Homolog of NCBI NO: 19911193 NR Description: glucosyltransferase-5 [Vigna angularis]
  misc_feature (1)..(295): Homolog of NCBI NO: 17484017 NR Description: UDP-glycosyltransfersase [Jatropha curcas]
  misc_feature (1)..(329): Homolog of NCBI NO: 34910204 NR Description: putative flavonol glucosyltransferase [Oryza
  misc_feature (1)..(336): Homolog of NCBI NO: 34394683 NR Description: putative flavonol 3-O-glucosyltransferase [Oryza
MIIDFFCTAVLDITADFTFPVYFFYTSGAACLAFSFYLPTIDETTPGKNLKDIPTVHIPGVPPMKGSDMPKAVLERDDEVYDVFIMFGKQLSKSSGIIINTFDALENRAIKAITEELCFRNIYPIGPLIVNGRIEDRNDNKAVSCLNWLDSQPEKSVVFLCFGSLGLFSKEQVIEIAVGLEKSGQRFLWVVRNPPELEKTELDLKSLLPEGFLSRTEDKGMVVKSWAPQVPVLNHKAVGGFVTHCGWNSILEAVCAGVPMVAWPLYAEQRFNRVMIVDEIKIAISMNESETGFVSSTEVEKRVQEIIGECPVRERTMAMKNAAELALTETDCNSDG

SEQ ID NO: 102005 - DNA, 1537 bp, Arabidopsis thaliana
  misc_feature (1)..(1537): Ceres Seq. ID no. 13609254
  misc_feature: MA Experiment ID: 108434 Result: Down-regulated in Transcription
  misc_feature: MA Experiment 108434 PARAMETER Experiment Name: At_Root_Tips_cDNA_P Parameter: Tissue Value: Root Tips
  misc_feature: MA Experiment ID: 108577 Result: Down-regulated in Transcription
  misc_feature: MA Experiment 108577 PARAMETER Experiment Name: At_42deg_Heat_cDNA_P Parameter: Temperature (deg C) Value: 42 vs. 22
  misc_feature: MA Experiment 108577 PARAMETER Experiment Name: At_42deg_Heat_cDNA_P Parameter: Timepoint (hr) Value: 6
  misc_feature: MA Experiment 108577 PARAMETER Experiment Name: At_42deg_Heat_cDNA_P Parameter: Tissue Value: Aerial
  misc_feature: MA Experiment ID: 108585 Result: Up-regulated in Transcription
  misc_feature: MA Experiment 108585 PARAMETER Experiment Name: At_5mM_NaNP_cDNA_P Parameter: Timepoint (hr) Value: 6
  misc_feature: MA Experiment 108585 PARAMETER Experiment Name: At_5mM_NaNP_cDNA_P Parameter: Tissue Value: Aerial
  misc_feature: MA Experiment 108585 PARAMETER Experiment Name: At_5mM_NaNP_cDNA_P Parameter: Treatment Value: null
  misc_feature: MA Experiment ID: 20000113 Result: Down-regulated in Transcription
  misc_feature: MA Experiment 20000113 PARAMETER Experiment Name: At_42deg_Heat_cDNA_P Parameter: Temperature (deg C) Value: 42 vs. 22
  misc_feature: MA Experiment 20000113 PARAMETER Experiment Name: At_42deg_Heat_cDNA_P Parameter: Timepoint (hr) Value: 8
  misc_feature: MA Experiment 20000113 PARAMETER Experiment Name: At_42deg_Heat_cDNA_P Parameter: Tissue Value: Aerial
  misc_feature: MA Experiment ID: 20000144 Result: Down-regulated in Transcription
  misc_feature: MA Experiment 20000144 PARAMETER Experiment Name: At_42deg_Heat_cDNA_P Parameter: Temperature (deg C) Value: 42 vs. 22
  misc_feature: MA Experiment 20000144 PARAMETER Experiment Name: At_42deg_Heat_cDNA_P Parameter: Timepoint (hr) Value: 1
  misc_feature: MA Experiment 20000144 PARAMETER Experiment Name: At_42deg_Heat_cDNA_P Parameter: Tissue Value: Aerial
  misc_feature: MA Experiment ID: 20000171 Result: Down-regulated in Transcription
  misc_feature: MA Experiment 20000171 PARAMETER Experiment Name: At_42deg_Heat_P Parameter: Age (day) Value: 14
  misc_feature: MA Experiment 20000171 PARAMETER Experiment Name: At_42deg_Heat_P Parameter: Organism Value: A. thaliana
  misc_feature: MA Experiment 20000171 PARAMETER Experiment Name: At_42deg_Heat_P Parameter: Plant Line Value: WS
  misc_feature: MA Experiment 20000171 PARAMETER Experiment Name: At_42deg_Heat_P Parameter: Temperature (deg C) Value: 42 vs. 22
  misc_feature: MA Experiment 20000171 PARAMETER Experiment Name: At_42deg_Heat_P Parameter: Timepoint (hr) Value: 1
  misc_feature: MA Experiment 20000171 PARAMETER Experiment Name: At_42deg_Heat_P Parameter: Tissue Value: Aerial
  misc_feature: MA Experiment ID: 20000173 Result: Down-regulated in Transcription
  misc_feature: MA Experiment 20000173 PARAMETER Experiment Name: At_42deg_Heat_P Parameter: Age (day) Value: 14
  misc_feature: MA Experiment 20000173 PARAMETER Experiment Name: At_42deg_Heat_P Parameter: Organism Value: A. thaliana
  misc_feature: MA Experiment 20000173 PARAMETER Experiment Name: At_42deg_Heat_P Parameter: Plant Line Value: WS
  misc_feature: MA Experiment 20000173 PARAMETER Experiment Name: At_42deg_Heat_P Parameter: Temperature (deg C) Value: 42 vs. 22
  misc_feature: MA Experiment 20000173 PARAMETER Experiment Name: At_42deg_Heat_P Parameter: Timepoint (hr) Value: 6
  misc_feature: MA Experiment 20000173 PARAMETER Experiment Name: At_42deg_Heat_P Parameter: Tissue Value: Aerial
  misc_feature: MA Experiment ID: 20000184 Result: Down-regulated in Transcription
  misc_feature: MA Experiment 20000184 PARAMETER Experiment Name: At_Shoots__P Parameter: Age (day) Value: 7
  misc_feature: MA Experiment 20000184 PARAMETER Experiment Name: At_Shoots__P Parameter: Tissue Value: Shoots vs. Whole Plant
  misc_feature: MA Experiment ID: 20000185 Result: Down-regulated in Transcription
  misc_feature: MA Experiment 20000185 PARAMETER Experiment Name: At_Roots__P Parameter: Age (day) Value: 7 vs. 21
  misc_feature: MA Experiment 20000185 PARAMETER Experiment Name: At_Roots__P Parameter: Organism Value: A. thaliana
  misc_feature: MA Experiment 20000185 PARAMETER Experiment Name: At_Roots__P Parameter: Tissue Value: Roots vs. Whole Plant
  misc_feature: MA Experiment ID: 20000234 Result: Down-regulated in Transcription
  misc_feature: MA Experiment 20000234 PARAMETER Experiment Name: At_Siliques_P Parameter: Age (day) Value: 21
  misc_feature: MA Experiment 20000234 PARAMETER Experiment Name: At_Siliques_P Parameter: Organism Value: A. thaliana
  misc_feature: MA Experiment 20000234 PARAMETER Experiment Name: At_Siliques_P Parameter: Plant Line Value: WS
  misc_feature: MA Experiment 20000234 PARAMETER Experiment Name: At_Siliques_P Parameter: Tissue Value: Less Than 5mm Siliques vs. Whole Plant
  misc_feature: MA Experiment ID: 20000235 Result: Down-regulated in Transcription
  misc_feature: MA Experiment 20000235 PARAMETER Experiment Name: At_Siliques_P Parameter: Age (day) Value: 21
  misc_feature: MA Experiment 20000235 PARAMETER Experiment Name: At_Siliques_P Parameter: Organism Value: A. thaliana
  misc_feature: MA Experiment 20000235 PARAMETER Experiment Name: At_Siliques_P Parameter: Plant Line Value: WS
  misc_feature: MA Experiment 20000235 PARAMETER Experiment Name: At_Siliques_P Parameter: Tissue Value: 5-10mm Siliques vs. Whole Plant
  misc_feature: MA Experiment ID: 20000264 Result: Down-regulated in Transcription
  misc_feature: MA Experiment 20000264 PARAMETER Experiment Name: At_Open_Flower_P Parameter: Age (day) Value: 21
  misc_feature: MA Experiment 20000264 PARAMETER Experiment Name: At_Open_Flower_P Parameter: Plant Line Value: WS
  misc_feature: MA Experiment 20000264 PARAMETER Experiment Name: At_Open_Flower_P Parameter: Tissue Value: Open Flower vs. Whole Plant
  misc_feature: MA Experiment ID: 20000265 Result: Down-regulated in Transcription
  misc_feature: MA Experiment 20000265 PARAMETER Experiment Name: At_Open_Flower_P Parameter: Age (day) Value: 21
  misc_feature: MA Experiment 20000265 PARAMETER Experiment Name: At_Open_Flower_P Parameter: Plant Line Value: WS
  misc_feature: MA Experiment 20000265 PARAMETER Experiment Name: At_Open_Flower_P Parameter: Tissue Value: Closed Flower vs. Whole Plant
  misc_feature: MA Experiment ID: 20000286 Result: Down-regulated in Transcription
  misc_feature: MA Experiment 20000286 PARAMETER Experiment Name: At_Open_Flower_P Parameter: Age (day) Value: 21
  misc_feature: MA Experiment 20000286 PARAMETER Experiment Name: At_Open_Flower_P Parameter: Plant Line Value: WS
  misc_feature: MA Experiment 20000286 PARAMETER Experiment Name: At_Open_Flower_P Parameter: Tissue Value: Half Open vs. Whole Plant
  misc_feature: MA Experiment ID: 20000438 Result: Down-regulated in Transcription
  misc_feature: MA Experiment 20000438 PARAMETER Experiment Name: At_Shoots__P Parameter: Age (day) Value: 14
  misc_feature: MA Experiment 20000438 PARAMETER Experiment Name: At_Shoots__P Parameter: Tissue Value: Shoots vs. Whole Plant
  misc_feature: MA Experiment ID: 20000439 Result: Down-regulated in Transcription
  misc_feature: MA Experiment 20000439 PARAMETER Experiment Name: At_Roots__P Parameter: Age (day) Value: 14 vs. 21
  misc_feature: MA Experiment 20000439 PARAMETER Experiment Name: At_Roots__P Parameter: Organism Value: A. thaliana
  misc_feature: MA Experiment 20000439 PARAMETER Experiment Name: At_Roots__P Parameter: Tissue Value: Roots vs. Whole Plant
  misc_feature: MA Experiment ID: 20000574 Result: Down-regulated in Transcription
  misc_feature: MA Experiment 20000574 PARAMETER Experiment Name: At_100uM_ABA_Mutants__P Parameter: Organism Value: A. thaliana
  misc_feature: MA Experiment 20000574 PARAMETER Experiment Name: At_100uM_ABA_Mutants__P Parameter: Plant Line Value: CS23 vs. Ler wt
  misc_feature: MA Experiment 20000574 PARAMETER Experiment Name: At_100uM_ABA_Mutants__P Parameter: Timepoint (hr) Value: N/A
  misc_feature: MA Experiment 20000574 PARAMETER Experiment Name: At_100uM_ABA_Mutants__P Parameter: Tissue Value: Whole Plant
  misc_feature: MA Experiment 20000574 PARAMETER Experiment Name: At_100uM_ABA_Mutants__P Parameter: Treatment Value: None
  misc_feature: MA Experiment ID: 20000794 Result: Down-regulated in Transcription
  misc_feature: MA Experiment 20000794 PARAMETER Experiment Name: At_Petals_P Parameter: Age (day) Value: 23-25 days
  misc_feature: MA Experiment 20000794 PARAMETER Experiment Name: At_Petals_P Parameter: Plant Line Value: WS
  misc_feature: MA Experiment 20000794 PARAMETER Experiment Name: At_Petals_P Parameter: Tissue Value: Petals vs. Whole plant
  misc_feature: MA Experiment ID: 20001247 Result: Up-regulated in Transcription
  misc_feature: MA Experiment 20001247 PARAMETER Experiment Name: At_Far-red-induction_P Parameter: Age (day) Value: 7
  misc_feature: MA Experiment 20001247 PARAMETER Experiment Name: At_Far-red-induction_P Parameter: Light Value: Far-red vs. White
  misc_feature: MA Experiment 20001247 PARAMETER Experiment Name: At_Far-red-induction_P Parameter: Organism Value: A. thaliana
  misc_feature: MA Experiment 20001247 PARAMETER Experiment Name: At_Far-red-induction_P Parameter: Plant Line Value: Columbia
  misc_feature: MA Experiment 20001247 PARAMETER Experiment Name: At_Far-red-induction_P Parameter: Timepoint (hr) Value: 1
  misc_feature: MA Experiment 20001247 PARAMETER Experiment Name: At_Far-red-induction_P Parameter: Tissue Value: Whole Plant
  misc_feature: MA Experiment ID: 20001560 Result: Down-regulated in Transcription
  misc_feature: MA Experiment 20001560 PARAMETER Experiment Name: At_Drought_Soil_Dry_P Parameter: Age (day) Value: 28
  misc_feature: MA Experiment 20001560 PARAMETER Experiment Name: At_Drought_Soil_Dry_P Parameter: Organism Value: A. thaliana
  misc_feature: MA Experiment 20001560 PARAMETER Experiment Name: At_Drought_Soil_Dry_P Parameter: Plant Line Value: WS
  misc_feature: MA Experiment 20001560 PARAMETER Experiment Name: At_Drought_Soil_Dry_P Parameter: Post Timepoint (hr) Value: None
  misc_feature: MA Experiment 20001560 PARAMETER Experiment Name: At_Drought_Soil_Dry_P Parameter: Post-Treatment Value: None
  misc_feature: MA Experiment 20001560 PARAMETER Experiment Name: At_Drought_Soil_Dry_P Parameter: Timepoint (day) Value: 14
  misc_feature: MA Experiment 20001560 PARAMETER Experiment Name: At_Drought_Soil_Dry_P Parameter: Treatment Value: Drought vs. No Drought
gctcaattttctttctttctttctttctttctctgggagtttgggattttcttaagggtctttttcaattctcgctccattttgtacgcatagaactgggtttgtgtttacacacataaagctcttatcttttttcttctttcaatcgagaagattatagagctgagtgactgattggtggtttcttggagttttaatgggaggttgtttcagcaatcggattaaaacagatattgcttccagtacatggctaagttcgaaattcttgagtagagatgggagcaagggctcgtcgaccgcttccttctcttatatgcctcgaacagaaggcgagatcttgcaaaatgctaatctcaagaactttagtctcagtgaactgaaatctgcaactaggaatttccggcctgatagtgtggttggtgaaggtggatttggttgcgttttcaaaggctggatcgatgagtcctctctcgctccttctaaaccggggaccgggattgtcattgctgtgaaaagacttaaccaagaagggtttcaaggtcatcgagagtggctggctgagatcaattatttaggccagctggatcatcctaaccttgtgaaactgattggatactgcttggaagaggagcacaggcttcttgtttacgagtttatgactcgtggtagtcttgagaatcacttattcagaagaggaacattctatcagccactttcatggaacacgcgggttcgtatggctcttggtgcagctagaggacttgcttttcttcacaatgctcaaccgcaagttatataccgagacttcaaagcatctaacatcttgctagattcgaactacaacgcaaagctttcggatttcggtttggctagagatggtccaatgggtgacaacagccatgtttctaccagagtcatgggaactcagggatacgctgctccagaatatctagctacaggtcatttatcggtgaagagcgatgtatacagttttggggttgtgttactggagttgttatcaggaagacgagcaattgacaagaatcaaccagtaggagaacacaatctcgtggattgggcaagaccctacttaacaaacaagagaagacttctgcgagtgatggatcctcgtctccaaggtcaatactcactaacccgagctttgaaaattgcagttcttgcactcgattgcatatctatagatgccaagagtagaccgaccatgaacgaaatcgtcaagacaatggaagaacttcatatccagaaggaagcatcaaaagagcagcagaatcctcaaatcagcattgacaacatcatcaacaaatctccacaagctgtgaattatcctaggccttcaattatgtaacaatcctaggcgagctatttaccgggttttagagatgtatagactctttaccttctgtctgtttagatattatgttgtttggtagtaacaaaagagctggcaatgtaagggagagaaggaaacttactagttgtaaacttaggttctcttacaacgttcacatgttatctc

SEQ ID NO: 102006 - protein, 389 aa, Arabidopsis thaliana; identical to SEQ ID NO: 20837
  peptide (1)..(389): Ceres Seq. ID no. 13609255
  misc_feature (1)..(389): Homolog of NCBI NO: 15241749 NR Description: protein kinase, putative [Arabidopsis thaliana]
  misc_feature (1)..(389): Homolog of NCBI NO: 166809 NR Description: protein kinase
  misc_feature (1)..(367): Homolog of NCBI NO: 34906046 NR Description: putative serine/threonine-specific protein kinase
  misc_feature (1)..(356): Homolog of NCBI NO: 15222437 NR Description: protein kinase (APK1a) [Arabidopsis thaliana]
  misc_feature (1)..(380): Homolog of NCBI NO: 15227001 NR Description: protein kinase (APK1b) [Arabidopsis thaliana]
  misc_feature (1)..(273): Homolog of NCBI NO: 8778537 NR Description: F22G5.5 [Arabidopsis thaliana]
  misc_feature (255)..(356): Homolog of NCBI NO: 8778537 NR Description: F22G5.5 [Arabidopsis thaliana]
  misc_feature (1)..(368): Homolog of NCBI NO: 14719339 NR Description: putative protein kinase [Oryza sativa]
  misc_feature (1)..(389): Homolog of NCBI NO: 34897424 NR Description: putative protein kinase [Oryza sativa (japonica group)] >gi|27545044|gb|AAO18450.1| putative protein kinase
  misc_feature (1)..(366): Homolog of NCBI NO: 15225520 NR Description: protein kinase, putative [Arabidopsis thaliana]

SEQ ID NO: 102007 - protein, 350 aa, Arabidopsis thaliana; identical to SEQ ID NO: 20838
  peptide (1)..(350): Ceres Seq. ID no. 13609256
  misc_feature (1)..(350): Homolog of NCBI NO: 15241749 NR Description: protein kinase, putative [Arabidopsis thaliana]
  misc_feature (1)..(350): Homolog of NCBI NO: 166809 NR Description: protein kinase
  misc_feature (1)..(328): Homolog of NCBI NO: 34906046 NR Description: putative serine/threonine-specific protein kinase
  misc_feature (1)..(317): Homolog of NCBI NO: 15222437 NR Description: protein kinase (APK1a) [Arabidopsis thaliana]
  misc_feature (1)..(341): Homolog of NCBI NO: 15227001 NR Description: protein kinase (APK1b) [Arabidopsis thaliana]
  misc_feature (1)..(234): Homolog of NCBI NO: 8778537 NR Description: F22G5.5 [Arabidopsis thaliana]
  misc_feature (216)..(317): Homolog of NCBI NO: 8778537 NR Description: F22G5.5 [Arabidopsis thaliana]
  misc_feature (1)..(329): Homolog of NCBI NO: 14719339 NR Description: putative protein kinase [Oryza sativa]
  misc_feature (1)..(350): Homolog of NCBI NO: 34897424 NR Description: putative protein kinase [Oryza sativa (japonica group)] >gi|27545044|gb|AAO18450.1| putative protein kinase
  misc_feature (1)..(327): Homolog of NCBI NO: 15225520 NR Description: protein kinase, putative [Arabidopsis thaliana]

SEQ ID NO: 102008 - protein, 236 aa, Arabidopsis thaliana; identical to SEQ ID NO: 20839
  peptide (1)..(236): Ceres Seq. ID no. 13609257
  misc_feature (1)..(236): Homolog of NCBI NO: 15241749 NR Description: protein kinase, putative [Arabidopsis thaliana]
  misc_feature (1)..(236): Homolog of NCBI NO: 166809 NR Description: protein kinase
  misc_feature (1)..(214): Homolog of NCBI NO: 34906046 NR Description: putative serine/threonine-specific protein kinase
  misc_feature (1)..(203): Homolog of NCBI NO: 15222437 NR Description: protein kinase (APK1a) [Arabidopsis thaliana]
  misc_feature (1)..(227): Homolog of NCBI NO: 15227001 NR Description: protein kinase (APK1b) [Arabidopsis thaliana]
  misc_feature (1)..(120): Homolog of NCBI NO: 8778537 NR Description: F22G5.5 [Arabidopsis thaliana]
  misc_feature (102)..(203): Homolog of NCBI NO: 8778537 NR Description: F22G5.5 [Arabidopsis thaliana]
  misc_feature (1)..(215): Homolog of NCBI NO: 14719339 NR Description: putative protein kinase [Oryza sativa]
  misc_feature (1)..(236): Homolog of NCBI NO: 34897424 NR Description: putative protein kinase [Oryza sativa (japonica group)] >gi|27545044|gb|AAO18450.1| putative protein kinase
  misc_feature (1)..(213): Homolog of NCBI NO: 15225520 NR Description: protein kinase, putative [Arabidopsis thaliana]

SEQ ID NO: 102009 - DNA, 1393 bp, Arabidopsis thaliana
  misc_feature (1)..(1393): Ceres Seq. ID no. 13609258
  misc_feature: MA Experiment ID: 108434 Result: Up-regulated in Transcription
  misc_feature: MA Experiment 108434 PARAMETER Experiment Name: At_Root_Tips_cDNA_P Parameter: Tissue Value: Root Tips
  misc_feature: MA Experiment ID: 108462 Result: Down-regulated in Transcription
  misc_feature: MA Experiment 108462 PARAMETER Experiment Name: At_Germinating_Seeds_cDNA_P Parameter: Age (day) Value: 2 vs. 0
  misc_feature: MA Experiment 108462 PARAMETER Experiment Name: At_Germinating_Seeds_cDNA_P Parameter: Tissue Value: Germinating Seeds
  misc_feature: MA Experiment ID: 108463 Result: Down-regulated in Transcription
  misc_feature: MA Experiment 108463 PARAMETER Experiment Name: At_Germinating_Seeds_cDNA_P Parameter: Age (day) Value: 3 vs. 0
  misc_feature: MA Experiment 108463 PARAMETER Experiment Name: At_Germinating_Seeds_cDNA_P Parameter: Tissue Value: Germinating Seeds
  misc_feature: MA Experiment ID: 108464 Result: Down-regulated in Transcription
  misc_feature: MA Experiment 108464 PARAMETER Experiment Name: At_Germinating_Seeds_cDNA_P Parameter: Age (day) Value: 4 vs. 0
  misc_feature: MA Experiment 108464 PARAMETER Experiment Name: At_Germinating_Seeds_cDNA_P Parameter: Tissue Value: Germinating Seeds
  misc_feature: MA Experiment ID: 108595 Result: Down-regulated in Transcription
  misc_feature: MA Experiment 108595 PARAMETER Experiment Name: At_Ler-pi_Ovule_cDNA_P Parameter: Plant Line Value: null
  misc_feature: MA Experiment ID: 20000185 Result: Up-regulated in Transcription
  misc_feature: MA Experiment 20000185 PARAMETER Experiment Name: At_Roots__P Parameter: Age (day) Value: 7 vs. 21
  misc_feature: MA Experiment 20000185 PARAMETER Experiment Name: At_Roots__P Parameter: Organism Value: A. thaliana
  misc_feature: MA Experiment 20000185 PARAMETER Experiment Name: At_Roots__P Parameter: Tissue Value: Roots vs. Whole Plant
  misc_feature: MA Experiment ID: 20000227 Result: Up-regulated in Transcription
  misc_feature: MA Experiment 20000227 PARAMETER Experiment Name: At_Root-Tips-vs-Tops_P Parameter: Tissue Value: Root Tips vs. Root Tops
  misc_feature: MA Experiment ID: 20000234 Result: Up-regulated in Transcription
  misc_feature: MA Experiment 20000234 PARAMETER Experiment Name: At_Siliques_P Parameter: Age (day) Value: 21
  misc_feature: MA Experiment 20000234 PARAMETER Experiment Name: At_Siliques_P Parameter: Organism Value: A. thaliana
  misc_feature: MA Experiment 20000234 PARAMETER Experiment Name: At_Siliques_P Parameter: Plant Line Value: WS
  misc_feature: MA Experiment 20000234 PARAMETER Experiment Name: At_Siliques_P Parameter: Tissue Value: Less Than 5mm Siliques vs. Whole Plant
  misc_feature: MA Experiment ID: 20000235 Result: Up-regulated in Transcription
  misc_feature: MA Experiment 20000235 PARAMETER Experiment Name: At_Siliques_P Parameter: Age (day) Value: 21
  misc_feature: MA Experiment 20000235 PARAMETER Experiment Name: At_Siliques_P Parameter: Organism Value: A. thaliana
  misc_feature: MA Experiment 20000235 PARAMETER Experiment Name: At_Siliques_P Parameter: Plant Line Value: WS
  misc_feature: MA Experiment 20000235 PARAMETER Experiment Name: At_Siliques_P Parameter: Tissue Value: 5-10mm Siliques vs. Whole Plant
  misc_feature: MA Experiment ID: 20000264 Result: Up-regulated in Transcription
  misc_feature: MA Experiment 20000264 PARAMETER Experiment Name: At_Open_Flower_P Parameter: Age (day) Value: 21
  misc_feature: MA Experiment 20000264 PARAMETER Experiment Name: At_Open_Flower_P Parameter: Plant Line Value: WS
  misc_feature: MA Experiment 20000264 PARAMETER Experiment Name: At_Open_Flower_P Parameter: Tissue Value: Open Flower vs. Whole Plant
  misc_feature: MA Experiment ID: 20000437 Result: Down-regulated in Transcription
  misc_feature: MA Experiment 20000437 PARAMETER Experiment Name: At_Drought_P Parameter: Age (day) Value: 8
  misc_feature: MA Experiment 20000437 PARAMETER Experiment Name: At_Drought_P Parameter: Organism Value: A. thaliana
  misc_feature: MA Experiment 20000437 PARAMETER Experiment Name: At_Drought_P Parameter: Plant Line Value: WS
  misc_feature: MA Experiment 20000437 PARAMETER Experiment Name: At_Drought_P Parameter: Timepoint (hr) Value: 24
  misc_feature: MA Experiment 20000437 PARAMETER Experiment Name: At_Drought_P Parameter: Tissue Value: Whole Plant
  misc_feature: MA Experiment 20000437 PARAMETER Experiment Name: At_Drought_P Parameter: Treatment Value: Drought vs. No Drought
  misc_feature: MA Experiment ID: 20001451 Result: Down-regulated in Transcription
  misc_feature: MA Experiment 20001451 PARAMETER Experiment Name: At_Far-red-induction_P Parameter: Age (day) Value: 7
  misc_feature: MA Experiment 20001451 PARAMETER Experiment Name: At_Far-red-induction_P Parameter: Light Value: Far-red vs. White
  misc_feature: MA Experiment 20001451 PARAMETER Experiment Name: At_Far-red-induction_P Parameter: Organism Value: A. thaliana
  misc_feature: MA Experiment 20001451 PARAMETER Experiment Name: At_Far-red-induction_P Parameter: Plant Line Value: Columbia
  misc_feature: MA Experiment 20001451 PARAMETER Experiment Name: At_Far-red-induction_P Parameter: Timepoint (hr) Value: 24
  misc_feature: MA Experiment 20001451 PARAMETER Experiment Name: At_Far-red-induction_P Parameter: Tissue Value: Whole Plant
  misc_feature: MA Experiment ID: 20001557 Result: Up-regulated in Transcription
  misc_feature: MA Experiment 20001557 PARAMETER Experiment Name: At_Drought_Soil_Dry_P Parameter: Age (day) Value: 27
  misc_feature: MA Experiment 20001557 PARAMETER Experiment Name: At_Drought_Soil_Dry_P Parameter: Organism Value: A. thaliana
  misc_feature: MA Experiment 20001557 PARAMETER Experiment Name: At_Drought_Soil_Dry_P Parameter: Plant Line Value: WS
  misc_feature: MA Experiment 20001557 PARAMETER Experiment Name: At_Drought_Soil_Dry_P Parameter: Post Timepoint (hr) Value: 3
  misc_feature: MA Experiment 20001557 PARAMETER Experiment Name: At_Drought_Soil_Dry_P Parameter: Post-Treatment Value: Re-Water vs. No Drought
  misc_feature: MA Experiment 20001557 PARAMETER Experiment Name: At_Drought_Soil_Dry_P Parameter: Timepoint (day) Value: 13
  misc_feature: MA Experiment 20001557 PARAMETER Experiment Name: At_Drought_Soil_Dry_P Parameter: Treatment Value: Drought vs. No Drought
  misc_feature: MA Experiment ID: 20001558 Result: Up-regulated in Transcription
  misc_feature: MA Experiment 20001558 PARAMETER Experiment Name: At_Drought_Soil_Dry_P Parameter: Age (day) Value: 27
  misc_feature: MA Experiment 20001558 PARAMETER Experiment Name: At_Drought_Soil_Dry_P Parameter: Organism Value: A. thaliana
  misc_feature: MA Experiment 20001558 PARAMETER Experiment Name: At_Drought_Soil_Dry_P Parameter: Plant Line Value: WS
  misc_feature: MA Experiment 20001558 PARAMETER Experiment Name: At_Drought_Soil_Dry_P Parameter: Post Timepoint (hr) Value: 6
  misc_feature: MA Experiment 20001558 PARAMETER Experiment Name: At_Drought_Soil_Dry_P Parameter: Post-Treatment Value: Re-Water vs. No Drought
  misc_feature: MA Experiment 20001558 PARAMETER Experiment Name: At_Drought_Soil_Dry_P Parameter: Timepoint (day) Value: 13
  misc_feature: MA Experiment 20001558 PARAMETER Experiment Name: At_Drought_Soil_Dry_P Parameter: Treatment Value: Drought vs. No Drought
  misc_feature: MA Experiment ID: 20001560 Result: Up-regulated in Transcription
  misc_feature: MA Experiment 20001560 PARAMETER Experiment Name: At_Drought_Soil_Dry_P Parameter: Age (day) Value: 28
  misc_feature: MA Experiment 20001560 PARAMETER Experiment Name: At_Drought_Soil_Dry_P Parameter: Organism Value: A. thaliana
  misc_feature: MA Experiment 20001560 PARAMETER Experiment Name: At_Drought_Soil_Dry_P Parameter: Plant Line Value: WS
  misc_feature: MA Experiment 20001560 PARAMETER Experiment Name: At_Drought_Soil_Dry_P Parameter: Post Timepoint (hr) Value: None
  misc_feature: MA Experiment 20001560 PARAMETER Experiment Name: At_Drought_Soil_Dry_P Parameter: Post-Treatment Value: None
  misc_feature: MA Experiment 20001560 PARAMETER Experiment Name: At_Drought_Soil_Dry_P Parameter: Timepoint (day) Value: 14
  misc_feature: MA Experiment 20001560 PARAMETER Experiment Name: At_Drought_Soil_Dry_P Parameter: Treatment Value: Drought vs. No Drought
  misc_feature: MA Experiment ID: 20001757 Result: Up-regulated in Transcription
  misc_feature: MA Experiment 20001757 PARAMETER Experiment Name: At_50mM_NH4NO3_L-to-H_P Parameter: Timepoint (hr) Value: 6
  misc_feature: MA Experiment 20001757 PARAMETER Experiment Name: At_50mM_NH4NO3_L-to-H_P Parameter: Tissue Value: Leaf
  misc_feature: MA Experiment 20001757 PARAMETER Experiment Name: At_50mM_NH4NO3_L-to-H_P Parameter: Treatment Value: 50mM NH4NO3 vs 100mM Mannitol
acagcaaaaaatcgaaaatggttgcctcagccgccgcacatgagcaccgatcaatccaccaccgtcactttaccagacgtcatgactgctccagttcgacctgacattgtcaacttcgtccacgcccaaatctccaacaacagccgtcagccttacgcagtctccaaaaaggccggtcaccaaacctccgccgagtcctggggaaccggaagagccgtgtcacgtatccctcgtgttcctggtggtggaactcaccgtgccggtcaagcagcgttcggaaacatgtgtcgtggtggtcgtatgtttgctccgactaagatctggagacgctggcaccgtcgtgtcaatgtcaacatgaagaggcacgcgattgtttctgcaatcgctgctactgctgttccagctcttgtgatggctcgtggtcacaagatcgagaatgttcctgagatgcctcttgttgttagcgactcagctgaagctgtggagaagacatcagctgcgatcaaggtattgaagcagatcggtgcttacgacgatgcggagaaagctaagaacagtattggaattcgtcctggtaaaggtaaaatgaggaatcgtcgttacatttctaggaaaggtcctcttgttgtgtttggaactgaaggagccaagattgtgaaagcttttaggaatcttcctggtgttgagctttgtcacgttgagaggcttaacttgttgaaattagcccctggtggtcaccttggtaggtttgtgatttggactaagtctgcttttgagaagcttgaatctatctatggctcgtttgagaaaccatcagagaagaagaagggttacgtcttgcctcgtgcgaagatggtgaatgctgatcttgctaggattattaactccgatgaggtacagagtgtggtgaacccgattaaggatggttccaagagagcggttctgaagaagaatccattgaagaaccttaatgtgatgttcaagttgaatccttatgctaagaccgcaaagagaatgtctctgttggctgaagcttcaagggttaaggctaagaaggagaagctcgagaagaagaggaaagtcgtcactaaggaggaggcccaagcgatcaaagcagcaggcaaggcttggtatcagactatgatttcagacagtgactacaccgagttcgataacttcaccaagtggcttggcgctagtcagtaatgatgctctcgtcatcgcaaagtctcttatatctaggcaaagattttggttttctgatttatgttcttcgtttgtattggatttatctgggattttatgttgttgagttggtaagacgatttttaagaactatgatggtgtttttcaaactcttttcaatctgtttcccttagtgctctttactcgc

SEQ ID NO: 102010 - protein, 401 aa, Arabidopsis thaliana
  peptide (1)..(401): Ceres Seq. ID no. 13609259
  misc_feature (20)..(264): Pfam Name: Ribosomal protein L4/L1 family Pfam Description: Ribosomal protein L4/L1 family
  misc_feature (14)..(401): Homolog of NCBI NO: 15242558 NR Description: 60S ribosomal protein L4/L1 (RPL4D) [Arabidopsis
  misc_feature (14)..(401): Homolog of NCBI NO: 26450328 NR Description: putative 60S ribosomal protein [Arabidopsis
  misc_feature (14)..(401): Homolog of NCBI NO: 15232723 NR Description: 60S ribosomal protein L4/L1 (RPL4A) [Arabidopsis
  misc_feature (14)..(401): Homolog of NCBI NO: 21593543 NR Description: 60S ribosomal protein L4-B (L1) [Arabidopsis
  misc_feature (14)..(401): Homolog of NCBI NO: 17367847 NR Description: 60S ribosomal protein L4 (L1)
  misc_feature (95)..(401): Homolog of NCBI NO: 13605831 NR Description: AT5g02870/F9G14_180 [Arabidopsis thaliana]
  misc_feature (14)..(401): Homolog of NCBI NO: 34393487 NR Description: putative 60S ribosomal protein L4/L1 [Oryza
  misc_feature (14)..(401): Homolog of NCBI NO: 34897236 NR Description: putative 60S ribosomal protein L1 [Oryza sativa
  misc_feature (44)..(401): Homolog of NCBI NO: 6441068 NR Description: 60S ribosomal protein L4 [Chlamydomonas sp. HS-5]
  misc_feature (20)..(366): Homolog of NCBI NO: 1350686 NR Description: 60S RIBOSOMAL PROTEIN L4 (L1)
TAKNRKWLPQPPHMSTDQSTTVTLPDVMTAPVRPDIVNFVHAQISNNSRQPYAVSKKAGHQTSAESWGTGRAVSRIPRVPGGGTHRAGQAAFGNMCRGGRMFAPTKIWRRWHRRVNVNMKRHAIVSAIAATAVPALVMARGHKIENVPEMPLVVSDSAEAVEKTSAAIKVLKQIGAYDDAEKAKNSIGIRPGKGKMRNRRYISRKGPLVVFGTEGAKIVKAFRNLPGVELCHVERLNLLKLAPGGHLGRFVIWTKSAFEKLESIYGSFEKPSEKKKGYVLPRAKMVNADLARIINSDEVQSVVNPIKDGSKRAVLKKNPLKNLNVMFKLNPYAKTAKRMSLLAEASRVKAKKEKLEKKRKVVTKEEAQAIKAAGKAWYQTMISDSDYTEFDNFTKWLGASQ

SEQ ID NO: 102011 - protein, 388 aa, Arabidopsis thaliana; identical to SEQ ID NO: 36167
  peptide (1)..(388): Ceres Seq. ID no. 13609260
  misc_feature (7)..(251): Pfam Name: Ribosomal protein L4/L1 family Pfam Description: Ribosomal protein L4/L1 family
  misc_feature (1)..(388): Homolog of NCBI NO: 15242558 NR Description: 60S ribosomal protein L4/L1 (RPL4D) [Arabidopsis
  misc_feature (1)..(388): Homolog of NCBI NO: 26450328 NR Description: putative 60S ribosomal protein [Arabidopsis
  misc_feature (1)..(388): Homolog of NCBI NO: 15232723 NR Description: 60S ribosomal protein L4/L1 (RPL4A) [Arabidopsis
  misc_feature (1)..(388): Homolog of NCBI NO: 21593543 NR Description: 60S ribosomal protein L4-B (L1) [Arabidopsis
  misc_feature (1)..(388): Homolog of NCBI NO: 17367847 NR Description: 60S ribosomal protein L4 (L1)
  misc_feature (82)..(388): Homolog of NCBI NO: 13605831 NR Description: AT5g02870/F9G14_180 [Arabidopsis thaliana]
  misc_feature (1)..(388): Homolog of NCBI NO: 34393487 NR Description: putative 60S ribosomal protein L4/L1 [Oryza
  misc_feature (1)..(388): Homolog of NCBI NO: 34897236 NR Description: putative 60S ribosomal protein L1 [Oryza sativa
  misc_feature (31)..(388): Homolog of NCBI NO: 6441068 NR Description: 60S ribosomal protein L4 [Chlamydomonas sp. HS-5]
  misc_feature (7)..(353): Homolog of NCBI NO: 1350686 NR Description: 60S RIBOSOMAL PROTEIN L4 (L1)

SEQ ID NO: 102012 - protein, 374 aa, Arabidopsis thaliana
  peptide (1)..(374): Ceres Seq. ID no. 13609261
  misc_feature (1)..(237): Pfam Name: Ribosomal protein L4/L1 family Pfam Description: Ribosomal protein L4/L1 family
  misc_feature (1)..(374): Homolog of NCBI NO: 15242558 NR Description: 60S ribosomal protein L4/L1 (RPL4D) [Arabidopsis
  misc_feature (1)..(374): Homolog of NCBI NO: 26450328 NR Description: putative 60S ribosomal protein [Arabidopsis
  misc_feature (1)..(374): Homolog of NCBI NO: 15232723 NR Description: 60S ribosomal protein L4/L1 (RPL4A) [Arabidopsis
  misc_feature (1)..(374): Homolog of NCBI NO: 21593543 NR Description: 60S ribosomal protein L4-B (L1) [Arabidopsis
  misc_feature (1)..(374): Homolog of NCBI NO: 17367847 NR Description: 60S ribosomal protein L4 (L1)
  misc_feature (68)..(374): Homolog of NCBI NO: 13605831 NR Description: AT5g02870/F9G14_180 [Arabidopsis thaliana]
  misc_feature (1)..(374): Homolog of NCBI NO: 34393487 NR Description: putative 60S ribosomal protein L4/L1 [Oryza
  misc_feature (1)..(374): Homolog of NCBI NO: 34897236 NR Description: putative 60S ribosomal protein L1 [Oryza sativa
  misc_feature (17)..(374): Homolog of NCBI NO: 6441068 NR Description: 60S ribosomal protein L4 [Chlamydomonas sp. HS-5]
  misc_feature (1)..(339): Homolog of NCBI NO: 1350686 NR Description: 60S RIBOSOMAL PROTEIN L4 (L1)
MTAPVRPDIVNFVHAQISNNSRQPYAVSKKAGHQTSAESWGTGRAVSRIPRVPGGGTHRAGQAAFGNMCRGGRMFAPTKIWRRWHRRVNVNMKRHAIVSAIAATAVPALVMARGHKIENVPEMPLVVSDSAEAVEKTSAAIKVLKQIGAYDDAEKAKNSIGIRPGKGKMRNRRYISRKGPLVVFGTEGAKIVKAFRNLPGVELCHVERLNLLKLAPGGHLGRFVIWTKSAFEKLESIYGSFEKPSEKKKGYVLPRAKMVNADLARIINSDEVQSVVNPIKDGSKRAVLKKNPLKNLNVMFKLNPYAKTAKRMSLLAEASRVKAKKEKLEKKRKVVTKEEAQAIKAAGKAWYQTMISDSDYTEFDNFTKWLGASQ

SEQ ID NO: 102013 - DNA, 986 bp, Arabidopsis thaliana
  misc_feature (1)..(986): Ceres Seq. ID no. 13609262
  misc_feature: MA Experiment ID: 108434 Result: Down-regulated in Transcription
  misc_feature: MA Experiment 108434 PARAMETER Experiment Name: At_Root_Tips_cDNA_P Parameter: Tissue Value: Root Tips
  misc_feature: MA Experiment ID: 108435 Result: Down-regulated in Transcription
  misc_feature: MA Experiment 108435 PARAMETER Experiment Name: At_stm_Mutants_cDNA_P Parameter: Plant Line Value: wt Landsburg vs stm
  misc_feature: MA Experiment 108435 PARAMETER Experiment Name: At_stm_Mutants_cDNA_P Parameter: Tissue Value: Shoot Apical Meristem Region
  misc_feature: MA Experiment ID: 108461 Result: Up-regulated in Transcription
  misc_feature: MA Experiment 108461 PARAMETER Experiment Name: At_Germinating_Seeds_cDNA_P Parameter: Age (day) Value: 1 vs. 0
  misc_feature: MA Experiment 108461 PARAMETER Experiment Name: At_Germinating_Seeds_cDNA_P Parameter: Tissue Value: Germinating Seeds
  misc_feature: MA Experiment ID: 108462 Result: Up-regulated in Transcription
  misc_feature: MA Experiment 108462 PARAMETER Experiment Name: At_Germinating_Seeds_cDNA_P Parameter: Age (day) Value: 2 vs. 0
  misc_feature: MA Experiment 108462 PARAMETER Experiment Name: At_Germinating_Seeds_cDNA_P Parameter: Tissue Value: Germinating Seeds
  misc_feature: MA Experiment ID: 108463 Result: Up-regulated in Transcription
  misc_feature: MA Experiment 108463 PARAMETER Experiment Name: At_Germinating_Seeds_cDNA_P Parameter: Age (day) Value: 3 vs. 0
  misc_feature: MA Experiment 108463 PARAMETER Experiment Name: At_Germinating_Seeds_cDNA_P Parameter: Tissue Value: Germinating Seeds
  misc_feature: MA Experiment ID: 20000180 Result: Up-regulated in Transcription
  misc_feature: MA Experiment 20000180 PARAMETER Experiment Name: At_Germinating_Seeds_P Parameter: Age (hr) Value: 24 vs. 0
  misc_feature: MA Experiment 20000180 PARAMETER Experiment Name: At_Germinating_Seeds_P Parameter: Tissue Value: Germinating Seeds
  misc_feature: MA Experiment ID: 20000185 Result: Down-regulated in Transcription
  misc_feature: MA Experiment 20000185 PARAMETER Experiment Name: At_Roots__P Parameter: Age (day) Value: 7 vs. 21
  misc_feature: MA Experiment 20000185 PARAMETER Experiment Name: At_Roots__P Parameter: Organism Value: A. thaliana
  misc_feature: MA Experiment 20000185 PARAMETER Experiment Name: At_Roots__P Parameter: Tissue Value: Roots vs. Whole Plant
  misc_feature: MA Experiment ID: 20000224 Result: Up-regulated in Transcription
  misc_feature: MA Experiment ID: 20000227 Result: Down-regulated in Transcription
  misc_feature: MA Experiment 20000227 PARAMETER Experiment Name: At_Root-Tips-vs-Tops_P Parameter: Tissue Value: Root Tips vs. Root Tops
  misc_feature: MA Experiment ID: 20000439 Result: Down-regulated in Transcription
  misc_feature: MA Experiment 20000439 PARAMETER Experiment Name: At_Roots__P Parameter: Age (day) Value: 14 vs. 21
  misc_feature: MA Experiment 20000439 PARAMETER Experiment Name: At_Roots__P Parameter: Organism Value: A. thaliana
  misc_feature: MA Experiment 20000439 PARAMETER Experiment Name: At_Roots__P Parameter: Tissue Value: Roots vs. Whole Plant
  misc_feature: MA Experiment ID: 20001248 Result: Down-regulated in Transcription
  misc_feature: MA Experiment 20001248 PARAMETER Experiment Name: At_Far-red-induction_P Parameter: Age (day) Value: 7
  misc_feature: MA Experiment 20001248 PARAMETER Experiment Name: At_Far-red-induction_P Parameter: Light Value: Far-red vs. White
  misc_feature: MA Experiment 20001248 PARAMETER Experiment Name: At_Far-red-induction_P Parameter: Organism Value: A. thaliana
  misc_feature: MA Experiment 20001248 PARAMETER Experiment Name: At_Far-red-induction_P Parameter: Plant Line Value: Columbia
  misc_feature: MA Experiment 20001248 PARAMETER Experiment Name: At_Far-red-induction_P Parameter: Timepoint (hr) Value: 4
  misc_feature: MA Experiment 20001248 PARAMETER Experiment Name: At_Far-red-induction_P Parameter: Tissue Value: Whole Plant
  misc_feature: MA Experiment ID: 20001451 Result: Down-regulated in Transcription
  misc_feature: MA Experiment 20001451 PARAMETER Experiment Name: At_Far-red-induction_P Parameter: Age (day) Value: 7
  misc_feature: MA Experiment 20001451 PARAMETER Experiment Name: At_Far-red-induction_P Parameter: Light Value: Far-red vs. White
  misc_feature: MA Experiment 20001451 PARAMETER Experiment Name: At_Far-red-induction_P Parameter: Organism Value: A. thaliana
  misc_feature: MA Experiment 20001451 PARAMETER Experiment Name: At_Far-red-induction_P Parameter: Plant Line Value: Columbia
  misc_feature: MA Experiment 20001451 PARAMETER Experiment Name: At_Far-red-induction_P Parameter: Timepoint (hr) Value: 24
  misc_feature: MA Experiment 20001451 PARAMETER Experiment Name: At_Far-red-induction_P Parameter: Tissue Value: Whole Plant
  misc_feature: MA Experiment ID: 20001557 Result: Down-regulated in Transcription
  misc_feature: MA Experiment 20001557 PARAMETER Experiment Name: At_Drought_Soil_Dry_P Parameter: Age (day) Value: 27
  misc_feature: MA Experiment 20001557 PARAMETER Experiment Name: At_Drought_Soil_Dry_P Parameter: Organism Value: A. thaliana
  misc_feature: MA Experiment 20001557 PARAMETER Experiment Name: At_Drought_Soil_Dry_P Parameter: Plant Line Value: WS
  misc_feature: MA Experiment 20001557 PARAMETER Experiment Name: At_Drought_Soil_Dry_P Parameter: Post Timepoint (hr) Value: 3
  misc_feature: MA Experiment 20001557 PARAMETER Experiment Name: At_Drought_Soil_Dry_P Parameter: Post-Treatment Value: Re-Water vs. No Drought
  misc_feature: MA Experiment 20001557 PARAMETER Experiment Name: At_Drought_Soil_Dry_P Parameter: Timepoint (day) Value: 13
  misc_feature: MA Experiment 20001557 PARAMETER Experiment Name: At_Drought_Soil_Dry_P Parameter: Treatment Value: Drought vs. No Drought
  misc_feature: MA Experiment ID: 20001558 Result: Down-regulated in Transcription
  misc_feature: MA Experiment 20001558 PARAMETER Experiment Name: At_Drought_Soil_Dry_P Parameter: Age (day) Value: 27
  misc_feature: MA Experiment 20001558 PARAMETER Experiment Name: At_Drought_Soil_Dry_P Parameter: Organism Value: A. thaliana
  misc_feature: MA Experiment 20001558 PARAMETER Experiment Name: At_Drought_Soil_Dry_P Parameter: Plant Line Value: WS
  misc_feature: MA Experiment 20001558 PARAMETER Experiment Name: At_Drought_Soil_Dry_P Parameter: Post Timepoint (hr) Value: 6
  misc_feature: MA Experiment 20001558 PARAMETER Experiment Name: At_Drought_Soil_Dry_P Parameter: Post-Treatment Value: Re-Water vs. No Drought
  misc_feature: MA Experiment 20001558 PARAMETER Experiment Name: At_Drought_Soil_Dry_P Parameter: Timepoint (day) Value: 13
  misc_feature: MA Experiment 20001558 PARAMETER Experiment Name: At_Drought_Soil_Dry_P Parameter: Treatment Value: Drought vs. No Drought
  misc_feature: MA Experiment ID: 20001560 Result: Down-regulated in Transcription
  misc_feature: MA Experiment 20001560 PARAMETER Experiment Name: At_Drought_Soil_Dry_P Parameter: Age (day) Value: 28
  misc_feature: MA Experiment 20001560 PARAMETER Experiment Name: At_Drought_Soil_Dry_P Parameter: Organism Value: A. thaliana
  misc_feature: MA Experiment 20001560 PARAMETER Experiment Name: At_Drought_Soil_Dry_P Parameter: Plant Line Value: WS
  misc_feature: MA Experiment 20001560 PARAMETER Experiment Name: At_Drought_Soil_Dry_P Parameter: Post Timepoint (hr) Value: None
  misc_feature: MA Experiment 20001560 PARAMETER Experiment Name: At_Drought_Soil_Dry_P Parameter: Post-Treatment Value: None
  misc_feature: MA Experiment 20001560 PARAMETER Experiment Name: At_Drought_Soil_Dry_P Parameter: Timepoint (day) Value: 14
  misc_feature: MA Experiment 20001560 PARAMETER Experiment Name: At_Drought_Soil_Dry_P Parameter: Treatment Value: Drought vs. No Drought
aaaaaaaatccgtagtttcttctacagaatcagatctttgtatcgtcaatggctccttcttttatttttgtagaagatcgtccagctccgcttgatgctacttctgatccaccgtctctcttcgacggaaccacaaggttgtacacaagctacgtttgcccatttgctcaacgagtttggatcactcgaaacttcaagggtttgcaagaaaagattaaacttgttcctttggatcttgggaataggcctgcttggtacaaggagaaagtatatccagagaacaaggtgccagcgcttgagcacaatggaaaaatcattggggagagtctggatttgattaaatatcttgataacacttttgaagggccttctctttaccccgaggatcatgcaaaaagagagtttggcgacgagttgctcaagtatactgatactttcgttaaaactatgtatgtgtcactcaaaggagacccctctaaagaaaccgcacctgtgttagattatctggaaaacgctctgtataagttcgatgacgggccgttcttcctcggtcagttaagcttggttgatatcgcctatatcccgttcattgaaaggttccaaactgtactcaatgaattatttaagtgcgacattactgccgaacgtcccaaactatcagcatggattgaggaaattaacaagagcgatggctatgcacagacgaaaatggatcctaaggagattgtggaggttttcaagaaaaaattcatgtaactgtaagcaagcacgaagcagtaaagtgtatgagaccaaaccaccttgtacgaacaggtggtctttggatatgaagaaataagatgtgtacttgaacctgatgatgcaataagatttgtactttaagcagcaacagcttaatctgtattctagtgttgatcaaattatcaaccattgacattgttaatatattactgtatgatagtaatactatcaaaatctcacacatt

SEQ ID NO: 102014 - protein, 235 aa, Arabidopsis thaliana; identical to SEQ ID NO: 29141
  peptide (1)..(235): Ceres Seq. ID no. 13609263
  misc_feature (144)..(214): Pfam Name: Glutathione S-transferase, C-terminal domain Pfam Description: Glutathione S-transferase, C-terminal domain
  misc_feature (1)..(235): Homolog of NCBI NO: 15241956 NR Description: In2-1 protein, putative [Arabidopsis thaliana]
  misc_feature (1)..(235): Homolog of NCBI NO: 21537338 NR Description: In2-1 protein [Arabidopsis thaliana]
  misc_feature (1)..(235): Homolog of NCBI NO: 11357919 NR Description: hypothetical protein F9G14.90 - Arabidopsis >gi|7413553|emb|CAB86032.1| putative protein [Arabidopsis
  misc_feature (1)..(235): Homolog of NCBI NO: 30679765 NR Description: In2-1 protein, putative [Arabidopsis thaliana]

SEQ ID NO: 102015 - DNA, 2641 bp, Arabidopsis thaliana
  misc_feature (1)..(2641): Ceres Seq. ID no. 13609266
  misc_feature: MA Experiment ID: 108435 Result: Up-regulated in Transcription
  misc_feature: MA Experiment 108435 PARAMETER Experiment Name: At_stm_Mutants_cDNA_P Parameter: Plant Line Value: wt Landsburg vs stm
  misc_feature: MA Experiment 108435 PARAMETER Experiment Name: At_stm_Mutants_cDNA_P Parameter: Tissue Value: Shoot Apical Meristem Region
  misc_feature: MA Experiment ID: 108461 Result: Down-regulated in Transcription
  misc_feature: MA Experiment 108461 PARAMETER Experiment Name: At_Germinating_Seeds_cDNA_P Parameter: Age (day) Value: 1 vs. 0
  misc_feature: MA Experiment 108461 PARAMETER Experiment Name: At_Germinating_Seeds_cDNA_P Parameter: Tissue Value: Germinating Seeds
  misc_feature: MA Experiment ID: 108569 Result: Up-regulated in Transcription
  misc_feature: MA Experiment 108569 PARAMETER Experiment Name: At_0.001%_MeJA__cDNA_P Parameter: Timepoint (hr) Value: 6
  misc_feature: MA Experiment 108569 PARAMETER Experiment Name: At_0.001%_MeJA__cDNA_P Parameter: Tissue Value: Aerial
  misc_feature: MA Experiment 108569 PARAMETER Experiment Name: At_0.001%_MeJA__cDNA_P Parameter: Treatment Value: 0.001% MeJA vs. No Treatment
  misc_feature: MA Experiment ID: 108573 Result: Up-regulated in Transcription
  misc_feature: MA Experiment 108573 PARAMETER Experiment Name: At_Drought_cDNA_P Parameter: Timepoint (hr) Value: 6
  misc_feature: MA Experiment 108573 PARAMETER Experiment Name: At_Drought_cDNA_P Parameter: Tissue Value: Aerial
  misc_feature: MA Experiment 108573 PARAMETER Experiment Name: At_Drought_cDNA_P Parameter: Treatment Value: Drought vs. No Drought
  misc_feature: MA Experiment ID: 108576 Result: Up-regulated in Transcription
  misc_feature: MA Experiment 108576 PARAMETER Experiment Name: At_42deg_Heat_cDNA_P Parameter: Temperature (deg C) Value: 42 vs. 22
  misc_feature: MA Experiment 108576 PARAMETER Experiment Name: At_42deg_Heat_cDNA_P Parameter: Timepoint (hr) Value: 1
  misc_feature: MA Experiment 108576 PARAMETER Experiment Name: At_42deg_Heat_cDNA_P Parameter: Tissue Value: Aerial
  misc_feature: MA Experiment ID: 108577 Result: Up-regulated in Transcription
  misc_feature: MA Experiment 108577 PARAMETER Experiment Name: At_42deg_Heat_cDNA_P Parameter: Temperature (deg C) Value: 42 vs. 22
  misc_feature: MA Experiment 108577 PARAMETER Experiment Name: At_42deg_Heat_cDNA_P Parameter: Timepoint (hr) Value: 6
  misc_feature: MA Experiment 108577 PARAMETER Experiment Name: At_42deg_Heat_cDNA_P Parameter: Tissue Value: Aerial
  misc_feature: MA Experiment ID: 108585 Result: Up-regulated in Transcription
  misc_feature: MA Experiment 108585 PARAMETER Experiment Name: At_5mM_NaNP_cDNA_P Parameter: Timepoint (hr) Value: 6
  misc_feature: MA Experiment 108585 PARAMETER Experiment Name: At_5mM_NaNP_cDNA_P Parameter: Tissue Value: Aerial
  misc_feature: MA Experiment 108585 PARAMETER Experiment Name: At_5mM_NaNP_cDNA_P Parameter: Treatment Value: null
  misc_feature: MA Experiment ID: 20000087 Result: Down-regulated in Transcription
  misc_feature: MA Experiment 20000087 PARAMETER Experiment Name: At_100uM_ABA_Mutants_cDNA_P Parameter: Plant Line Value: WS
  misc_feature: MA Experiment 20000087 PARAMETER Experiment Name: At_100uM_ABA_Mutants_cDNA_P Parameter: Timepoint (hr) Value: 6
  misc_feature: MA Experiment 20000087 PARAMETER Experiment Name: At_100uM_ABA_Mutants_cDNA_P Parameter: Tissue Value: Aerial
  misc_feature: MA Experiment 20000087 PARAMETER Experiment Name: At_100uM_ABA_Mutants_cDNA_P Parameter: Treatment Value: 100uM ABA vs. No Treatment
  misc_feature: MA Experiment ID: 20000088 Result: Up-regulated in Transcription
  misc_feature: MA Experiment 20000088 PARAMETER Experiment Name: At_100uM_ABA_Mutants_cDNA_P Parameter: Plant Line Value: Landsberg
  misc_feature: MA Experiment 20000088 PARAMETER Experiment Name: At_100uM_ABA_Mutants_cDNA_P Parameter: Timepoint (hr) Value: 6
  misc_feature: MA Experiment 20000088 PARAMETER Experiment Name: At_100uM_ABA_Mutants_cDNA_P Parameter: Tissue Value: Aerial
  misc_feature: MA Experiment 20000088 PARAMETER Experiment Name: At_100uM_ABA_Mutants_cDNA_P Parameter: Treatment Value: 100uM ABA vs. No Treatment
  misc_feature: MA Experiment ID: 20000111 Result: Up-regulated in Transcription
  misc_feature: MA Experiment 20000111 PARAMETER Experiment Name: At_42deg_Heat_cDNA_P Parameter: Temperature (deg C) Value: 42 vs. 22
  misc_feature: MA Experiment 20000111 PARAMETER Experiment Name: At_42deg_Heat_cDNA_P Parameter: Timepoint (hr) Value: 6
  misc_feature: MA Experiment 20000111 PARAMETER Experiment Name: At_42deg_Heat_cDNA_P Parameter: Tissue Value: Aerial
  misc_feature: MA Experiment ID: 20000112 Result: Up-regulated in Transcription
  misc_feature: MA Experiment 20000112 PARAMETER Experiment Name: At_42deg_Heat_cDNA_P Parameter: Temperature (deg C) Value: 42 vs. 22
  misc_feature: MA Experiment 20000112 PARAMETER Experiment Name: At_42deg_Heat_cDNA_P Parameter: Timepoint (hr) Value: 2
  misc_feature: MA Experiment 20000112 PARAMETER Experiment Name: At_42deg_Heat_cDNA_P Parameter: Tissue Value: Aerial
  misc_feature: MA Experiment ID: 20000144 Result: Up-regulated in Transcription
  misc_feature: MA Experiment 20000144 PARAMETER Experiment Name: At_42deg_Heat_cDNA_P Parameter: Temperature (deg C) Value: 42 vs. 22
  misc_feature: MA Experiment 20000144 PARAMETER Experiment Name: At_42deg_Heat_cDNA_P Parameter: Timepoint (hr) Value: 1
  misc_feature: MA Experiment 20000144 PARAMETER Experiment Name: At_42deg_Heat_cDNA_P Parameter: Tissue Value: Aerial
  misc_feature: MA Experiment ID: 20000171 Result: Up-regulated in Transcription
  misc_feature: MA Experiment 20000171 PARAMETER Experiment Name: At_42deg_Heat_P Parameter: Age (day) Value: 14
  misc_feature: MA Experiment 20000171 PARAMETER Experiment Name: At_42deg_Heat_P Parameter: Organism Value: A. thaliana
  misc_feature: MA Experiment 20000171 PARAMETER Experiment Name: At_42deg_Heat_P Parameter: Plant Line Value: WS
  misc_feature: MA Experiment 20000171 PARAMETER Experiment Name: At_42deg_Heat_P Parameter: Temperature (deg C) Value: 42 vs. 22
  misc_feature: MA Experiment 20000171 PARAMETER Experiment Name: At_42deg_Heat_P Parameter: Timepoint (hr) Value: 1
  misc_feature: MA Experiment 20000171 PARAMETER Experiment Name: At_42deg_Heat_P Parameter: Tissue Value: Aerial
  misc_feature: MA Experiment ID: 20000173 Result: Up-regulated in Transcription
  misc_feature: MA Experiment 20000173 PARAMETER Experiment Name: At_42deg_Heat_P Parameter: Age (day) Value: 14
  misc_feature: MA Experiment 20000173 PARAMETER Experiment Name: At_42deg_Heat_P Parameter: Organism Value: A. thaliana
  misc_feature: MA Experiment 20000173 PARAMETER Experiment Name: At_42deg_Heat_P Parameter: Plant Line Value: WS
  misc_feature: MA Experiment 20000173 PARAMETER Experiment Name: At_42deg_Heat_P Parameter: Temperature (deg C) Value: 42 vs. 22
  misc_feature: MA Experiment 20000173 PARAMETER Experiment Name: At_42deg_Heat_P Parameter: Timepoint (hr) Value: 6
  misc_feature: MA Experiment 20000173 PARAMETER Experiment Name: At_42deg_Heat_P Parameter: Tissue Value: Aerial
  misc_feature: MA Experiment ID: 20000182 Result: Up-regulated in Transcription
  misc_feature: MA Experiment 20000182 PARAMETER Experiment Name: At_2mM_SA_P Parameter: Age (day) Value: 14
  misc_feature: MA Experiment 20000182 PARAMETER Experiment Name: At_2mM_SA_P Parameter: Organism Value: A. thaliana
  misc_feature: MA Experiment 20000182 PARAMETER Experiment Name: At_2mM_SA_P Parameter: Plant Line Value: WS
  misc_feature: MA Experiment 20000182 PARAMETER Experiment Name: At_2mM_SA_P Parameter: Timepoint (hr) Value: 6
  misc_feature: MA Experiment 20000182 PARAMETER Experiment Name: At_2mM_SA_P Parameter: Tissue Value: Aerial
  misc_feature: MA Experiment 20000182 PARAMETER Experiment Name: At_2mM_SA_P Parameter: Treatment Value: 2mM SA vs. No Treatment
  misc_feature: MA Experiment ID: 20000224 Result: Down-regulated in Transcription
  misc_feature: MA Experiment ID: 20001911 Result: Up-regulated in Transcription
  misc_feature: MA Experiment 20001911 PARAMETER Experiment Name: At_Drought_Reproduction_P Parameter: Age (day) Value: 40
  misc_feature: MA Experiment 20001911 PARAMETER Experiment Name: At_Drought_Reproduction_P Parameter: Organism Value: A. thaliana
  misc_feature: MA Experiment 20001911 PARAMETER Experiment Name: At_Drought_Reproduction_P Parameter: Plant Line Value: WS
  misc_feature: MA Experiment 20001911 PARAMETER Experiment Name: At_Drought_Reproduction_P Parameter: Timepoint (day) Value: 10
  misc_feature: MA Experiment 20001911 PARAMETER Experiment Name: At_Drought_Reproduction_P Parameter: Tissue Value: Flowers
  misc_feature: MA Experiment 20001911 PARAMETER Experiment Name: At_Drought_Reproduction_P Parameter: Treatment Value: Drought vs. No Drought
tcatcatcatcatcatcaccaatcgatctctctagaaacaaatttcccaacttccttcttagagctctcttgtcagtttaagctatcattatgtcaaacgaaccggaatcctccgactcgaaaactaagaaggatttcagtactgcgattctagagaggaagaagtctccaaaccgacttgttgtcgatgaagctattaacgatgacaactctgttgtctctctccatcctactaccatggaaaaactccagcttttccgaggcgatacaattctcatcaagggtaagaagaggaaggacactgtatgcattgccctcgctgatgaaacatgtgaggaacccaagatcagaatgaataaggttgtaaggtctaacttgagggttaggctgggagatgttatttctgttcaccaatgcccagatgtcaagtatggaaagcgtgttcacatcttgcctgttgatgatacagttgaaggcgttactggaaacctctttgatgcttacctgaaaccttactttctggaggcgtaccgtccagtgaggaagggagatcttttcctagtgagaggaggaatgaggagtgtggagttcaaagtgatcgagactgatcctgctgagtactgtgtggtggctccagatacagagattttctgtgagggtgaaccagttaagagggaggacgaagaaaggcttgatgaggttggttatgacgatgttggtggtgtcaggaaacagatggctcagattagggaattggttgaacttcccttgaggcatccacaactctttaaatcaattggtgtgaagccaccaaagggaattctgctttacggacctcctggatccgggaagactcttattgctcgtgctgtggctaatgaaaccggagcattcttcttctgtatcaatggaccggaaatcatgtcgaaactagctggtgagagtgagagcaacctcaggaaagcatttgaggaggctgagaagaatgccccgtctatcatattcattgatgagattgactctattgcaccaaaaagagagaagacgaatggtgaggttgagaggaggattgtctctcagctccttacgcttatggatggactaaaatcacgtgcccatgttattgttatgggagcaacaaatcgtcccaacagtattgatccggctttgagaaggtttggaagattcgacagggaaattgatatcggtgttcctgatgaaattggacgtcttgaagttcttaggatccacacgaagaacatgaagctagctgaagatgttgatctagaaagaatctccaaggacacgcatggatatgttggagctgatcttgcagctctatgcactgaagctgcccttcaatgtatcagagagaagatggatgtgattgacttggaagatgactcaattgacgccgaaatcctcaattccatggctgtgtctaatgaacacttccacactgctcttggaaacagcaacccatccgcccttcgtgaaactgttgtggaggttccaaatgtctcctgggaggatattggaggtctcgagaatgttaagagagagcttcaggagactgttcaataccctgtggagcatccagagaaattcgagaagtttggtatgtctccatcaaagggagttcttttctacggtcctcctggatgtggtaaaaccctgttagccaaagctatagcaaacgagtgccaagcaaacttcatcagtgtcaagggacccgagcttctcacaatgtggtttggagaaagtgaagccaacgtccgagaaatctttgacaaggctcgtcaatctgctccttgtgttctgtttttcgatgagctagactccattgctactcagagagggaacagcgcgggtgatgccggcggtgcagctgacagagtgttgaatcagcttttgacagaaatggatggaatgaatgcaaagaagacggtattcattattggagcaactaacagaccggatatcatagattcagctcttcttcgacctggaagactcgaccagcttatctacattcctctacctgatgaagattcccgtctcaatatctttaaggcctgcttgagaaaatctcccgtcgctaaagatgtagatgttactgcactcgcaaagtacactcagggattcagtggtgctgatatcaccgagatctgccagagagcttgcaagtacgccatcagagaaaacatcgaaaaggatattgagaacgagcgtagaaggagccagaatccagaggccatggaggaagatatggtggatgatgaagtttcagagattagagctgctcatttcgaagagtcgatgaaatatgcaaggagaagtgtgagtgatgctgatattcgcaagtaccaagcttttgctcagacgctgcagcaatccagagggtttggatctgagttcaggtttgactcaaccgctggtgtcggacgcaccactggtgttgcagccgccgatccctttgccacttctgcagctgcagctgatgacgacgatctctacagttagattttgatttcttagtgatcgtttttcttctttctttaacttaaattaggttcttttggatgatgtcgagattgatacagtttaaaatcatctgggtttgccagcttataatcacttg

SEQ ID NO: 102016 - protein, 810 aa, Arabidopsis thaliana; identical to SEQ ID NO: 42289
  peptide (1)..(810): Ceres Seq. ID no. 13609267
  misc_feature (198)..(810): Homolog of NCBI NO: 38455496 NR Description: cell division cycle protein 48 ['Chlorella'
  misc_feature (8)..(461): Homolog of NCBI NO: 23612492 NR Description: cell division cycle ATPase, putative [Plasmodium
  misc_feature (431)..(766): Homolog of NCBI NO: 23612492 NR Description: cell division cycle ATPase, putative [Plasmodium
  misc_feature (10)..(514): Homolog of NCBI NO: 23481659 NR Description: putative cell division cycle ATPase [Plasmodium
  misc_feature (434)..(766): Homolog of NCBI NO: 23481659 NR Description: putative cell division cycle ATPase [Plasmodium
  misc_feature (30)..(719): Homolog of NCBI NO: 15669345 NR Description: cell division control protein 48 (cdc48), AAA [Methanococcus jannaschii] >gi|2492505|sp|Q58556|YB56_METJA Cell cycle protein 48 homolog MJ1156 >gi|2118117|pir||C64444 cell
  misc_feature (58)..(768): Homolog of NCBI NO: 30088847 NR Description: AAA family ATPase [Sulfolobus acidocaldarius]
  misc_feature (399)..(771): Homolog of NCBI NO: 14590568 NR Description: cell division control protein (transitional reticulum ATPase) [Pyrococcus horikoshii] >gi|7435754|pir||H71114
  misc_feature (161)..(404): Homolog of NCBI NO: 14590568 NR Description: cell division control protein (transitional reticulum ATPase) [Pyrococcus horikoshii] >gi|7435754|pir||H71114
  misc_feature (392)..(771): Homolog of NCBI NO: 14521559 NR Description: TRANSITIONAL ENDOPLASMIC RETICULUM ATPASE abyssi] >gi|7435762|pir||D75046 transitional endoplasmic

SEQ ID NO: 102017 - protein, 761 aa, Arabidopsis thaliana; identical to SEQ ID NO: 42290
  peptide (1)..(761): Ceres Seq. ID no. 13609268
  misc_feature (149)..(761): Homolog of NCBI NO: 38455496 NR Description: cell division cycle protein 48 ['Chlorella'
  misc_feature (1)..(412): Homolog of NCBI NO: 23612492 NR Description: cell division cycle ATPase, putative [Plasmodium
  misc_feature (382)..(717): Homolog of NCBI NO: 23612492 NR Description: cell division cycle ATPase, putative [Plasmodium
  misc_feature (1)..(465): Homolog of NCBI NO: 23481659 NR Description: putative cell division cycle ATPase [Plasmodium
  misc_feature (385)..(717): Homolog of NCBI NO: 23481659 NR Description: putative cell division cycle ATPase [Plasmodium
  misc_feature (1)..(670): Homolog of NCBI NO: 15669345 NR Description: cell division control protein 48 (cdc48), AAA [Methanococcus jannaschii] >gi|2492505|sp|Q58556|YB56_METJA Cell cycle protein 48 homolog MJ1156 >gi|2118117|pir||C64444 cell
  misc_feature (9)..(719): Homolog of NCBI NO: 30088847 NR Description: AAA family ATPase [Sulfolobus acidocaldarius]
  misc_feature (350)..(722): Homolog of NCBI NO: 14590568 NR Description: cell division control protein (transitional reticulum ATPase) [Pyrococcus horikoshii] >gi|7435754|pir||H71114
  misc_feature (112)..(355): Homolog of NCBI NO: 14590568 NR Description: cell division control protein (transitional reticulum ATPase) [Pyrococcus horikoshii] >gi|7435754|pir||H71114
  misc_feature (343)..(722): Homolog of NCBI NO: 14521559 NR Description: TRANSITIONAL ENDOPLASMIC RETICULUM ATPASE abyssi] >gi|7435762|pir||D75046 transitional endoplasmic

SEQ ID NO: 102018 - protein, 723 aa, Arabidopsis thaliana; identical to SEQ ID NO: 42291
  peptide (1)..(723): Ceres Seq. ID no. 13609269
  misc_feature (111)..(723): Homolog of NCBI NO: 38455496 NR Description: cell division cycle protein 48 ['Chlorella'
  misc_feature (1)..(374): Homolog of NCBI NO: 23612492 NR Description: cell division cycle ATPase, putative [Plasmodium
  misc_feature (344)..(679): Homolog of NCBI NO: 23612492 NR Description: cell division cycle ATPase, putative [Plasmodium
  misc_feature (1)..(427): Homolog of NCBI NO: 23481659 NR Description: putative cell division cycle ATPase [Plasmodium
  misc_feature (347)..(679): Homolog of NCBI NO: 23481659 NR Description: putative cell division cycle ATPase [Plasmodium
  misc_feature (1)..(632): Homolog of NCBI NO: 15669345 NR Description: cell division control protein 48 (cdc48), AAA [Methanococcus jannaschii] >gi|2492505|sp|Q58556|YB56_METJA Cell cycle protein 48 homolog MJ1156 >gi|2118117|pir||C64444 cell
  misc_feature (1)..(681): Homolog of NCBI NO: 30088847 NR Description: AAA family ATPase [Sulfolobus acidocaldarius]
  misc_feature (312)..(684): Homolog of NCBI NO: 14590568 NR Description: cell division control protein (transitional reticulum ATPase) [Pyrococcus horikoshii] >gi|7435754|pir||H71114
  misc_feature (74)..(317): Homolog of NCBI NO: 14590568 NR Description: cell division control protein (transitional reticulum ATPase) [Pyrococcus horikoshii] >gi|7435754|pir||H71114
  misc_feature (305)..(684): Homolog of NCBI NO: 14521559 NR Description: TRANSITIONAL ENDOPLASMIC RETICULUM ATPASE abyssi] >gi|7435762|pir||D75046 transitional endoplasmic

SEQ ID NO: 102019 - DNA, 1166 bp, Arabidopsis thaliana
  misc_feature (1)..(1166): Ceres Seq. ID no. 13609274
  misc_feature: MA Experiment ID: 108434 Result: Down-regulated in Transcription
  misc_feature: MA Experiment 108434 PARAMETER Experiment Name: At_Root_Tips_cDNA_P Parameter: Tissue Value: Root Tips
  misc_feature: MA Experiment ID: 108577 Result: Down-regulated in Transcription
  misc_feature: MA Experiment 108577 PARAMETER Experiment Name: At_42deg_Heat_cDNA_P Parameter: Temperature (deg C) Value: 42 vs. 22
  misc_feature: MA Experiment 108577 PARAMETER Experiment Name: At_42deg_Heat_cDNA_P Parameter: Timepoint (hr) Value: 6
  misc_feature: MA Experiment 108577 PARAMETER Experiment Name: At_42deg_Heat_cDNA_P Parameter: Tissue Value: Aerial
  misc_feature: MA Experiment ID: 108595 Result: Down-regulated in Transcription
  misc_feature: MA Experiment 108595 PARAMETER Experiment Name: At_Ler-pi_Ovule_cDNA_P Parameter: Plant Line Value: null
  misc_feature: MA Experiment ID: 20000111 Result: Down-regulated in Transcription
  misc_feature: MA Experiment 20000111 PARAMETER Experiment Name: At_42deg_Heat_cDNA_P Parameter: Temperature (deg C) Value: 42 vs. 22
  misc_feature: MA Experiment 20000111 PARAMETER Experiment Name: At_42deg_Heat_cDNA_P Parameter: Timepoint (hr) Value: 6
  misc_feature: MA Experiment 20000111 PARAMETER Experiment Name: At_42deg_Heat_cDNA_P Parameter: Tissue Value: Aerial
ccattaattactaaacccaaacccaaccaaagatcttcacaaagaaaaaaacaattggtggtatcaatggggaagaagaagatgaaactctcttctctgttcaaaggcggagccggaggattactagcggttcctctctgttacaatgccaaaactctttcgttccgagtcggcgacgacatgatcaagacggtgaactctgttttcttcgaccaccaccacaacaacaacaatggaggagatttgttggaagcggagacgcctgagtcatggtttactaactcgtccgagacagcgagtcactcaaccgagtcggatcaagaccttgacgctgagtccttagagatggtggttcgtggcgttgttagatcggagcggttattcttcgatccaggagttacgagttcgattctggaagagattgaagagaaatcgaaatcggatttgaaatcgaaggaaacggttgcggtgggagaagatcggagtacgccgattgaggagattagtgtcgcggtggcgatggaatccgaggatccgtacggtgatttccggcgatcgatggaggagatggtgacgagtcacggtgagttggctaaagattgggagagcttggaatcgatgctcgcttggtatttgaggatgaatgggaggaagagtcacggcgttatcgtcagtgcttttgttgatcttctctctggactctctgattccggcgccggaataacgtcggcttcggtatcggattcggctcgttattcaaccgccgtttcgtctttgccgtcgtcgccggtttattcgttatctcaaggtcagacggagattcaagaggaagagagacggagctgttaaaaataaaaaaaggcttaagattcggttttaaattttttaatctccggttttgtttagattaattaaccctttttggattttgtaaaaagtaattagtggttagaggaaaaagaaccattaaatatatatcaaaaatatttttagagccattattgttgatttatgtgtataacagtgccttttgtcataactcgaaagttacactatttttcccccaaaattcatgaaactcagcgaagtttatgccaacagattcagagaaattttgtataacagccccattttaaaaggaaatatacataagaataaattctgtg

SEQ ID NO: 102020 - protein, 282 aa, Arabidopsis thaliana; identical to SEQ ID NO: 28728
  peptide (1)..(282): Ceres Seq. ID no. 13609275
  misc_feature (176)..(237): Pfam Name: Protein of unknown function, DUF623 Pfam Description: Protein of unknown function, DUF623
  misc_feature (23)..(282): Homolog of NCBI NO: 15238336 NR Description: expressed protein [Arabidopsis thaliana] gene_id:MUK11.14~pir||T08445~similar to unknown protein thaliana] >gi|17529322|gb|AAL38888.1| unknown protein
  misc_feature (86)..(262): Homolog of NCBI NO: 34908538 NR Description: P0423B08.18 [Oryza sativa (japonica
  misc_feature (93)..(264): Homolog of NCBI NO: 38637034 NR Description: hypothetical protein [Oryza sativa (japonica
  misc_feature (112)..(272): Homolog of NCBI NO: 18404030 NR Description: expressed protein [Arabidopsis thaliana]
  misc_feature (77)..(282): Homolog of NCBI NO: 18409629 NR Description: expressed protein [Arabidopsis thaliana]
  misc_feature (77)..(282): Homolog of NCBI NO: 21618162 NR Description: unknown [Arabidopsis thaliana]
  misc_feature (112)..(272): Homolog of NCBI NO: 26452010 NR Description: unknown protein [Arabidopsis thaliana]
  misc_feature (162)..(245): Homolog of NCBI NO: 22331750 NR Description: similar to unknown protein (gb|AAB63094.1)
  misc_feature (121)..(242): Homolog of NCBI NO: 15220029 NR Description: hypothetical protein [Arabidopsis thaliana]
  misc_feature (143)..(233): Homolog of NCBI NO: 34912272 NR Description: P0710A02.17 [Oryza sativa (japonica

SEQ ID NO: 102021 - protein, 260 aa, Arabidopsis thaliana; identical to SEQ ID NO: 28729
  peptide (1)..(260): Ceres Seq. ID no. 13609276
  misc_feature (154)..(215): Pfam Name: Protein of unknown function, DUF623 Pfam Description: Protein of unknown function, DUF623
  misc_feature (1)..(260): Homolog of NCBI NO: 15238336 NR Description: expressed protein [Arabidopsis thaliana] gene_id:MUK11.14~pir||T08445~similar to unknown protein thaliana] >gi|17529322|gb|AAL38888.1| unknown protein
  misc_feature (64)..(240): Homolog of NCBI NO: 34908538 NR Description: P0423B08.18 [Oryza sativa (japonica
  misc_feature (71)..(242): Homolog of NCBI NO: 38637034 NR Description: hypothetical protein [Oryza sativa (japonica
  misc_feature (90)..(250): Homolog of NCBI NO: 18404030 NR Description: expressed protein [Arabidopsis thaliana]
  misc_feature (55)..(260): Homolog of NCBI NO: 18409629 NR Description: expressed protein [Arabidopsis thaliana]
  misc_feature (55)..(260): Homolog of NCBI NO: 21618162 NR Description: unknown [Arabidopsis thaliana]
  misc_feature (90)..(250): Homolog of NCBI NO: 26452010 NR Description: unknown protein [Arabidopsis thaliana]
  misc_feature (140)..(223): Homolog of NCBI NO: 22331750 NR Description: similar to unknown protein (gb|AAB63094.1)
  misc_feature (99)..(220): Homolog of NCBI NO: 15220029 NR Description: hypothetical protein [Arabidopsis thaliana]
  misc_feature (121)..(211): Homolog of NCBI NO: 34912272 NR Description: P0710A02.17 [Oryza sativa (japonica

SEQ ID NO: 102022 - protein, 255 aa, Arabidopsis thaliana; identical to SEQ ID NO: 28730
  peptide (1)..(255): Ceres Seq. ID no. 13609277
  misc_feature (149)..(210): Pfam Name: Protein of unknown function, DUF623 Pfam Description: Protein of unknown function, DUF623
  misc_feature (1)..(255): Homolog of NCBI NO: 15238336 NR Description: expressed protein [Arabidopsis thaliana] gene_id:MUK11.14~pir||T08445~similar to unknown protein thaliana] >gi|17529322|gb|AAL38888.1| unknown protein
  misc_feature (59)..(235): Homolog of NCBI NO: 34908538 NR Description: P0423B08.18 [Oryza sativa (japonica
  misc_feature (66)..(237): Homolog of NCBI NO: 38637034 NR Description: hypothetical protein [Oryza sativa (japonica
  misc_feature (85)..(245): Homolog of NCBI NO: 18404030 NR Description: expressed protein [Arabidopsis thaliana]
  misc_feature (50)..(255): Homolog of NCBI NO: 18409629 NR Description: expressed protein [Arabidopsis thaliana]
  misc_feature (50)..(255): Homolog of NCBI NO: 21618162 NR Description: unknown [Arabidopsis thaliana]
  misc_feature (85)..(245): Homolog of NCBI NO: 26452010 NR Description: unknown protein [Arabidopsis thaliana]
  misc_feature (135)..(218): Homolog of NCBI NO: 22331750 NR Description: similar to unknown protein (gb|AAB63094.1)
  misc_feature (94)..(215): Homolog of NCBI NO: 15220029 NR Description: hypothetical protein [Arabidopsis thaliana]
  misc_feature (116)..(206): Homolog of NCBI NO: 34912272 NR Description: P0710A02.17 [Oryza sativa (japonica

SEQ ID NO: 102023 - DNA, 1528 bp, Arabidopsis thaliana
  misc_feature (1)..(1528): Ceres Seq. ID no. 13609285
  misc_feature: MA Experiment ID: 20000180 Result: Up-regulated in Transcription
  misc_feature: MA Experiment 20000180 PARAMETER Experiment Name: At_Germinating_Seeds_P Parameter: Age (hr) Value: 24 vs. 0
  misc_feature: MA Experiment 20000180 PARAMETER Experiment Name: At_Germinating_Seeds_P Parameter: Tissue Value: Germinating Seeds
  misc_feature: MA Experiment ID: 20000184 Result: Up-regulated in Transcription
  misc_feature: MA Experiment 20000184 PARAMETER Experiment Name: At_Shoots__P Parameter: Age (day) Value: 7
  misc_feature: MA Experiment 20000184 PARAMETER Experiment Name: At_Shoots__P Parameter: Tissue Value: Shoots vs. Whole Plant
  misc_feature: MA Experiment ID: 20000185 Result: Down-regulated in Transcription
  misc_feature: MA Experiment 20000185 PARAMETER Experiment Name: At_Roots__P Parameter: Age (day) Value: 7 vs. 21
  misc_feature: MA Experiment 20000185 PARAMETER Experiment Name: At_Roots__P Parameter: Organism Value: A. thaliana
  misc_feature: MA Experiment 20000185 PARAMETER Experiment Name: At_Roots__P Parameter: Tissue Value: Roots vs. Whole Plant
  misc_feature: MA Experiment ID: 20000438 Result: Up-regulated in Transcription
  misc_feature: MA Experiment 20000438 PARAMETER Experiment Name: At_Shoots__P Parameter: Age (day) Value: 14
  misc_feature: MA Experiment 20000438 PARAMETER Experiment Name: At_Shoots__P Parameter: Tissue Value: Shoots vs. Whole Plant
  misc_feature: MA Experiment ID: 20000439 Result: Down-regulated in Transcription
  misc_feature: MA Experiment 20000439 PARAMETER Experiment Name: At_Roots__P Parameter: Age (day) Value: 14 vs. 21
  misc_feature: MA Experiment 20000439 PARAMETER Experiment Name: At_Roots__P Parameter: Organism Value: A. thaliana
  misc_feature: MA Experiment 20000439 PARAMETER Experiment Name: At_Roots__P Parameter: Tissue Value: Roots vs. Whole Plant
  misc_feature: MA Experiment ID: 20001451 Result: Down-regulated in Transcription
  misc_feature: MA Experiment 20001451 PARAMETER Experiment Name: At_Far-red-induction_P Parameter: Age (day) Value: 7
  misc_feature: MA Experiment 20001451 PARAMETER Experiment Name: At_Far-red-induction_P Parameter: Light Value: Far-red vs. White
  misc_feature: MA Experiment 20001451 PARAMETER Experiment Name: At_Far-red-induction_P Parameter: Organism Value: A. thaliana
  misc_feature: MA Experiment 20001451 PARAMETER Experiment Name: At_Far-red-induction_P Parameter: Plant Line Value: Columbia
  misc_feature: MA Experiment 20001451 PARAMETER Experiment Name: At_Far-red-induction_P Parameter: Timepoint (hr) Value: 24
  misc_feature: MA Experiment 20001451 PARAMETER Experiment Name: At_Far-red-induction_P Parameter: Tissue Value: Whole Plant
  misc_feature: MA Experiment ID: 20001556 Result: Down-regulated in Transcription
  misc_feature: MA Experiment 20001556 PARAMETER Experiment Name: At_Drought_Soil_Dry_P Parameter: Age (day) Value: 26
  misc_feature: MA Experiment 20001556 PARAMETER Experiment Name: At_Drought_Soil_Dry_P Parameter: Organism Value: A. thaliana
  misc_feature: MA Experiment 20001556 PARAMETER Experiment Name: At_Drought_Soil_Dry_P Parameter: Plant Line Value: WS
  misc_feature: MA Experiment 20001556 PARAMETER Experiment Name: At_Drought_Soil_Dry_P Parameter: Post Timepoint (hr) Value: None
  misc_feature: MA Experiment 20001556 PARAMETER Experiment Name: At_Drought_Soil_Dry_P Parameter: Post-Treatment Value: None
  misc_feature: MA Experiment 20001556 PARAMETER Experiment Name: At_Drought_Soil_Dry_P Parameter: Timepoint (day) Value: 12
  misc_feature: MA Experiment 20001556 PARAMETER Experiment Name: At_Drought_Soil_Dry_P Parameter: Treatment Value: Drought vs. No Drought
  misc_feature: MA Experiment ID: 20001557 Result: Down-regulated in Transcription
  misc_feature: MA Experiment 20001557 PARAMETER Experiment Name: At_Drought_Soil_Dry_P Parameter: Age (day) Value: 27
  misc_feature: MA Experiment 20001557 PARAMETER Experiment Name: At_Drought_Soil_Dry_P Parameter: Organism Value: A. thaliana
  misc_feature: MA Experiment 20001557 PARAMETER Experiment Name: At_Drought_Soil_Dry_P Parameter: Plant Line Value: WS
  misc_feature: MA Experiment 20001557 PARAMETER Experiment Name: At_Drought_Soil_Dry_P Parameter: Post Timepoint (hr) Value: 3
  misc_feature: MA Experiment 20001557 PARAMETER Experiment Name: At_Drought_Soil_Dry_P Parameter: Post-Treatment Value: Re-Water vs. No Drought
  misc_feature: MA Experiment 20001557 PARAMETER Experiment Name: At_Drought_Soil_Dry_P Parameter: Timepoint (day) Value: 13
  misc_feature: MA Experiment 20001557 PARAMETER Experiment Name: At_Drought_Soil_Dry_P Parameter: Treatment Value: Drought vs. No Drought
  misc_feature: MA Experiment ID: 20001558 Result: Down-regulated in Transcription
  misc_feature: MA Experiment 20001558 PARAMETER Experiment Name: At_Drought_Soil_Dry_P Parameter: Age (day) Value: 27
  misc_feature: MA Experiment 20001558 PARAMETER Experiment Name: At_Drought_Soil_Dry_P Parameter: Organism Value: A. thaliana
  misc_feature: MA Experiment 20001558 PARAMETER Experiment Name: At_Drought_Soil_Dry_P Parameter: Plant Line Value: WS
  misc_feature: MA Experiment 20001558 PARAMETER Experiment Name: At_Drought_Soil_Dry_P Parameter: Post Timepoint (hr) Value: 6
  misc_feature: MA Experiment 20001558 PARAMETER Experiment Name: At_Drought_Soil_Dry_P Parameter: Post-Treatment Value: Re-Water vs. No Drought
  misc_feature: MA Experiment 20001558 PARAMETER Experiment Name: At_Drought_Soil_Dry_P Parameter: Timepoint (day) Value: 13
  misc_feature: MA Experiment 20001558 PARAMETER Experiment Name: At_Drought_Soil_Dry_P Parameter: Treatment Value: Drought vs. No Drought
  misc_feature: MA Experiment ID: 20001559 Result: Down-regulated in Transcription
  misc_feature: MA Experiment 20001559 PARAMETER Experiment Name: At_Drought_Soil_Dry_P Parameter: Age (day) Value: 28
  misc_feature: MA Experiment 20001559 PARAMETER Experiment Name: At_Drought_Soil_Dry_P Parameter: Organism Value: A. thaliana
  misc_feature: MA Experiment 20001559 PARAMETER Experiment Name: At_Drought_Soil_Dry_P Parameter: Plant Line Value: WS
  misc_feature: MA Experiment 20001559 PARAMETER Experiment Name: At_Drought_Soil_Dry_P Parameter: Post Timepoint (hr) Value: 29
  misc_feature: MA Experiment 20001559 PARAMETER Experiment Name: At_Drought_Soil_Dry_P Parameter: Post-Treatment Value: Re-Water vs. No Drought
  misc_feature: MA Experiment 20001559 PARAMETER Experiment Name: At_Drought_Soil_Dry_P Parameter: Timepoint (day) Value: 14
  misc_feature: MA Experiment 20001559 PARAMETER Experiment Name: At_Drought_Soil_Dry_P Parameter: Treatment Value: Drought vs. No Drought
  misc_feature: MA Experiment ID: 20001904 Result: Down-regulated in Transcription
  misc_feature: MA Experiment 20001904 PARAMETER Experiment Name: At_Drought_Reproduction_P Parameter: Age (day) Value: 37
  misc_feature: MA Experiment 20001904 PARAMETER Experiment Name: At_Drought_Reproduction_P Parameter: Organism Value: A. thaliana
  misc_feature: MA Experiment 20001904 PARAMETER Experiment Name: At_Drought_Reproduction_P Parameter: Plant Line Value: WS
  misc_feature: MA Experiment 20001904 PARAMETER Experiment Name: At_Drought_Reproduction_P Parameter: Timepoint (day) Value: 7
  misc_feature: MA Experiment 20001904 PARAMETER Experiment Name: At_Drought_Reproduction_P Parameter: Tissue Value: Rosettes
  misc_feature: MA Experiment 20001904 PARAMETER Experiment Name: At_Drought_Reproduction_P Parameter: Treatment Value: Drought vs. No Drought
  misc_feature: MA Experiment ID: 20001905 Result: Down-regulated in Transcription
  misc_feature: MA Experiment 20001905 PARAMETER Experiment Name: At_Drought_Reproduction_P Parameter: Age (day) Value: 40
  misc_feature: MA Experiment 20001905 PARAMETER Experiment Name: At_Drought_Reproduction_P Parameter: Organism Value: A. thaliana
  misc_feature: MA Experiment 20001905 PARAMETER Experiment Name: At_Drought_Reproduction_P Parameter: Plant Line Value: WS
  misc_feature: MA Experiment 20001905 PARAMETER Experiment Name: At_Drought_Reproduction_P Parameter: Timepoint (day) Value: 10
  misc_feature: MA Experiment 20001905 PARAMETER Experiment Name: At_Drought_Reproduction_P Parameter: Tissue Value: Rosettes
  misc_feature: MA Experiment 20001905 PARAMETER Experiment Name: At_Drought_Reproduction_P Parameter: Treatment Value: Drought vs. No Drought
  misc_feature: MA Experiment ID: 20001906 Result: Down-regulated in Transcription
  misc_feature: MA Experiment 20001906 PARAMETER Experiment Name: At_Drought_Reproduction_P Parameter: Age (day) Value: 35
  misc_feature: MA Experiment 20001906 PARAMETER Experiment Name: At_Drought_Reproduction_P Parameter: Organism Value: A. thaliana
  misc_feature: MA Experiment 20001906 PARAMETER Experiment Name: At_Drought_Reproduction_P Parameter: Plant Line Value: WS
  misc_feature: MA Experiment 20001906 PARAMETER Experiment Name: At_Drought_Reproduction_P Parameter: Timepoint (day) Value: 5
  misc_feature: MA Experiment 20001906 PARAMETER Experiment Name: At_Drought_Reproduction_P Parameter: Tissue Value: Siliques
  misc_feature: MA Experiment 20001906 PARAMETER Experiment Name: At_Drought_Reproduction_P Parameter: Treatment Value: Drought vs. No Drought
  misc_feature: MA Experiment ID: 20001908 Result: Down-regulated in Transcription
  misc_feature: MA Experiment 20001908 PARAMETER Experiment Name: At_Drought_Reproduction_P Parameter: Age (day) Value: 40
  misc_feature: MA Experiment 20001908 PARAMETER Experiment Name: At_Drought_Reproduction_P Parameter: Organism Value: A. thaliana
  misc_feature: MA Experiment 20001908 PARAMETER Experiment Name: At_Drought_Reproduction_P Parameter: Plant Line Value: WS
  misc_feature: MA Experiment 20001908 PARAMETER Experiment Name: At_Drought_Reproduction_P Parameter: Timepoint (day) Value: 10
  misc_feature: MA Experiment 20001908 PARAMETER Experiment Name: At_Drought_Reproduction_P Parameter: Tissue Value: Siliques
  misc_feature: MA Experiment 20001908 PARAMETER Experiment Name: At_Drought_Reproduction_P Parameter: Treatment Value: Drought vs. No Drought
aacgcattattgacacgtgtcttttcatttctcttcttccggcgttttctctccgccgtttcgccaccgtacgtgacaatgtctgtttctctctccgccgcctctcacttactctgttcctccaccagagtctctctttcccccgccgtcacctcttcgtcctcgtcccctgtcgttgctctttcttcctctacatcgccacattctcttggaagcgtcgcatcttcttctctgtttcctcactcctccttcgtgcttcagaaaaaacatccgatcaatgggacgagcacgaggatgatttcaccaaaatgtgccgcttctgatgcagctcaattgataagcgctaaagaagatatcaaagttcttctccggactaagttttgccatcccatcttggttagattggggtggcacgatgctggtacttataacaagaatattgaggagtggccactgagaggtggagctaatggaagtcttaggtttgaggctgagcttaagcatgctgcaaatgctggtctgcttaatgctttaaagctcattcagcctctcaaagacaagtatcctaacatctcttatgcggacttattccagttagctagtgccacagcaatagaggaggctggtggtcctgatatcccgatgaaatatgggagagttgatgttgtagcacctgaacagtgtccagaagaaggaagactccctgatgctggacctccttcaccagctgatcatttgagagatgttttctacagaatgggacttgatgacaaggaaatagttgccttgtctggtgcacataccttagggagagccagaccagaccgtagtggttggggaaaacctgagacaaagtacacgaaaactggacctggagaagcaggaggacagtcatggacagtgaaatggctcaagttcgacaactcttatttcaaggatatcaaagaaaagagggacgacgatcttctggtgttacccactgatgcggcgctatttgaagatccttcattcaagaactatgcagagaagtatgctgaagatgtggctgcatttttcaaggactacgctgaagcccatgccaagcttagcaatctcggtgcaaaatttgatcctcccgagggcatagtcattgaaaacgttccagagaagttcgtagctgcaaagtattctacgggaaagaaggagctttcggattcgatgaaaaagaagataagagcagagtatgaagcaattggaggaagcccagataagccattacccacaaattacttcctcaacatcataattgccattggcgttttggtcctcttgtccactctctttggtggtaataacaactccgatttctctggtttctaattgacaaattatatattttgatttctcttacctacatacataattacgtggtgatcatatattccttgcaaacaaaaacatcattgttaaagtttgcttgaataaaatcaccttataaataacattgtttatttggtttttagaattttgagattagtgtgagtttctt

SEQ ID NO: 102024 - protein, 452 aa, Arabidopsis thaliana
  peptide (1)..(452): Ceres Seq. ID no. 13609286
  misc_feature (115)..(347): Pfam Name: Peroxidase Pfam Description: Peroxidase
  misc_feature (27)..(452): Homolog of NCBI NO: 15223971 NR Description: thylakoid-bound ascorbate peroxidase, putative [Arabidopsis thaliana] >gi|25285570|pir||C96804 hypothetical
  misc_feature (27)..(452): Homolog of NCBI NO: 1419390 NR Description: thylakoid-bound ascorbate peroxidase [Arabidopsis
  misc_feature (17)..(442): Homolog of NCBI NO: 4996602 NR Description: thylakoid-bound ascorbate peroxidase [Nicotiana
  misc_feature (28)..(442): Homolog of NCBI NO: 7484621 NR Description: L-ascorbate peroxidase (EC 1.11.1.11) precursor -
  misc_feature (28)..(442): Homolog of NCBI NO: 7484766 NR Description: L-ascorbate peroxidase (EC 1.11.1.11) precursor -
  misc_feature (27)..(442): Homolog of NCBI NO: 2146725 NR Description: L-ascorbate peroxidase (EC 1.11.1.11) precursor -
  misc_feature (40)..(442): Homolog of NCBI NO: 1944507 NR Description: thylakoid-bound ascorbate peroxidase [Spinacia
  misc_feature (40)..(442): Homolog of NCBI NO: 2832920 NR Description: thylakoid-bound ascorbate peroxidase [Spinacia
  misc_feature (33)..(381): Homolog of NCBI NO: 32879783 NR Description: thylakoid-bound ascorbate peroxidase [Oryza
  misc_feature (381)..(442): Homolog of NCBI NO: 32879783 NR Description: thylakoid-bound ascorbate peroxidase [Oryza
NALLTRVFSFLFFRRFLSAVSPPYVTMSVSLSAASHLLCSSTRVSLSPAVTSSSSSPVVALSSSTSPHSLGSVASSSLFPHSSFVLQKKHPINGTSTRMISPKCAASDAAQLISAKEDIKVLLRTKFCHPILVRLGWHDAGTYNKNIEEWPLRGGANGSLRFEAELKHAANAGLLNALKLIQPLKDKYPNISYADLFQLASATAIEEAGGPDIPMKYGRVDVVAPEQCPEEGRLPDAGPPSPADHLRDVFYRMGLDDKEIVALSGAHTLGRARPDRSGWGKPETKYTKTGPGEAGGQSWTVKWLKFDNSYFKDIKEKRDDDLLVLPTDAALFEDPSFKNYAEKYAEDVAAFFKDYAEAHAKLSNLGAKFDPPEGIVIENVPEKFVAAKYSTGKKELSDSMKKKIRAEYEAIGGSPDKPLPTNYFLNIIIAIGVLVLLSTLFGGNNNSDFSGF

SEQ ID NO: 102025 - protein, 426 aa, Arabidopsis thaliana; identical to SEQ ID NO: 43222
  peptide (1)..(426): Ceres Seq. ID no. 13609287
  misc_feature (89)..(321): Pfam Name: Peroxidase Pfam Description: Peroxidase
  misc_feature (1)..(426): Homolog of NCBI NO: 15223971 NR Description: thylakoid-bound ascorbate peroxidase, putative [Arabidopsis thaliana] >gi|25285570|pir||C96804 hypothetical
  misc_feature (1)..(426): Homolog of NCBI NO: 1419390 NR Description: thylakoid-bound ascorbate peroxidase [Arabidopsis
  misc_feature (1)..(416): Homolog of NCBI NO: 4996602 NR Description: thylakoid-bound ascorbate peroxidase [Nicotiana
  misc_feature (2)..(416): Homolog of NCBI NO: 7484621 NR Description: L-ascorbate peroxidase (EC 1.11.1.11) precursor -
  misc_feature (2)..(416): Homolog of NCBI NO: 7484766 NR Description: L-ascorbate peroxidase (EC 1.11.1.11) precursor -
  misc_feature (1)..(416): Homolog of NCBI NO: 2146725 NR Description: L-ascorbate peroxidase (EC 1.11.1.11) precursor -
  misc_feature (14)..(416): Homolog of NCBI NO: 1944507 NR Description: thylakoid-bound ascorbate peroxidase [Spinacia
  misc_feature (14)..(416): Homolog of NCBI NO: 2832920 NR Description: thylakoid-bound ascorbate peroxidase [Spinacia
  misc_feature (7)..(355): Homolog of NCBI NO: 32879783 NR Description: thylakoid-bound ascorbate peroxidase [Oryza
  misc_feature (355)..(416): Homolog of NCBI NO: 32879783 NR Description: thylakoid-bound ascorbate peroxidase [Oryza

SEQ ID NO: 102026 - protein, 354 aa, Arabidopsis thaliana; identical to SEQ ID NO: 43223
  peptide (1)..(354): Ceres Seq. ID no. 13609288
  misc_feature (17)..(249): Pfam Name: Peroxidase Pfam Description: Peroxidase
  misc_feature (1)..(354): Homolog of NCBI NO: 15223971 NR Description: thylakoid-bound ascorbate peroxidase, putative [Arabidopsis thaliana] >gi|25285570|pir||C96804 hypothetical
  misc_feature (1)..(354): Homolog of NCBI NO: 1419390 NR Description: thylakoid-bound ascorbate peroxidase [Arabidopsis
  misc_feature (1)..(344): Homolog of NCBI NO: 4996602 NR Description: thylakoid-bound ascorbate peroxidase [Nicotiana
  misc_feature (1)..(344): Homolog of NCBI NO: 7484621 NR Description: L-ascorbate peroxidase (EC 1.11.1.11) precursor -
  misc_feature (1)..(344): Homolog of NCBI NO: 7484766 NR Description: L-ascorbate peroxidase (EC 1.11.1.11) precursor -
  misc_feature (1)..(344): Homolog of NCBI NO: 2146725 NR Description: L-ascorbate peroxidase (EC 1.11.1.11) precursor -
  misc_feature (1)..(344): Homolog of NCBI NO: 1944507 NR Description: thylakoid-bound ascorbate peroxidase [Spinacia
  misc_feature (1)..(344): Homolog of NCBI NO: 2832920 NR Description: thylakoid-bound ascorbate peroxidase [Spinacia
  misc_feature (1)..(283): Homolog of NCBI NO: 32879783 NR Description: thylakoid-bound ascorbate peroxidase [Oryza
  misc_feature (283)..(344): Homolog of NCBI NO: 32879783 NR Description: thylakoid-bound ascorbate peroxidase [Oryza

SEQ ID NO: 102027 - DNA, 2494 bp, Arabidopsis thaliana
  misc_feature (1)..(2494): Ceres Seq. ID no. 13609289
  misc_feature: MA Experiment ID: 20000185 Result: Up-regulated in Transcription
  misc_feature: MA Experiment 20000185 PARAMETER Experiment Name: At_Roots__P Parameter: Age (day) Value: 7 vs. 21
  misc_feature: MA Experiment 20000185 PARAMETER Experiment Name: At_Roots__P Parameter: Organism Value: A. thaliana
  misc_feature: MA Experiment 20000185 PARAMETER Experiment Name: At_Roots__P Parameter: Tissue Value: Roots vs. Whole Plant
  misc_feature: MA Experiment ID: 20000286 Result: Down-regulated in Transcription
  misc_feature: MA Experiment 20000286 PARAMETER Experiment Name: At_Open_Flower_P Parameter: Age (day) Value: 21
  misc_feature: MA Experiment 20000286 PARAMETER Experiment Name: At_Open_Flower_P Parameter: Plant Line Value: WS
  misc_feature: MA Experiment 20000286 PARAMETER Experiment Name: At_Open_Flower_P Parameter: Tissue Value: Half Open vs. Whole Plant
  misc_feature: MA Experiment ID: 20000437 Result: Up-regulated in Transcription
  misc_feature: MA Experiment 20000437 PARAMETER Experiment Name: At_Drought_P Parameter: Age (day) Value: 8
  misc_feature: MA Experiment 20000437 PARAMETER Experiment Name: At_Drought_P Parameter: Organism Value: A. thaliana
  misc_feature: MA Experiment 20000437 PARAMETER Experiment Name: At_Drought_P Parameter: Plant Line Value: WS
  misc_feature: MA Experiment 20000437 PARAMETER Experiment Name: At_Drought_P Parameter: Timepoint (hr) Value: 24
  misc_feature: MA Experiment 20000437 PARAMETER Experiment Name: At_Drought_P Parameter: Tissue Value: Whole Plant
  misc_feature: MA Experiment 20000437 PARAMETER Experiment Name: At_Drought_P Parameter: Treatment Value: Drought vs. No Drought
  misc_feature: MA Experiment ID: 20000439 Result: Up-regulated in Transcription
  misc_feature: MA Experiment 20000439 PARAMETER Experiment Name: At_Roots__P Parameter: Age (day) Value: 14 vs. 21
  misc_feature: MA Experiment 20000439 PARAMETER Experiment Name: At_Roots__P Parameter: Organism Value: A. thaliana
  misc_feature: MA Experiment 20000439 PARAMETER Experiment Name: At_Roots__P Parameter: Tissue Value: Roots vs. Whole Plant
  misc_feature: MA Experiment ID: 20000451 Result: Down-regulated in Transcription
  misc_feature: MA Experiment 20000451 PARAMETER Experiment Name: At_CS6879_Shoots-Roots_P Parameter: Age (day) Value: 14
  misc_feature: MA Experiment 20000451 PARAMETER Experiment Name: At_CS6879_Shoots-Roots_P Parameter: Organism Value: A. thaliana
  misc_feature: MA Experiment 20000451 PARAMETER Experiment Name: At_CS6879_Shoots-Roots_P Parameter: Plant Line Value: CS6879 vs. WS
  misc_feature: MA Experiment 20000451 PARAMETER Experiment Name: At_CS6879_Shoots-Roots_P Parameter: Tissue Value: Roots
atggaggtaagtttgacggcgggagcaatcgggaagataatgaatggagaagtgacgactgaagcagatatgattccggtgttgcaagtgacggatttgaagcagattatggctcaacaagatccaacaagagagaggtttaggatggtgttatctgatgggacatacttgcatcaaggaatgctaggaactgatctcaacaatcttgtcaaagaagggactcttcaacccggttctattgttagacttactcgtttcgtcggtgatgtcatcaagggtcgaaggattgttattgttccgcaactggaggtgttaaaacagatttctgatattatcgggcatcctgttccaggaggaaagcataatgatcaacgtggagcagattctggtattaagtttaatacaactgagcaacaaggtagtggtatccgtcaagtaaacaatatcgagccagggagaagtaatgcagctatttcacctcaggttggtggtactggttctagtgttcctgcatcaacaacaccttccactcgggcatacagcaatccgtcttcaggtaatggagtcactaggcaggactatgctcgtgatcctccaacaagttatcctcatcagcctcaaccaccaccaccgatgtatgcaaacaggggaccagtggctaggaatgaagcacctcctaagataattccagttaatgctcttagtccatattcaggtaggtggaccatcaaggccagagtcacgaataaagcagcacttaagcaatacagtaatccccgtggggaagggaaagtgttcaactttgatcttcttgatgctgatggcggagaaatacgtgttacttgttttaacgctgtggctgatcaattctatgaccagattgttgttggtaatctttatcttatctcgaggggaagtttgcggcctgcacaaaagaactttaatcatcttcgaaatgattacgagatcatgctggataatgcatcaactataaaacaatgctatgaagaggatgctgcaattccgcgccatcagttccatttccgtaccattggggatattgagagcatggagaataactgcatcgttgatgtaattggtattgtgtcatctatcagtcctactgtaacaataacgaggaaaaacggaactgcaacaccgaaaagatcacttcagttgaaggatatgtcaggccgaagtgttgaggtaactatgtggggtgacttctgcaatgcagaaggacaaaggctgcaaagtctttgtgattctggtgtgtttccggttcttgctgttaaggcgggcaggattagtgaatttaatggaaagacagtgagcaccattggatcaagtcagctgttcattgacccagattttgttgaagctgagaaactgaagaactggtttgagagagaaggaaagagtgtcccttgtatctccttatctcgggagttttccggcagtggcaaagtagatgttcgtaagacaatatctcaaattaaagatgagaaactaggaacctccgaaaaaccagactggatcacagtcagtgccacaattttatacttgaagtttgataacttctgctacacagcttgtcctatcatgaacggtgatcgtccatgcagcaaaaaggtaacagacaatggagatgggacatggcggtgcgaaaagtgtgataaaagcgttgatgaatgtgactacaggtatatactgcagcttcagatacaggaccatacagatcttacttgcgtcacagcattccaggaggctggtgaagagataatgggcatatctgctaaagatttgtattatgtgaagaatgaacacaaggatgaggaaaaattcgaagatatcatccgtaaggttgcttttaccaagtacaacttcaagctgaaggtaaaagaagaaacattcagcgacgaacagcgtgtgaaagcaacagttgtgaaagtggacaagctaaactattcagcagataccaggactatgttaggtgctatggataaactcaggaccagagatgcaaattctcttcccattaacccagaaggatccgattacaatgctgatgtggttaatactggtataggaagctcaggaaccagagatccctcatcggtccaaagaagggatttcggtttacatgcgcatcaatcgggtcaatctgggaatcactatagtggtggtggtgctactactagctgcaatgtctgtggaaacagtggtcatgtttctgcaaagtgtccaggcgctactaagccgcaagagcaagggcagtacatgggtggctcttacagaggcacgacggggagttatggaggaggactaccgagacaacatgttggaagctactgagagtcataatcatcatcatctgatgatgctctcactctttttttttgtagacttttgttttggtagaattaactaatgccaaacttttctgaagtcttttaaggttatttaagcatattaggttctcttgtttggtttc

SEQ ID NO: 102028 - protein, 784 aa, Arabidopsis thaliana
  peptide (1)..(784): Ceres Seq. ID no. 13609290
  misc_feature (4)..(107): Pfam Name: Replication factor-A protein 1, N-terminal domain Pfam Description: Replication factor-A protein 1, N-terminal
  misc_feature (324)..(784): Homolog of NCBI NO: 18415246 NR Description: replication protein A, putative [Arabidopsis
  misc_feature (89)..(784): Homolog of NCBI NO: 15242405 NR Description: replication protein, putative [Arabidopsis
  misc_feature (152)..(664): Homolog of NCBI NO: 15225129 NR Description: replication protein, putative [Arabidopsis
  misc_feature (1)..(184): Homolog of NCBI NO: 15225129 NR Description: replication protein, putative [Arabidopsis
  misc_feature (21)..(669): Homolog of NCBI NO: 13536993 NR Description: replication protein A 70kDa [Oryza sativa
  misc_feature (206)..(668): Homolog of NCBI NO: 19111884 NR Description: replication factor-a protein 1
  misc_feature (1)..(160): Homolog of NCBI NO: 19111884 NR Description: replication factor-a protein 1
  misc_feature (202)..(668): Homolog of NCBI NO: 40742813 NR Description: hypothetical protein AN7423.2 [Aspergillus
  misc_feature (26)..(117): Homolog of NCBI NO: 40742813 NR Description: hypothetical protein AN7423.2 [Aspergillus
  misc_feature (227)..(656): Homolog of NCBI NO: 4506583 NR Description: replication protein A1, 70kDa; replication A1 (70kD) [Homo sapiens] >gi|1350579|sp|P27694|RFA1_HUMAN
MEVSLTAGAIGKIMNGEVTTEADMIPVLQVTDLKQIMAQQDPTRERFRMVLSDGTYLHQGMLGTDLNNLVKEGTLQPGSIVRLTRFVGDVIKGRRIVIVPQLEVLKQISDIIGHPVPGGKHNDQRGADSGIKFNTTEQQGSGIRQVNNIEPGRSNAAISPQVGGTGSSVPASTTPSTRAYSNPSSGNGVTRQDYARDPPTSYPHQPQPPPPMYANRGPVARNEAPPKIIPVNALSPYSGRWTIKARVTNKAALKQYSNPRGEGKVFNFDLLDADGGEIRVTCFNAVADQFYDQIVVGNLYLISRGSLRPAQKNFNHLRNDYEIMLDNASTIKQCYEEDAAIPRHQFHFRTIGDIESMENNCIVDVIGIVSSISPTVTITRKNGTATPKRSLQLKDMSGRSVEVTMWGDFCNAEGQRLQSLCDSGVFPVLAVKAGRISEFNGKTVSTIGSSQLFIDPDFVEAEKLKNWFEREGKSVPCISLSREFSGSGKVDVRKTISQIKDEKLGTSEKPDWITVSATILYLKFDNFCYTACPIMNGDRPCSKKVTDNGDGTWRCEKCDKSVDECDYRYILQLQIQDHTDLTCVTAFQEAGEEIMGISAKDLYYVKNEHKDEEKFEDIIRKVAFTKYNFKLKVKEETFSDEQRVKATVVKVDKLNYSADTRTMLGAMDKLRTRDANSLPINPEGSDYNADVVNTGIGSSGTRDPSSVQRRDFGLHAHQSGQSGNHYSGGGATTSCNVCGNSGHVSAKCPGATKPQEQGQYMGGSYRGTTGSYGGGLPRQHVGSY

SEQ ID NO: 102029 - protein, 771 aa, Arabidopsis thaliana
  peptide (1)..(771): Ceres Seq. ID no. 13609291
  misc_feature (1)..(94): Pfam Name: Replication factor-A protein 1, N-terminal domain Pfam Description: Replication factor-A protein 1, N-terminal
  misc_feature (311)..(771): Homolog of NCBI NO: 18415246 NR Description: replication protein A, putative [Arabidopsis
  misc_feature (76)..(771): Homolog of NCBI NO: 15242405 NR Description: replication protein, putative [Arabidopsis
  misc_feature (139)..(651): Homolog of NCBI NO: 15225129 NR Description: replication protein, putative [Arabidopsis
  misc_feature (1)..(171): Homolog of NCBI NO: 15225129 NR Description: replication protein, putative [Arabidopsis
  misc_feature (8)..(656): Homolog of NCBI NO: 13536993 NR Description: replication protein A 70kDa [Oryza sativa
  misc_feature (193)..(655): Homolog of NCBI NO: 19111884 NR Description: replication factor-a protein 1
  misc_feature (1)..(147): Homolog of NCBI NO: 19111884 NR Description: replication factor-a protein 1
  misc_feature (189)..(655): Homolog of NCBI NO: 40742813 NR Description: hypothetical protein AN7423.2 [Aspergillus
  misc_feature (13)..(104): Homolog of NCBI NO: 40742813 NR Description: hypothetical protein AN7423.2 [Aspergillus
  misc_feature (214)..(643): Homolog of NCBI NO: 4506583 NR Description: replication protein A1, 70kDa; replication A1 (70kD) [Homo sapiens] >gi|1350579|sp|P27694|RFA1_HUMAN
MNGEVTTEADMIPVLQVTDLKQIMAQQDPTRERFRMVLSDGTYLHQGMLGTDLNNLVKEGTLQPGSIVRLTRFVGDVIKGRRIVIVPQLEVLKQISDIIGHPVPGGKHNDQRGADSGIKFNTTEQQGSGIRQVNNIEPGRSNAAISPQVGGTGSSVPASTTPSTRAYSNPSSGNGVTRQDYARDPPTSYPHQPQPPPPMYANRGPVARNEAPPKIIPVNALSPYSGRWTIKARVTNKAALKQYSNPRGEGKVFNFDLLDADGGEIRVTCFNAVADQFYDQIVVGNLYLISRGSLRPAQKNFNHLRNDYEIMLDNASTIKQCYEEDAAIPRHQFHFRTIGDIESMENNCIVDVIGIVSSISPTVTITRKNGTATPKRSLQLKDMSGRSVEVTMWGDFCNAEGQRLQSLCDSGVFPVLAVKAGRISEFNGKTVSTIGSSQLFIDPDFVEAEKLKNWFEREGKSVPCISLSREFSGSGKVDVRKTISQIKDEKLGTSEKPDWITVSATILYLKFDNFCYTACPIMNGDRPCSKKVTDNGDGTWRCEKCDKSVDECDYRYILQLQIQDHTDLTCVTAFQEAGEEIMGISAKDLYYVKNEHKDEEKFEDIIRKVAFTKYNFKLKVKEETFSDEQRVKATVVKVDKLNYSADTRTMLGAMDKLRTRDANSLPINPEGSDYNADVVNTGIGSSGTRDPSSVQRRDFGLHAHQSGQSGNHYSGGGATTSCNVCGNSGHVSAKCPGATKPQEQGQYMGGSYRGTTGSYGGGLPRQHVGSY

SEQ ID NO: 102030 - protein, 761 aa, Arabidopsis thaliana
  peptide (1)..(761): Ceres Seq. ID no. 13609292
  misc_feature (1)..(84): Pfam Name: Replication factor-A protein 1, N-terminal domain Pfam Description: Replication factor-A protein 1, N-terminal
  misc_feature (301)..(761): Homolog of NCBI NO: 18415246 NR Description: replication protein A, putative [Arabidopsis
  misc_feature (66)..(761): Homolog of NCBI NO: 15242405 NR Description: replication protein, putative [Arabidopsis
  misc_feature (129)..(641): Homolog of NCBI NO: 15225129 NR Description: replication protein, putative [Arabidopsis
  misc_feature (1)..(161): Homolog of NCBI NO: 15225129 NR Description: replication protein, putative [Arabidopsis
  misc_feature (1)..(646): Homolog of NCBI NO: 13536993 NR Description: replication protein A 70kDa [Oryza sativa
  misc_feature (183)..(645): Homolog of NCBI NO: 19111884 NR Description: replication factor-a protein 1
  misc_feature (1)..(137): Homolog of NCBI NO: 19111884 NR Description: replication factor-a protein 1
  misc_feature (179)..(645): Homolog of NCBI NO: 40742813 NR Description: hypothetical protein AN7423.2 [Aspergillus
  misc_feature (3)..(94): Homolog of NCBI NO: 40742813 NR Description: hypothetical protein AN7423.2 [Aspergillus
  misc_feature (204)..(633): Homolog of NCBI NO: 4506583 NR Description: replication protein A1, 70kDa; replication A1 (70kD) [Homo sapiens] >gi|1350579|sp|P27694|RFA1_HUMAN
MIPVLQVTDLKQIMAQQDPTRERFRMVLSDGTYLHQGMLGTDLNNLVKEGTLQPGSIVRLTRFVGDVIKGRRIVIVPQLEVLKQISDIIGHPVPGGKHNDQRGADSGIKFNTTEQQGSGIRQVNNIEPGRSNAAISPQVGGTGSSVPASTTPSTRAYSNPSSGNGVTRQDYARDPPTSYPHQPQPPPPMYANRGPVARNEAPPKIIPVNALSPYSGRWTIKARVTNKAALKQYSNPRGEGKVFNFDLLDADGGEIRVTCFNAVADQFYDQIVVGNLYLISRGSLRPAQKNFNHLRNDYEIMLDNASTIKQCYEEDAAIPRHQFHFRTIGDIESMENNCIVDVIGIVSSISPTVTITRKNGTATPKRSLQLKDMSGRSVEVTMWGDFCNAEGQRLQSLCDSGVFPVLAVKAGRISEFNGKTVSTIGSSQLFIDPDFVEAEKLKNWFEREGKSVPCISLSREFSGSGKVDVRKTISQIKDEKLGTSEKPDWITVSATILYLKFDNFCYTACPIMNGDRPCSKKVTDNGDGTWRCEKCDKSVDECDYRYILQLQIQDHTDLTCVTAFQEAGEEIMGISAKDLYYVKNEHKDEEKFEDIIRKVAFTKYNFKLKVKEETFSDEQRVKATVVKVDKLNYSADTRTMLGAMDKLRTRDANSLPINPEGSDYNADVVNTGIGSSGTRDPSSVQRRDFGLHAHQSGQSGNHYSGGGATTSCNVCGNSGHVSAKCPGATKPQEQGQYMGGSYRGTTGSYGGGLPRQHVGSY

SEQ ID NO: 102031 - DNA, 1695 bp, Arabidopsis thaliana
  misc_feature (1)..(1695): Ceres Seq. ID no. 13609293
  misc_feature: MA Experiment ID: 108434 Result: Down-regulated in Transcription
  misc_feature: MA Experiment 108434 PARAMETER Experiment Name: At_Root_Tips_cDNA_P Parameter: Tissue Value: Root Tips
  misc_feature: MA Experiment ID: 108488 Result: Down-regulated in Transcription
  misc_feature: MA Experiment ID: 20000180 Result: Up-regulated in Transcription
  misc_feature: MA Experiment 20000180 PARAMETER Experiment Name: At_Germinating_Seeds_P Parameter: Age (hr) Value: 24 vs. 0
  misc_feature: MA Experiment 20000180 PARAMETER Experiment Name: At_Germinating_Seeds_P Parameter: Tissue Value: Germinating Seeds
  misc_feature: MA Experiment ID: 20000496 Result: Up-regulated in Transcription
  misc_feature: MA Experiment 20000496 PARAMETER Experiment Name: At_Guard_Cells_P Parameter: Harvest Date Value: 7/19/2002
  misc_feature: MA Experiment 20000496 PARAMETER Experiment Name: At_Guard_Cells_P Parameter: Organism Value: Canola
  misc_feature: MA Experiment 20000496 PARAMETER Experiment Name: At_Guard_Cells_P Parameter: Tissue Value: Guard Cells vs. Leaves
  misc_feature: MA Experiment ID: 20001557 Result: Up-regulated in Transcription
  misc_feature: MA Experiment 20001557 PARAMETER Experiment Name: At_Drought_Soil_Dry_P Parameter: Age (day) Value: 27
  misc_feature: MA Experiment 20001557 PARAMETER Experiment Name: At_Drought_Soil_Dry_P Parameter: Organism Value: A. thaliana
  misc_feature: MA Experiment 20001557 PARAMETER Experiment Name: At_Drought_Soil_Dry_P Parameter: Plant Line Value: WS
  misc_feature: MA Experiment 20001557 PARAMETER Experiment Name: At_Drought_Soil_Dry_P Parameter: Post Timepoint (hr) Value: 3
  misc_feature: MA Experiment 20001557 PARAMETER Experiment Name: At_Drought_Soil_Dry_P Parameter: Post-Treatment Value: Re-Water vs. No Drought
  misc_feature: MA Experiment 20001557 PARAMETER Experiment Name: At_Drought_Soil_Dry_P Parameter: Timepoint (day) Value: 13
  misc_feature: MA Experiment 20001557 PARAMETER Experiment Name: At_Drought_Soil_Dry_P Parameter: Treatment Value: Drought vs. No Drought
  misc_feature: MA Experiment ID: 20001904 Result: Up-regulated in Transcription
  misc_feature: MA Experiment 20001904 PARAMETER Experiment Name: At_Drought_Reproduction_P Parameter: Age (day) Value: 37
  misc_feature: MA Experiment 20001904 PARAMETER Experiment Name: At_Drought_Reproduction_P Parameter: Organism Value: A. thaliana
  misc_feature: MA Experiment 20001904 PARAMETER Experiment Name: At_Drought_Reproduction_P Parameter: Plant Line Value: WS
  misc_feature: MA Experiment 20001904 PARAMETER Experiment Name: At_Drought_Reproduction_P Parameter: Timepoint (day) Value: 7
  misc_feature: MA Experiment 20001904 PARAMETER Experiment Name: At_Drought_Reproduction_P Parameter: Tissue Value: Rosettes
  misc_feature: MA Experiment 20001904 PARAMETER Experiment Name: At_Drought_Reproduction_P Parameter: Treatment Value: Drought vs. No Drought
cccaaaagatgaaaaacgatactctacttttttatgaatcctttaattgaacaaacggaaccaacacaacaacagattgtgaagaagaaagaaaaaacaacaatggcttcacaaaccaaactcaagaaacctaattctcattttagcctttgtactttcctcttcttcaccgtcctctttaccataccggctctctttctcctccgcacctccacttgctcctcctccaccgctgcagtctcctcctcctcctctgacacaaaccagccaccgtggtctggcgacctccaaaccgcccaatttgcctggaaccgccttgatttctccttaaccaaccctcctcccaaaacactaaaactcgctgttttctcccggaaatggcccacgggtcccaatcctggcggcatggaacgccacgccttcactctatacaccgccttagctcgccgtggacaccgtgtccacgttttcacctctcccttagaccaatcccctgaaaccaacaaaatcccccctgtttccgaccaaatcatttaccctataatccattctcacggcgacgcggagcccggaaaatggcggtacaacaaggcatgggagctttaccaagaagaaaacaagaaagaacctttcgatgcggttcactctgaaagtgttgctttacctcactggatcgcccgggaggttccaaacctcgctgtatcctggcacggcattgcgttagagagcttacaatcaagtatttaccaagacctgatccgtaaaccagacgaaccaagatcacaaggcttcaatgcaagtctatacggtgccgtgcttcccaagatactggacgaaatcagattcttccacaactacgctcaccacatcgctatcagcgatagctgcggagaaatgctaagagacgtttaccaaatccctgagaaaagggttcatgtgatcctcaatggagtcgacgagaacggattcacatcagacaagaagctacgtactctgtttaggtcaaaattagggttaccagaaaactcatcagcgattgttttaggagctgctgggagattagtcaaagacaaaggacatccattgctcttcgaagctttcgcgaaaataatccaaacgtattcaaatgtttacctcgtagtagctggatcagggccatgggagcaacgttacaaggaattaggggaaaaagtttccattttgggatctctaaacccaaatgagctcaagggtttctacaacgggatcgatttgttcgtgaatccaacgcttagaccacaaggtcttgatttaacgttaatggaagcgatgttgagtggtaaaccagtgatggcatctaggtacgcaagcataaagaggactatagtggtgaatgatgagtttgggtttatgtttgcgccaaatgtggaagctttgacggcggttatggaggttgctgtggctgaaggagcggagagattggcggagagaggaaggaagtgtaaagagtatgctgcggagatgtttacggcgagtaaaatggctttggcttatgagaggctttttctttgtattaatgatcagaaattttgtatttacccttaattagtaagactcaacatctttatttttttcattattggaaaagtgagtcatatactcatagcaatgtaatcaaatacatatgcgacccttacatatctaaagttatctttt

SEQ ID NO: 102032 - protein, 516 aa, Arabidopsis thaliana
  peptide (1)..(516): Ceres Seq. ID no. 13609294
  misc_feature (320)..(483): Pfam Name: Glycosyl transferases group 1 Pfam Description: Glycosyl transferases group 1
  misc_feature (1)..(516): Homolog of NCBI NO: 18415319 NR Description: glycosyltransferase family 1 [Arabidopsis
  misc_feature (24)..(498): Homolog of NCBI NO: 7486088 NR Description: hypothetical protein F24J7.20 - Arabidopsis
  misc_feature (24)..(498): Homolog of NCBI NO: 25407571 NR Description: hypothetical protein AT4g19460 [imported] - thaliana >gi|4582486|emb|CAA16923.2| putative protein thaliana] >gi|7268741|emb|CAB78948.1| putative protein
  misc_feature (1)..(496): Homolog of NCBI NO: 7487719 NR Description: hypothetical protein T5K18.240 - Arabidopsis
  misc_feature (24)..(516): Homolog of NCBI NO: 21593749 NR Description: unknown [Arabidopsis thaliana]
  misc_feature (47)..(516): Homolog of NCBI NO: 34911892 NR Description: OSJNBb0032K15.23 [Oryza sativa (japonica
  misc_feature (35)..(516): Homolog of NCBI NO: 15219398 NR Description: glycosyltransferase family 1 [Arabidopsis
  misc_feature (35)..(516): Homolog of NCBI NO: 5903105 NR Description: Hypothetical protein [Arabidopsis thaliana]
  misc_feature (264)..(513): Homolog of NCBI NO: 10177634 NR Description: glycosyl transferase-like [Arabidopsis thaliana]
  misc_feature (192)..(246): Homolog of NCBI NO: 10177634 NR Description: glycosyl transferase-like [Arabidopsis thaliana]
MNPLIEQTEPTQQQIVKKKEKTTMASQTKLKKPNSHFSLCTFLFFTVLFTIPALFLLRTSTCSSSTAAVSSSSSDTNQPPWSGDLQTAQFAWNRLDFSLTNPPPKTLKLAVFSRKWPTGPNPGGMERHAFTLYTALARRGHRVHVFTSPLDQSPETNKIPPVSDQIIYPIIHSHGDAEPGKWRYNKAWELYQEENKKEPFDAVHSESVALPHWIAREVPNLAVSWHGIALESLQSSIYQDLIRKPDEPRSQGFNASLYGAVLPKILDEIRFFHNYAHHIAISDSCGEMLRDVYQIPEKRVHVILNGVDENGFTSDKKLRTLFRSKLGLPENSSAIVLGAAGRLVKDKGHPLLFEAFAKIIQTYSNVYLVVAGSGPWEQRYKELGEKVSILGSLNPNELKGFYNGIDLFVNPTLRPQGLDLTLMEAMLSGKPVMASRYASIKRTIVVNDEFGFMFAPNVEALTAVMEVAVAEGAERLAERGRKCKEYAAEMFTASKMALAYERLFLCINDQKFCIYP

SEQ ID NO: 102033 - protein, 493 aa, Arabidopsis thaliana; identical to SEQ ID NO: 75724
  peptide (1)..(493): Ceres Seq. ID no. 13609295
  misc_feature (297)..(460): Pfam Name: Glycosyl transferases group 1 Pfam Description: Glycosyl transferases group 1
  misc_feature (1)..(493): Homolog of NCBI NO: 18415319 NR Description: glycosyltransferase family 1 [Arabidopsis
  misc_feature (1)..(475): Homolog of NCBI NO: 7486088 NR Description: hypothetical protein F24J7.20 - Arabidopsis
  misc_feature (1)..(475): Homolog of NCBI NO: 25407571 NR Description: hypothetical protein AT4g19460 [imported] - thaliana >gi|4582486|emb|CAA16923.2| putative protein thaliana] >gi|7268741|emb|CAB78948.1| putative protein
  misc_feature (1)..(473): Homolog of NCBI NO: 7487719 NR Description: hypothetical protein T5K18.240 - Arabidopsis
  misc_feature (1)..(493): Homolog of NCBI NO: 21593749 NR Description: unknown [Arabidopsis thaliana]
  misc_feature (24)..(493): Homolog of NCBI NO: 34911892 NR Description: OSJNBb0032K15.23 [Oryza sativa (japonica
  misc_feature (12)..(493): Homolog of NCBI NO: 15219398 NR Description: glycosyltransferase family 1 [Arabidopsis
  misc_feature (12)..(493): Homolog of NCBI NO: 5903105 NR Description: Hypothetical protein [Arabidopsis thaliana]
  misc_feature (241)..(490): Homolog of NCBI NO: 10177634 NR Description: glycosyl transferase-like [Arabidopsis thaliana]
  misc_feature (169)..(223): Homolog of NCBI NO: 10177634 NR Description: glycosyl transferase-like [Arabidopsis thaliana]

SEQ ID NO: 102034 - protein, 392 aa, Arabidopsis thaliana; identical to SEQ ID NO: 75725
  peptide (1)..(392): Ceres Seq. ID no. 13609296
  misc_feature (196)..(359): Pfam Name: Glycosyl transferases group 1 Pfam Description: Glycosyl transferases group 1
  misc_feature (1)..(392): Homolog of NCBI NO: 18415319 NR Description: glycosyltransferase family 1 [Arabidopsis
  misc_feature (1)..(374): Homolog of NCBI NO: 7486088 NR Description: hypothetical protein F24J7.20 - Arabidopsis
  misc_feature (1)..(374): Homolog of NCBI NO: 25407571 NR Description: hypothetical protein AT4g19460 [imported] - thaliana >gi|4582486|emb|CAA16923.2| putative protein thaliana] >gi|7268741|emb|CAB78948.1| putative protein
  misc_feature (1)..(372): Homolog of NCBI NO: 7487719 NR Description: hypothetical protein T5K18.240 - Arabidopsis
  misc_feature (1)..(392): Homolog of NCBI NO: 21593749 NR Description: unknown [Arabidopsis thaliana]
  misc_feature (1)..(392): Homolog of NCBI NO: 34911892 NR Description: OSJNBb0032K15.23 [Oryza sativa (japonica
  misc_feature (1)..(392): Homolog of NCBI NO: 15219398 NR Description: glycosyltransferase family 1 [Arabidopsis
  misc_feature (1)..(392): Homolog of NCBI NO: 5903105 NR Description: Hypothetical protein [Arabidopsis thaliana]
  misc_feature (140)..(389): Homolog of NCBI NO: 10177634 NR Description: glycosyl transferase-like [Arabidopsis thaliana]
  misc_feature (68)..(122): Homolog of NCBI NO: 10177634 NR Description: glycosyl transferase-like [Arabidopsis thaliana]

SEQ ID NO: 102035 - DNA, 1244 bp, Arabidopsis thaliana
  misc_feature (1)..(1244): Ceres Seq. ID no. 13609302
  misc_feature: MA Experiment ID: 20000169 Result: Up-regulated in Transcription
  misc_feature: MA Experiment 20000169 PARAMETER Experiment Name: At_100uM_ABA_P Parameter: Age (day) Value: 14
  misc_feature: MA Experiment 20000169 PARAMETER Experiment Name: At_100uM_ABA_P Parameter: Organism Value: A. thaliana
  misc_feature: MA Experiment 20000169 PARAMETER Experiment Name: At_100uM_ABA_P Parameter: Plant Line Value: WS
  misc_feature: MA Experiment 20000169 PARAMETER Experiment Name: At_100uM_ABA_P Parameter: Timepoint (hr) Value: 6
  misc_feature: MA Experiment 20000169 PARAMETER Experiment Name: At_100uM_ABA_P Parameter: Tissue Value: Aerial
  misc_feature: MA Experiment 20000169 PARAMETER Experiment Name: At_100uM_ABA_P Parameter: Treatment Value: 100uM ABA vs. No Treatment
  misc_feature: MA Experiment ID: 20000180 Result: Up-regulated in Transcription
  misc_feature: MA Experiment 20000180 PARAMETER Experiment Name: At_Germinating_Seeds_P Parameter: Age (hr) Value: 24 vs. 0
  misc_feature: MA Experiment 20000180 PARAMETER Experiment Name: At_Germinating_Seeds_P Parameter: Tissue Value: Germinating Seeds
  misc_feature: MA Experiment ID: 20000182 Result: Up-regulated in Transcription
  misc_feature: MA Experiment 20000182 PARAMETER Experiment Name: At_2mM_SA_P Parameter: Age (day) Value: 14
  misc_feature: MA Experiment 20000182 PARAMETER Experiment Name: At_2mM_SA_P Parameter: Organism Value: A. thaliana
  misc_feature: MA Experiment 20000182 PARAMETER Experiment Name: At_2mM_SA_P Parameter: Plant Line Value: WS
  misc_feature: MA Experiment 20000182 PARAMETER Experiment Name: At_2mM_SA_P Parameter: Timepoint (hr) Value: 6
  misc_feature: MA Experiment 20000182 PARAMETER Experiment Name: At_2mM_SA_P Parameter: Tissue Value: Aerial
  misc_feature: MA Experiment 20000182 PARAMETER Experiment Name: At_2mM_SA_P Parameter: Treatment Value: 2mM SA vs. No Treatment
  misc_feature: MA Experiment ID: 20000185 Result: Up-regulated in Transcription
  misc_feature: MA Experiment 20000185 PARAMETER Experiment Name: At_Roots__P Parameter: Age (day) Value: 7 vs. 21
  misc_feature: MA Experiment 20000185 PARAMETER Experiment Name: At_Roots__P Parameter: Organism Value: A. thaliana
  misc_feature: MA Experiment 20000185 PARAMETER Experiment Name: At_Roots__P Parameter: Tissue Value: Roots vs. Whole Plant
  misc_feature: MA Experiment ID: 20000265 Result: Up-regulated in Transcription
  misc_feature: MA Experiment 20000265 PARAMETER Experiment Name: At_Open_Flower_P Parameter: Age (day) Value: 21
  misc_feature: MA Experiment 20000265 PARAMETER Experiment Name: At_Open_Flower_P Parameter: Plant Line Value: WS
  misc_feature: MA Experiment 20000265 PARAMETER Experiment Name: At_Open_Flower_P Parameter: Tissue Value: Closed Flower vs. Whole Plant
  misc_feature: MA Experiment ID: 20000286 Result: Up-regulated in Transcription
  misc_feature: MA Experiment 20000286 PARAMETER Experiment Name: At_Open_Flower_P Parameter: Age (day) Value: 21
  misc_feature: MA Experiment 20000286 PARAMETER Experiment Name: At_Open_Flower_P Parameter: Plant Line Value: WS
  misc_feature: MA Experiment 20000286 PARAMETER Experiment Name: At_Open_Flower_P Parameter: Tissue Value: Half Open vs. Whole Plant
  misc_feature: MA Experiment ID: 20000439 Result: Up-regulated in Transcription
  misc_feature: MA Experiment 20000439 PARAMETER Experiment Name: At_Roots__P Parameter: Age (day) Value: 14 vs. 21
  misc_feature: MA Experiment 20000439 PARAMETER Experiment Name: At_Roots__P Parameter: Organism Value: A. thaliana
  misc_feature: MA Experiment 20000439 PARAMETER Experiment Name: At_Roots__P Parameter: Tissue Value: Roots vs. Whole Plant
  misc_feature: MA Experiment ID: 20000453 Result: Up-regulated in Transcription
  misc_feature: MA Experiment 20000453 PARAMETER Experiment Name: At_100uM_ABA_P Parameter: Age (day) Value: 15
  misc_feature: MA Experiment 20000453 PARAMETER Experiment Name: At_100uM_ABA_P Parameter: Organism Value: A. thaliana
  misc_feature: MA Experiment 20000453 PARAMETER Experiment Name: At_100uM_ABA_P Parameter: Plant Line Value: WS
  misc_feature: MA Experiment 20000453 PARAMETER Experiment Name: At_100uM_ABA_P Parameter: Timepoint (hr) Value: 24
  misc_feature: MA Experiment 20000453 PARAMETER Experiment Name: At_100uM_ABA_P Parameter: Tissue Value: Aerial
  misc_feature: MA Experiment 20000453 PARAMETER Experiment Name: At_100uM_ABA_P Parameter: Treatment Value: 100uM ABA vs. No Treatment
  misc_feature: MA Experiment ID: 20001904 Result: Up-regulated in Transcription
  misc_feature: MA Experiment 20001904 PARAMETER Experiment Name: At_Drought_Reproduction_P Parameter: Age (day) Value: 37
  misc_feature: MA Experiment 20001904 PARAMETER Experiment Name: At_Drought_Reproduction_P Parameter: Organism Value: A. thaliana
  misc_feature: MA Experiment 20001904 PARAMETER Experiment Name: At_Drought_Reproduction_P Parameter: Plant Line Value: WS
  misc_feature: MA Experiment 20001904 PARAMETER Experiment Name: At_Drought_Reproduction_P Parameter: Timepoint (day) Value: 7
  misc_feature: MA Experiment 20001904 PARAMETER Experiment Name: At_Drought_Reproduction_P Parameter: Tissue Value: Rosettes
  misc_feature: MA Experiment 20001904 PARAMETER Experiment Name: At_Drought_Reproduction_P Parameter: Treatment Value: Drought vs. No Drought
  misc_feature: MA Experiment ID: 20001905 Result: Up-regulated in Transcription
  misc_feature: MA Experiment 20001905 PARAMETER Experiment Name: At_Drought_Reproduction_P Parameter: Age (day) Value: 40
  misc_feature: MA Experiment 20001905 PARAMETER Experiment Name: At_Drought_Reproduction_P Parameter: Organism Value: A. thaliana
  misc_feature: MA Experiment 20001905 PARAMETER Experiment Name: At_Drought_Reproduction_P Parameter: Plant Line Value: WS
  misc_feature: MA Experiment 20001905 PARAMETER Experiment Name: At_Drought_Reproduction_P Parameter: Timepoint (day) Value: 10
  misc_feature: MA Experiment 20001905 PARAMETER Experiment Name: At_Drought_Reproduction_P Parameter: Tissue Value: Rosettes
  misc_feature: MA Experiment 20001905 PARAMETER Experiment Name: At_Drought_Reproduction_P Parameter: Treatment Value: Drought vs. No Drought
  misc_feature: MA Experiment ID: 20001906 Result: Up-regulated in Transcription
  misc_feature: MA Experiment 20001906 PARAMETER Experiment Name: At_Drought_Reproduction_P Parameter: Age (day) Value: 35
  misc_feature: MA Experiment 20001906 PARAMETER Experiment Name: At_Drought_Reproduction_P Parameter: Organism Value: A. thaliana
  misc_feature: MA Experiment 20001906 PARAMETER Experiment Name: At_Drought_Reproduction_P Parameter: Plant Line Value: WS
  misc_feature: MA Experiment 20001906 PARAMETER Experiment Name: At_Drought_Reproduction_P Parameter: Timepoint (day) Value: 5
  misc_feature: MA Experiment 20001906 PARAMETER Experiment Name: At_Drought_Reproduction_P Parameter: Tissue Value: Siliques
  misc_feature: MA Experiment 20001906 PARAMETER Experiment Name: At_Drought_Reproduction_P Parameter: Treatment Value: Drought vs. No Drought
atgctaagtttctctagagctagaagtcaaggaagaaacacaagacctcttggaggagggatggaatacttagaacctaaaaggaagagcaatgtaatgggcaagattatcttggttgtttctcttactgctttatgcatttttatgctcaagcacgcaccgagtttcacatcaccaaccgcgttctctcgtagcgaggaaggtgtgactcatgtgttagtcactggtggtgctggatatatcggatcacatgctgcgttgaggctcttaaaagattcataccgtgtaaccattgtggacaatctttctcggggaaatcttggtgccgtcaaggttttacaaggattgttcccagaacccgggaggcttcaatttatttatgctgacttaggagatgccaaagctgttgataaaatcttctcagagaacgcgtttgatgctgttatgcattttgctgcagtagcatatgttggagagagcactctagatcctctaaagtattaccacaacattacatcaaacacattagtagttcttgaagctgtggctagacataaagtgaagaagttgatatattcaagcacatgtgccacttatggagaacctgacaagatgcctattgttgaagttactccacaggtccccattaacccttatggaaaagctaagaagatggctgaagatatgatcctggatttctctaaaaactctgacatggcagtcatgatcctaagatactttaacgtgataggttcagatccagaaggtagactaggagaagctccaaagcccgagctacgtgaacacggacggatttcgggtgcctgtttcgatgcagctcgtggcgtgattccaggccttcaggtcaaaggaacagactacaaaacaggagatggaacttgtgttcgtgactacatagatgttactgaccttgtagatgctcacgtaaaagctctcgagaaagctaagcctagaaatgtgggaatatacaatgtaggtacaggaaaaggaagatcggtgaaagagtttgtggaagcatgtaagaaagcgacaggagtagatatcaaagtagattttttgcctcgaagacctggagattacgcagaggtttacagtgatccagcaaagattctgagagatcttaattggtctgctcgttacactaatcttcaagaaagtcttgaggttgcttggaagtggcaaaagactcatccccatggatatgcttcttcttaaagacgacc

SEQ ID NO: 102036 - protein, 411 aa, Arabidopsis thaliana
  peptide (1)..(411): Ceres Seq. ID no. 13609303
  misc_feature (72)..(405): Pfam Name: NAD dependent epimerase/dehydratase family Pfam Description: NAD dependent epimerase/dehydratase family
  misc_feature (33)..(411): Homolog of NCBI NO: 15237098 NR Description: NAD-dependent epimerase/dehydratase family
  misc_feature (1)..(408): Homolog of NCBI NO: 22329866 NR Description: NAD-dependent epimerase/dehydratase family
  misc_feature (1)..(408): Homolog of NCBI NO: 24417398 NR Description: unknown [Arabidopsis thaliana]
  misc_feature (21)..(410): Homolog of NCBI NO: 15241503 NR Description: NAD-dependent epimerase/dehydratase family
  misc_feature (1)..(411): Homolog of NCBI NO: 27529690 NR Description: UDP-galactose 4-epimerase-like protein [Oryza
  misc_feature (21)..(411): Homolog of NCBI NO: 26106016 NR Description: UDP-galactose 4-epimerase-like protein [Oryza
  misc_feature (33)..(411): Homolog of NCBI NO: 7437275 NR Description: probable UDPglucose 4-epimerase (EC 5.1.3.2)
  misc_feature (1)..(408): Homolog of NCBI NO: 25553524 NR Description: UDP-galactose 4-epimerase-like protein [Oryza
  misc_feature (21)..(408): Homolog of NCBI NO: 27260937 NR Description: OJ1417_E01.21 [Oryza sativa (japonica
  misc_feature (244)..(407): Homolog of NCBI NO: 5852089 NR Description: zwh12.1 [Oryza sativa (indica cultivar-group)]
MLSFSRARSQGRNTRPLGGGMEYLEPKRKSNVMGKIILVVSLTALCIFMLKHAPSFTSPTAFSRSEEGVTHVLVTGGAGYIGSHAALRLLKDSYRVTIVDNLSRGNLGAVKVLQGLFPEPGRLQFIYADLGDAKAVDKIFSENAFDAVMHFAAVAYVGESTLDPLKYYHNITSNTLVVLEAVARHKVKKLIYSSTCATYGEPDKMPIVEVTPQVPINPYGKAKKMAEDMILDFSKNSDMAVMILRYFNVIGSDPEGRLGEAPKPELREHGRISGACFDAARGVIPGLQVKGTDYKTGDGTCVRDYIDVTDLVDAHVKALEKAKPRNVGIYNVGTGKGRSVKEFVEACKKATGVDIKVDFLPRRPGDYAEVYSDPAKILRDLNWSARYTNLQESLEVAWKWQKTHPHGYASS

SEQ ID NO: 102037 - protein, 391 aa, Arabidopsis thaliana
  peptide (1)..(391): Ceres Seq. ID no. 13609304
  misc_feature (52)..(385): Pfam Name: NAD dependent epimerase/dehydratase family Pfam Description: NAD dependent epimerase/dehydratase family
  misc_feature (13)..(391): Homolog of NCBI NO: 15237098 NR Description: NAD-dependent epimerase/dehydratase family
  misc_feature (1)..(388): Homolog of NCBI NO: 22329866 NR Description: NAD-dependent epimerase/dehydratase family
  misc_feature (1)..(388): Homolog of NCBI NO: 24417398 NR Description: unknown [Arabidopsis thaliana]
  misc_feature (1)..(390): Homolog of NCBI NO: 15241503 NR Description: NAD-dependent epimerase/dehydratase family
  misc_feature (1)..(391): Homolog of NCBI NO: 27529690 NR Description: UDP-galactose 4-epimerase-like protein [Oryza
  misc_feature (1)..(391): Homolog of NCBI NO: 26106016 NR Description: UDP-galactose 4-epimerase-like protein [Oryza
  misc_feature (13)..(391): Homolog of NCBI NO: 7437275 NR Description: probable UDPglucose 4-epimerase (EC 5.1.3.2)
  misc_feature (1)..(388): Homolog of NCBI NO: 25553524 NR Description: UDP-galactose 4-epimerase-like protein [Oryza
  misc_feature (1)..(388): Homolog of NCBI NO: 27260937 NR Description: OJ1417_E01.21 [Oryza sativa (japonica
  misc_feature (224)..(387): Homolog of NCBI NO: 5852089 NR Description: zwh12.1 [Oryza sativa (indica cultivar-group)]
MEYLEPKRKSNVMGKIILVVSLTALCIFMLKHAPSFTSPTAFSRSEEGVTHVLVTGGAGYIGSHAALRLLKDSYRVTIVDNLSRGNLGAVKVLQGLFPEPGRLQFIYADLGDAKAVDKIFSENAFDAVMHFAAVAYVGESTLDPLKYYHNITSNTLVVLEAVARHKVKKLIYSSTCATYGEPDKMPIVEVTPQVPINPYGKAKKMAEDMILDFSKNSDMAVMILRYFNVIGSDPEGRLGEAPKPELREHGRISGACFDAARGVIPGLQVKGTDYKTGDGTCVRDYIDVTDLVDAHVKALEKAKPRNVGIYNVGTGKGRSVKEFVEACKKATGVDIKVDFLPRRPGDYAEVYSDPAKILRDLNWSARYTNLQESLEVAWKWQKTHPHGYASS

SEQ ID NO: 102038 - protein, 379 aa, Arabidopsis thaliana; identical to SEQ ID NO: 72126
  peptide (1)..(379): Ceres Seq. ID no. 13609305
  misc_feature (40)..(373): Pfam Name: NAD dependent epimerase/dehydratase family Pfam Description: NAD dependent epimerase/dehydratase family
  misc_feature (1)..(379): Homolog of NCBI NO: 15237098 NR Description: NAD-dependent epimerase/dehydratase family
  misc_feature (1)..(376): Homolog of NCBI NO: 22329866 NR Description: NAD-dependent epimerase/dehydratase family
  misc_feature (1)..(376): Homolog of NCBI NO: 24417398 NR Description: unknown [Arabidopsis thaliana]
  misc_feature (1)..(378): Homolog of NCBI NO: 15241503 NR Description: NAD-dependent epimerase/dehydratase family
  misc_feature (1)..(379): Homolog of NCBI NO: 27529690 NR Description: UDP-galactose 4-epimerase-like protein [Oryza
  misc_feature (1)..(379): Homolog of NCBI NO: 26106016 NR Description: UDP-galactose 4-epimerase-like protein [Oryza
  misc_feature (1)..(379): Homolog of NCBI NO: 7437275 NR Description: probable UDPglucose 4-epimerase (EC 5.1.3.2)
  misc_feature (1)..(376): Homolog of NCBI NO: 25553524 NR Description: UDP-galactose 4-epimerase-like protein [Oryza
  misc_feature (1)..(376): Homolog of NCBI NO: 27260937 NR Description: OJ1417_E01.21 [Oryza sativa (japonica
  misc_feature (212)..(375): Homolog of NCBI NO: 5852089 NR Description: zwh12.1 [Oryza sativa (indica cultivar-group)]

SEQ ID NO: 102039 - DNA, 1020 bp, Arabidopsis thaliana
  misc_feature (1)..(1020): Ceres Seq. ID no. 13609306
  misc_feature: MA Experiment ID: 108573 Result: Up-regulated in Transcription
  misc_feature: MA Experiment 108573 PARAMETER Experiment Name: At_Drought_cDNA_P Parameter: Timepoint (hr) Value: 6
  misc_feature: MA Experiment 108573 PARAMETER Experiment Name: At_Drought_cDNA_P Parameter: Tissue Value: Aerial
  misc_feature: MA Experiment 108573 PARAMETER Experiment Name: At_Drought_cDNA_P Parameter: Treatment Value: Drought vs. No Drought
  misc_feature: MA Experiment ID: 20000173 Result: Up-regulated in Transcription
  misc_feature: MA Experiment 20000173 PARAMETER Experiment Name: At_42deg_Heat_P Parameter: Age (day) Value: 14
  misc_feature: MA Experiment 20000173 PARAMETER Experiment Name: At_42deg_Heat_P Parameter: Organism Value: A. thaliana
  misc_feature: MA Experiment 20000173 PARAMETER Experiment Name: At_42deg_Heat_P Parameter: Plant Line Value: WS
  misc_feature: MA Experiment 20000173 PARAMETER Experiment Name: At_42deg_Heat_P Parameter: Temperature (deg C) Value: 42 vs. 22
  misc_feature: MA Experiment 20000173 PARAMETER Experiment Name: At_42deg_Heat_P Parameter: Timepoint (hr) Value: 6
  misc_feature: MA Experiment 20000173 PARAMETER Experiment Name: At_42deg_Heat_P Parameter: Tissue Value: Aerial
  misc_feature: MA Experiment ID: 20001450 Result: Up-regulated in Transcription
  misc_feature: MA Experiment 20001450 PARAMETER Experiment Name: At_Far-red-induction_P Parameter: Age (day) Value: 7
  misc_feature: MA Experiment 20001450 PARAMETER Experiment Name: At_Far-red-induction_P Parameter: Light Value: Far-red vs. White
  misc_feature: MA Experiment 20001450 PARAMETER Experiment Name: At_Far-red-induction_P Parameter: Organism Value: A. thaliana
  misc_feature: MA Experiment 20001450 PARAMETER Experiment Name: At_Far-red-induction_P Parameter: Plant Line Value: Columbia
  misc_feature: MA Experiment 20001450 PARAMETER Experiment Name: At_Far-red-induction_P Parameter: Timepoint (hr) Value: 8
  misc_feature: MA Experiment 20001450 PARAMETER Experiment Name: At_Far-red-induction_P Parameter: Tissue Value: Whole Plant
  misc_feature: MA Experiment ID: 20001451 Result: Up-regulated in Transcription
  misc_feature: MA Experiment 20001451 PARAMETER Experiment Name: At_Far-red-induction_P Parameter: Age (day) Value: 7
  misc_feature: MA Experiment 20001451 PARAMETER Experiment Name: At_Far-red-induction_P Parameter: Light Value: Far-red vs. White
  misc_feature: MA Experiment 20001451 PARAMETER Experiment Name: At_Far-red-induction_P Parameter: Organism Value: A. thaliana
  misc_feature: MA Experiment 20001451 PARAMETER Experiment Name: At_Far-red-induction_P Parameter: Plant Line Value: Columbia
  misc_feature: MA Experiment 20001451 PARAMETER Experiment Name: At_Far-red-induction_P Parameter: Timepoint (hr) Value: 24
  misc_feature: MA Experiment 20001451 PARAMETER Experiment Name: At_Far-red-induction_P Parameter: Tissue Value: Whole Plant
cttacgcgtcatgtaaaaaaaaaagaagcgtaaattacgaaaaacagagagataaatccgggcattgagattttggagatagagagagagaaaaatcgaaatctattgtctatctcctcaatttggattggattttctgcatatcatcgctctagctttcgcgggttttggattcgattccttacccttctccaatcgaagtttttggctttgaattggatttgggtttcgttccaaaatcagctctttttgttaatcagcagatatgcaggaccagctggtgtgtcatggttgtaggaatttattgatgtatcctagaggagcatctaatgtgcgttgtgcgttatgtaacactatcaacatggttcctcctcctcctccacctcacgacatggcacacattatatgtggtggttgtagaacaatgcttatgtatacgcgtggggctagtagcgtaagatgctcttgctgtcaaactacgaaccttgtgccagcgcactccaatcaggttgcccatgctccttccagtcaggttgcgcagatcaattgtgggcattgtcggacgaccctcatgtatccttacggtgcatcatccgtcaaatgcgctgtttgtcaattcgtaactaacgttaatatgagcaatggaagggtacctctcccaactaaccggccaaatggaacagcttgtcccccctctacatcaacttcaacaccaccctctcagacccaaaccgttgttgtagaaaaccccatgtccgttgatgaaagcggaaagttggtgagcaatgttgttgttggagtgacaactgacaaaaagtaatcaagaatgagtgagatcttaaagatcaaatccaaattcttcctctattcctgcgtttggtttgtgcatattacatacgcggaaaaactgtatgttatatatctcttgactcctttttaacccaagagaaaaagcttatcagaatctcttgttactgcattattggggtttattcaaagttgaagacacaaggtttttgc

SEQ ID NO: 102040 - protein, 184 aa, Arabidopsis thaliana; identical to SEQ ID NO: 24508
  peptide (1)..(184): Ceres Seq. ID no. 13609307
  misc_feature (1)..(184): Homolog of NCBI NO: 30685085 NR Description: zinc-finger protein Lsd1 [Arabidopsis thaliana]
  misc_feature (1)..(184): Homolog of NCBI NO: 30685083 NR Description: zinc-finger protein Lsd1 [Arabidopsis thaliana]
  misc_feature (1)..(184): Homolog of NCBI NO: 17981378 NR Description: zinc finger protein LSD1 [Brassica oleracea]
  misc_feature (1)..(184): Homolog of NCBI NO: 17981380 NR Description: zinc finger protein LSD2 [Brassica oleracea]
  misc_feature (2)..(134): Homolog of NCBI NO: 34905200 NR Description: P0672D01.2 [Oryza sativa (japonica
  misc_feature (1)..(126): Homolog of NCBI NO: 30692719 NR Description: zinc-finger protein -related [Arabidopsis
  misc_feature (1)..(125): Homolog of NCBI NO: 18398482 NR Description: zinc-finger protein -related [Arabidopsis >gi|16323143|gb|AAL15306.1| At1g32540/T9G5_1 [Arabidopsis >gi|21436015|gb|AAM51585.1| At1g32540/T9G5_1 [Arabidopsis
  misc_feature (1)..(134): Homolog of NCBI NO: 29467531 NR Description: P0582D05.23 [Oryza sativa (japonica
  misc_feature (1)..(74): Homolog of NCBI NO: 25403154 NR Description: probable zinc-finger protein, 7043-7771
  misc_feature (17)..(139): Homolog of NCBI NO: 34912604 NR Description: P0046B10.19 [Oryza sativa (japonica

SEQ ID NO: 102041 - protein, 170 aa, Arabidopsis thaliana; identical to SEQ ID NO: 24509
  peptide (1)..(170): Ceres Seq. ID no. 13609308
  misc_feature (1)..(170): Homolog of NCBI NO: 30685085 NR Description: zinc-finger protein Lsd1 [Arabidopsis thaliana]
  misc_feature (1)..(170): Homolog of NCBI NO: 30685083 NR Description: zinc-finger protein Lsd1 [Arabidopsis thaliana]
  misc_feature (1)..(170): Homolog of NCBI NO: 17981378 NR Description: zinc finger protein LSD1 [Brassica oleracea]
  misc_feature (1)..(170): Homolog of NCBI NO: 17981380 NR Description: zinc finger protein LSD2 [Brassica oleracea]
  misc_feature (1)..(120): Homolog of NCBI NO: 34905200 NR Description: P0672D01.2 [Oryza sativa (japonica
  misc_feature (1)..(112): Homolog of NCBI NO: 30692719 NR Description: zinc-finger protein -related [Arabidopsis
  misc_feature (1)..(111): Homolog of NCBI NO: 18398482 NR Description: zinc-finger protein -related [Arabidopsis >gi|16323143|gb|AAL15306.1| At1g32540/T9G5_1 [Arabidopsis >gi|21436015|gb|AAM51585.1| At1g32540/T9G5_1 [Arabidopsis
  misc_feature (1)..(120): Homolog of NCBI NO: 29467531 NR Description: P0582D05.23 [Oryza sativa (japonica
  misc_feature (1)..(60): Homolog of NCBI NO: 25403154 NR Description: probable zinc-finger protein, 7043-7771
  misc_feature (3)..(125): Homolog of NCBI NO: 34912604 NR Description: P0046B10.19 [Oryza sativa (japonica

SEQ ID NO: 102042 - protein, 152 aa, Arabidopsis thaliana; identical to SEQ ID NO: 24510
  peptide (1)..(152): Ceres Seq. ID no. 13609309
  misc_feature (1)..(152): Homolog of NCBI NO: 30685085 NR Description: zinc-finger protein Lsd1 [Arabidopsis thaliana]
  misc_feature (1)..(152): Homolog of NCBI NO: 30685083 NR Description: zinc-finger protein Lsd1 [Arabidopsis thaliana]
  misc_feature (1)..(152): Homolog of NCBI NO: 17981378 NR Description: zinc finger protein LSD1 [Brassica oleracea]
  misc_feature (1)..(152): Homolog of NCBI NO: 17981380 NR Description: zinc finger protein LSD2 [Brassica oleracea]
  misc_feature (1)..(102): Homolog of NCBI NO: 34905200 NR Description: P0672D01.2 [Oryza sativa (japonica
  misc_feature (1)..(94): Homolog of NCBI NO: 30692719 NR Description: zinc-finger protein -related [Arabidopsis
  misc_feature (1)..(93): Homolog of NCBI NO: 18398482 NR Description: zinc-finger protein -related [Arabidopsis >gi|16323143|gb|AAL15306.1| At1g32540/T9G5_1 [Arabidopsis >gi|21436015|gb|AAM51585.1| At1g32540/T9G5_1 [Arabidopsis
  misc_feature (1)..(102): Homolog of NCBI NO: 29467531 NR Description: P0582D05.23 [Oryza sativa (japonica
  misc_feature (1)..(42): Homolog of NCBI NO: 25403154 NR Description: probable zinc-finger protein, 7043-7771
  misc_feature (1)..(107): Homolog of NCBI NO: 34912604 NR Description: P0046B10.19 [Oryza sativa (japonica

SEQ ID NO: 102043 - DNA, 1128 bp, Arabidopsis thaliana
  misc_feature (1)..(1128): Ceres Seq. ID no. 13609321
  misc_feature: MA Experiment ID: 108435 Result: Down-regulated in Transcription
  misc_feature: MA Experiment 108435 PARAMETER Experiment Name: At_stm_Mutants_cDNA_P Parameter: Plant Line Value: wt Landsburg vs stm
  misc_feature: MA Experiment 108435 PARAMETER Experiment Name: At_stm_Mutants_cDNA_P Parameter: Tissue Value: Shoot Apical Meristem Region
  misc_feature: MA Experiment ID: 108462 Result: Up-regulated in Transcription
  misc_feature: MA Experiment 108462 PARAMETER Experiment Name: At_Germinating_Seeds_cDNA_P Parameter: Age (day) Value: 2 vs. 0
  misc_feature: MA Experiment 108462 PARAMETER Experiment Name: At_Germinating_Seeds_cDNA_P Parameter: Tissue Value: Germinating Seeds
  misc_feature: MA Experiment ID: 108463 Result: Up-regulated in Transcription
  misc_feature: MA Experiment 108463 PARAMETER Experiment Name: At_Germinating_Seeds_cDNA_P Parameter: Age (day) Value: 3 vs. 0
  misc_feature: MA Experiment 108463 PARAMETER Experiment Name: At_Germinating_Seeds_cDNA_P Parameter: Tissue Value: Germinating Seeds
  misc_feature: MA Experiment ID: 108464 Result: Up-regulated in Transcription
  misc_feature: MA Experiment 108464 PARAMETER Experiment Name: At_Germinating_Seeds_cDNA_P Parameter: Age (day) Value: 4 vs. 0
  misc_feature: MA Experiment 108464 PARAMETER Experiment Name: At_Germinating_Seeds_cDNA_P Parameter: Tissue Value: Germinating Seeds
  misc_feature: MA Experiment ID: 108595 Result: Down-regulated in Transcription
  misc_feature: MA Experiment 108595 PARAMETER Experiment Name: At_Ler-pi_Ovule_cDNA_P Parameter: Plant Line Value: null
  misc_feature: MA Experiment ID: 20000087 Result: Down-regulated in Transcription
  misc_feature: MA Experiment 20000087 PARAMETER Experiment Name: At_100uM_ABA_Mutants_cDNA_P Parameter: Plant Line Value: WS
  misc_feature: MA Experiment 20000087 PARAMETER Experiment Name: At_100uM_ABA_Mutants_cDNA_P Parameter: Timepoint (hr) Value: 6
  misc_feature: MA Experiment 20000087 PARAMETER Experiment Name: At_100uM_ABA_Mutants_cDNA_P Parameter: Tissue Value: Aerial
  misc_feature: MA Experiment 20000087 PARAMETER Experiment Name: At_100uM_ABA_Mutants_cDNA_P Parameter: Treatment Value: 100uM ABA vs. No Treatment
  misc_feature: MA Experiment ID: 20000113 Result: Up-regulated in Transcription
  misc_feature: MA Experiment 20000113 PARAMETER Experiment Name: At_42deg_Heat_cDNA_P Parameter: Temperature (deg C) Value: 42 vs. 22
  misc_feature: MA Experiment 20000113 PARAMETER Experiment Name: At_42deg_Heat_cDNA_P Parameter: Timepoint (hr) Value: 8
  misc_feature: MA Experiment 20000113 PARAMETER Experiment Name: At_42deg_Heat_cDNA_P Parameter: Tissue Value: Aerial
  misc_feature: MA Experiment ID: 20000224 Result: Down-regulated in Transcription
  misc_feature: MA Experiment ID: 20000439 Result: Down-regulated in Transcription
  misc_feature: MA Experiment 20000439 PARAMETER Experiment Name: At_Roots__P Parameter: Age (day) Value: 14 vs. 21
  misc_feature: MA Experiment 20000439 PARAMETER Experiment Name: At_Roots__P Parameter: Organism Value: A. thaliana
  misc_feature: MA Experiment 20000439 PARAMETER Experiment Name: At_Roots__P Parameter: Tissue Value: Roots vs. Whole Plant
  misc_feature: MA Experiment ID: 20000495 Result: Down-regulated in Transcription
  misc_feature: MA Experiment 20000495 PARAMETER Experiment Name: At_Guard_Cells_P Parameter: Harvest Date Value: 8/2/2002
  misc_feature: MA Experiment 20000495 PARAMETER Experiment Name: At_Guard_Cells_P Parameter: Organism Value: A. thaliana
  misc_feature: MA Experiment 20000495 PARAMETER Experiment Name: At_Guard_Cells_P Parameter: Tissue Value: Guard Cells vs. Leaves
cagcgttcgccgagagatatacatactcggatcagtcgtcaaaagctttggaatttgatacttttgatttttcgagaatcttgaaaatcagtcatgggttctggaaaagagcgtgacactttcgtctacctcgctaagctctctgagcaagctgagcgttatgaagaaatggtggaatcaatgaaaagtgttgcgaaattgaatgttgatctgacggtggaagagaggaacttactctctgtgggttacaagaacgtgattggttcaaggagagcttcgtggaggatcttctcgtcgattgaacaaaaggaagcagtgaaagggaatgatgttaatgtaaagaggatcaaagagtatatggagaaggttgagttagagctttctaacatatgcattgatattatgtctgtcttagatgagcatctcattccttcggcttccgagggtgaatctactgtcttcttcaacaagatgaaaggtgactattaccgctatcttgctgagttcaaatcagggaacgagaggaaagaggctgctgatcagtctttgaaagcctatgagattgctactactgctgctgaggctaagctccctccaacacaccctatcagattgggtttggctttgaatttctctgtcttctactacgagatcatgaacgcacctgaaagggcatgtcaccttgctaagcaggcgttcgatgaagctatctcagagcttgacactctgaacgaggaatcctacaaagatagcaccttaataatgcaactccttagggacaatctgaccttgtggacttctgacatctcagaagaaggaggagacgatgctcataagacgaatggttctgccaaacctggtgctggtggagacgatgcagagtgatatgatatgtgtgcacctggacaatatgtttcaagaactgaatgtgcggtgaataatagtgaaaagtagagtttctctgttccctatatcatgattgtctatgttacttgtactctggtttagccctaaatgtctctctggtttgaatgtattgcatgcctgtctcaggacactcttatttgtaattcactactgtcgtcttactatctatccttatggatccaatcttgaaacttatattcc

SEQ ID NO: 102044 - protein, 263 aa, Arabidopsis thaliana; identical to SEQ ID NO: 30992
  peptide (1)..(263): Ceres Seq. ID no. 13609322
  misc_feature (7)..(242): Pfam Name: 14-3-3 protein Pfam Description: 14-3-3 protein
  misc_feature (1)..(263): Homolog of NCBI NO: 18406007 NR Description: 14-3-3 protein GF14 mu (grf9) [Arabidopsis
  misc_feature (1)..(263): Homolog of NCBI NO: 1531629 NR Description: GF14 mu [Arabidopsis thaliana]
  misc_feature (1)..(263): Homolog of NCBI NO: 1168192 NR Description: 14-3-3-LIKE PROTEIN B (VFA-1433B)
  misc_feature (1)..(263): Homolog of NCBI NO: 2822483 NR Description: 14-3-3 protein homolog [Maackia amurensis]

SEQ ID NO: 102045 - protein, 238 aa, Arabidopsis thaliana; identical to SEQ ID NO: 30993
  peptide (1)..(238): Ceres Seq. ID no. 13609323
  misc_feature (1)..(217): Pfam Name: 14-3-3 protein Pfam Description: 14-3-3 protein
  misc_feature (1)..(238): Homolog of NCBI NO: 18406007 NR Description: 14-3-3 protein GF14 mu (grf9) [Arabidopsis
  misc_feature (1)..(238): Homolog of NCBI NO: 1531629 NR Description: GF14 mu [Arabidopsis thaliana]
  misc_feature (1)..(238): Homolog of NCBI NO: 1168192 NR Description: 14-3-3-LIKE PROTEIN B (VFA-1433B)
  misc_feature (1)..(238): Homolog of NCBI NO: 2822483 NR Description: 14-3-3 protein homolog [Maackia amurensis]

SEQ ID NO: 102046 - protein, 234 aa, Arabidopsis thaliana; identical to SEQ ID NO: 30994
  peptide (1)..(234): Ceres Seq. ID no. 13609324
  misc_feature (1)..(213): Pfam Name: 14-3-3 protein Pfam Description: 14-3-3 protein
  misc_feature (1)..(234): Homolog of NCBI NO: 18406007 NR Description: 14-3-3 protein GF14 mu (grf9) [Arabidopsis
  misc_feature (1)..(234): Homolog of NCBI NO: 1531629 NR Description: GF14 mu [Arabidopsis thaliana]
  misc_feature (1)..(234): Homolog of NCBI NO: 1168192 NR Description: 14-3-3-LIKE PROTEIN B (VFA-1433B)
  misc_feature (1)..(234): Homolog of NCBI NO: 2822483 NR Description: 14-3-3 protein homolog [Maackia amurensis]

SEQ ID NO: 102047 - DNA, 851 bp, Arabidopsis thaliana
  misc_feature (1)..(851): Ceres Seq. ID no. 13609325
  misc_feature: MA Experiment ID: 108501 Result: Up-regulated in Transcription
  misc_feature: MA Experiment 108501 PARAMETER Experiment Name: At_ap2_floral_buds_cDNA_P Parameter: Plant Line Value: ap2 (Ler.)
  misc_feature: MA Experiment 108501 PARAMETER Experiment Name: At_ap2_floral_buds_cDNA_P Parameter: Tissue Value: Closed Flower
  misc_feature: MA Experiment ID: 20000234 Result: Up-regulated in Transcription
  misc_feature: MA Experiment 20000234 PARAMETER Experiment Name: At_Siliques_P Parameter: Age (day) Value: 21
  misc_feature: MA Experiment 20000234 PARAMETER Experiment Name: At_Siliques_P Parameter: Organism Value: A. thaliana
  misc_feature: MA Experiment 20000234 PARAMETER Experiment Name: At_Siliques_P Parameter: Plant Line Value: WS
  misc_feature: MA Experiment 20000234 PARAMETER Experiment Name: At_Siliques_P Parameter: Tissue Value: Less Than 5mm Siliques vs. Whole Plant
  misc_feature: MA Experiment ID: 20000235 Result: Up-regulated in Transcription
  misc_feature: MA Experiment 20000235 PARAMETER Experiment Name: At_Siliques_P Parameter: Age (day) Value: 21
  misc_feature: MA Experiment 20000235 PARAMETER Experiment Name: At_Siliques_P Parameter: Organism Value: A. thaliana
  misc_feature: MA Experiment 20000235 PARAMETER Experiment Name: At_Siliques_P Parameter: Plant Line Value: WS
  misc_feature: MA Experiment 20000235 PARAMETER Experiment Name: At_Siliques_P Parameter: Tissue Value: 5-10mm Siliques vs. Whole Plant
  misc_feature: MA Experiment ID: 20000264 Result: Up-regulated in Transcription
  misc_feature: MA Experiment 20000264 PARAMETER Experiment Name: At_Open_Flower_P Parameter: Age (day) Value: 21
  misc_feature: MA Experiment 20000264 PARAMETER Experiment Name: At_Open_Flower_P Parameter: Plant Line Value: WS
  misc_feature: MA Experiment 20000264 PARAMETER Experiment Name: At_Open_Flower_P Parameter: Tissue Value: Open Flower vs. Whole Plant
  misc_feature: MA Experiment ID: 20000286 Result: Up-regulated in Transcription
  misc_feature: MA Experiment 20000286 PARAMETER Experiment Name: At_Open_Flower_P Parameter: Age (day) Value: 21
  misc_feature: MA Experiment 20000286 PARAMETER Experiment Name: At_Open_Flower_P Parameter: Plant Line Value: WS
  misc_feature: MA Experiment 20000286 PARAMETER Experiment Name: At_Open_Flower_P Parameter: Tissue Value: Half Open vs. Whole Plant
atctttaggccaatgaacaaattaactctctcataattcatcttcccatcctcacttctctttctttctgatcataattaatcttgctaagccagctagggcttatagaaatggagggtggtgcgagtaatgaagtagcagagagcagcaagaagatagggagagggaagatagagataaagaggatagagaacactacgaatcgtcaagtcactttctgcaaacgacgcaatggtttactcaagaaagcttatgagctctctgtcttgtgtgacgctgaggttgctcttgtcatcttctccactcgaggccgtctctacgagtacgccaacaacagtgtgagaggaacaatagaaaggtacaagaaagcttgctccgacgccgttaaccctccgaccatcaccgaagctaatactcagtactatcagcaagaggcgtctaaactccggagacagattcgggacattcagaatttgaacagacacattcttggtgaatctcttggttccttgaactttaaggaactcaagaaccttgaaagtaggcttgagaaaggaatcagtcgtgtccgatccaagaagcacgagatgttagttgcagagattgaatacatgcaaaaaagggaaatcgagctgcaaaacgataacatgtatctccgctccaagattactgaaagaacaggtctacagcaacaagaatcgagtgtgatacatcaagggacagtttacgagtcgggtgttacttcttctcaccagtcggggcagtataaccggaattatattgcggttaaccttcttgaaccgaatcagaattcctccaaccaagaccaaccacctctgcaacttgtttga

SEQ ID NO: 102048 - protein, 246 aa, Arabidopsis thaliana
  peptide (1)..(246): Ceres Seq. ID no. 13609326
  misc_feature (89)..(188): Pfam Name: K-box region Pfam Description: K-box region
  misc_feature (1)..(246): Homolog of NCBI NO: 18406070 NR Description: floral homeodomain transcription factor (AGL5)
  misc_feature (1)..(245): Homolog of NCBI NO: 25307910 NR Description: floral homeodomain transcription factor (AGL5)
  misc_feature (1)..(246): Homolog of NCBI NO: 30689162 NR Description: floral homeodomain transcription factor (AGL5)
  misc_feature (2)..(246): Homolog of NCBI NO: 15231135 NR Description: MADS-box protein [Arabidopsis thaliana]
  misc_feature (2)..(246): Homolog of NCBI NO: 12655901 NR Description: SHATTERPROOF1 [Brassica napus]
  misc_feature (68)..(246): Homolog of NCBI NO: 28392912 NR Description: putative floral homeodomain transcription factor
  misc_feature (6)..(246): Homolog of NCBI NO: 5031217 NR Description: AGAMOUS homolog [Liquidambar styraciflua]
  misc_feature (16)..(246): Homolog of NCBI NO: 14279306 NR Description: MAD-box transcripion factor [Vitis vinifera]
  misc_feature (5)..(246): Homolog of NCBI NO: 6970411 NR Description: MADS-box protein [Rosa rugosa]
  misc_feature (6)..(246): Homolog of NCBI NO: 16973296 NR Description: C-type MADS box protein [Malus x domestica]
MEGGASNEVAESSKKIGRGKIEIKRIENTTNRQVTFCKRRNGLLKKAYELSVLCDAEVALVIFSTRGRLYEYANNSVRGTIERYKKACSDAVNPPTITEANTQYYQQEASKLRRQIRDIQNLNRHILGESLGSLNFKELKNLESRLEKGISRVRSKKHEMLVAEIEYMQKREIELQNDNMYLRSKITERTGLQQQESSVIHQGTVYESGVTSSHQSGQYNRNYIAVNLLEPNQNSSNQDQPPLQLV

SEQ ID NO: 102049 - DNA, 2097 bp, Arabidopsis thaliana
  misc_feature (1)..(2097): Ceres Seq. ID no. 13609327
  misc_feature: MA Experiment ID: 20000166 Result: Up-regulated in Transcription
  misc_feature: MA Experiment 20000166 PARAMETER Experiment Name: At_100uM_ABA_P Parameter: Age (day) Value: 14
  misc_feature: MA Experiment 20000166 PARAMETER Experiment Name: At_100uM_ABA_P Parameter: Organism Value: A. thaliana
  misc_feature: MA Experiment 20000166 PARAMETER Experiment Name: At_100uM_ABA_P Parameter: Plant Line Value: WS
  misc_feature: MA Experiment 20000166 PARAMETER Experiment Name: At_100uM_ABA_P Parameter: Timepoint (hr) Value: 1
  misc_feature: MA Experiment 20000166 PARAMETER Experiment Name: At_100uM_ABA_P Parameter: Tissue Value: Aerial
  misc_feature: MA Experiment 20000166 PARAMETER Experiment Name: At_100uM_ABA_P Parameter: Treatment Value: 100uM ABA vs. No Treatment
  misc_feature: MA Experiment ID: 20000171 Result: Up-regulated in Transcription
  misc_feature: MA Experiment 20000171 PARAMETER Experiment Name: At_42deg_Heat_P Parameter: Age (day) Value: 14
  misc_feature: MA Experiment 20000171 PARAMETER Experiment Name: At_42deg_Heat_P Parameter: Organism Value: A. thaliana
  misc_feature: MA Experiment 20000171 PARAMETER Experiment Name: At_42deg_Heat_P Parameter: Plant Line Value: WS
  misc_feature: MA Experiment 20000171 PARAMETER Experiment Name: At_42deg_Heat_P Parameter: Temperature (deg C) Value: 42 vs. 22
  misc_feature: MA Experiment 20000171 PARAMETER Experiment Name: At_42deg_Heat_P Parameter: Timepoint (hr) Value: 1
  misc_feature: MA Experiment 20000171 PARAMETER Experiment Name: At_42deg_Heat_P Parameter: Tissue Value: Aerial
  misc_feature: MA Experiment ID: 20000184 Result: Down-regulated in Transcription
  misc_feature: MA Experiment 20000184 PARAMETER Experiment Name: At_Shoots__P Parameter: Age (day) Value: 7
  misc_feature: MA Experiment 20000184 PARAMETER Experiment Name: At_Shoots__P Parameter: Tissue Value: Shoots vs. Whole Plant
  misc_feature: MA Experiment ID: 20000211 Result: Up-regulated in Transcription
  misc_feature: MA Experiment 20000211 PARAMETER Experiment Name: At_0.001percent_MeJA__P Parameter: Age (day) Value: 14
  misc_feature: MA Experiment 20000211 PARAMETER Experiment Name: At_0.001percent_MeJA__P Parameter: Organism Value: A. thaliana
  misc_feature: MA Experiment 20000211 PARAMETER Experiment Name: At_0.001percent_MeJA__P Parameter: Plant Line Value: WS
  misc_feature: MA Experiment 20000211 PARAMETER Experiment Name: At_0.001percent_MeJA__P Parameter: Timepoint (hr) Value: 1
  misc_feature: MA Experiment 20000211 PARAMETER Experiment Name: At_0.001percent_MeJA__P Parameter: Tissue Value: Aerial
  misc_feature: MA Experiment 20000211 PARAMETER Experiment Name: At_0.001percent_MeJA__P Parameter: Treatment Value: 0.001percent MeJA vs. No Treatment
  misc_feature: MA Experiment ID: 20000227 Result: Down-regulated in Transcription
  misc_feature: MA Experiment 20000227 PARAMETER Experiment Name: At_Root-Tips-vs-Tops_P Parameter: Tissue Value: Root Tips vs. Root Tops
  misc_feature: MA Experiment ID: 20000234 Result: Up-regulated in Transcription
  misc_feature: MA Experiment 20000234 PARAMETER Experiment Name: At_Siliques_P Parameter: Age (day) Value: 21
  misc_feature: MA Experiment 20000234 PARAMETER Experiment Name: At_Siliques_P Parameter: Organism Value: A. thaliana
  misc_feature: MA Experiment 20000234 PARAMETER Experiment Name: At_Siliques_P Parameter: Plant Line Value: WS
  misc_feature: MA Experiment 20000234 PARAMETER Experiment Name: At_Siliques_P Parameter: Tissue Value: Less Than 5mm Siliques vs. Whole Plant
  misc_feature: MA Experiment ID: 20000264 Result: Up-regulated in Transcription
  misc_feature: MA Experiment 20000264 PARAMETER Experiment Name: At_Open_Flower_P Parameter: Age (day) Value: 21
  misc_feature: MA Experiment 20000264 PARAMETER Experiment Name: At_Open_Flower_P Parameter: Plant Line Value: WS
  misc_feature: MA Experiment 20000264 PARAMETER Experiment Name: At_Open_Flower_P Parameter: Tissue Value: Open Flower vs. Whole Plant
  misc_feature: MA Experiment ID: 20000265 Result: Up-regulated in Transcription
  misc_feature: MA Experiment 20000265 PARAMETER Experiment Name: At_Open_Flower_P Parameter: Age (day) Value: 21
  misc_feature: MA Experiment 20000265 PARAMETER Experiment Name: At_Open_Flower_P Parameter: Plant Line Value: WS
  misc_feature: MA Experiment 20000265 PARAMETER Experiment Name: At_Open_Flower_P Parameter: Tissue Value: Closed Flower vs. Whole Plant
  misc_feature: MA Experiment ID: 20000268 Result: Up-regulated in Transcription
  misc_feature: MA Experiment 20000268 PARAMETER Experiment Name: At_100mM_NaCl__P Parameter: Age (day) Value: 14
  misc_feature: MA Experiment 20000268 PARAMETER Experiment Name: At_100mM_NaCl__P Parameter: Organism Value: A. thaliana
  misc_feature: MA Experiment 20000268 PARAMETER Experiment Name: At_100mM_NaCl__P Parameter: Plant Line Value: WS
  misc_feature: MA Experiment 20000268 PARAMETER Experiment Name: At_100mM_NaCl__P Parameter: Timepoint (hr) Value: 6
  misc_feature: MA Experiment 20000268 PARAMETER Experiment Name: At_100mM_NaCl__P Parameter: Tissue Value: Whole Plant
  misc_feature: MA Experiment 20000268 PARAMETER Experiment Name: At_100mM_NaCl__P Parameter: Treatment Value: 100mM NaCl vs. No Treatment
  misc_feature: MA Experiment ID: 20000286 Result: Up-regulated in Transcription
  misc_feature: MA Experiment 20000286 PARAMETER Experiment Name: At_Open_Flower_P Parameter: Age (day) Value: 21
  misc_feature: MA Experiment 20000286 PARAMETER Experiment Name: At_Open_Flower_P Parameter: Plant Line Value: WS
  misc_feature: MA Experiment 20000286 PARAMETER Experiment Name: At_Open_Flower_P Parameter: Tissue Value: Half Open vs. Whole Plant
  misc_feature: MA Experiment ID: 20000308 Result: Up-regulated in Transcription
  misc_feature: MA Experiment 20000308 PARAMETER Experiment Name: At_100mM_NaCl__P Parameter: Age (day) Value: 17
  misc_feature: MA Experiment 20000308 PARAMETER Experiment Name: At_100mM_NaCl__P Parameter: Organism Value: A. thaliana
  misc_feature: MA Experiment 20000308 PARAMETER Experiment Name: At_100mM_NaCl__P Parameter: Plant Line Value: WS
  misc_feature: MA Experiment 20000308 PARAMETER Experiment Name: At_100mM_NaCl__P Parameter: Timepoint (hr) Value: 72
  misc_feature: MA Experiment 20000308 PARAMETER Experiment Name: At_100mM_NaCl__P Parameter: Tissue Value: Whole Plant
  misc_feature: MA Experiment 20000308 PARAMETER Experiment Name: At_100mM_NaCl__P Parameter: Treatment Value: 100mM NaCl vs. No Treatment
  misc_feature: MA Experiment ID: 20000452 Result: Up-regulated in Transcription
  misc_feature: MA Experiment 20000452 PARAMETER Experiment Name: At_CS6879_Shoots-Roots_P Parameter: Age (day) Value: 14
  misc_feature: MA Experiment 20000452 PARAMETER Experiment Name: At_CS6879_Shoots-Roots_P Parameter: Organism Value: A. thaliana
  misc_feature: MA Experiment 20000452 PARAMETER Experiment Name: At_CS6879_Shoots-Roots_P Parameter: Plant Line Value: CS6879 vs. WS
  misc_feature: MA Experiment 20000452 PARAMETER Experiment Name: At_CS6879_Shoots-Roots_P Parameter: Tissue Value: Shoots
  misc_feature: MA Experiment ID: 20000453 Result: Up-regulated in Transcription
  misc_feature: MA Experiment 20000453 PARAMETER Experiment Name: At_100uM_ABA_P Parameter: Age (day) Value: 15
  misc_feature: MA Experiment 20000453 PARAMETER Experiment Name: At_100uM_ABA_P Parameter: Organism Value: A. thaliana
  misc_feature: MA Experiment 20000453 PARAMETER Experiment Name: At_100uM_ABA_P Parameter: Plant Line Value: WS
  misc_feature: MA Experiment 20000453 PARAMETER Experiment Name: At_100uM_ABA_P Parameter: Timepoint (hr) Value: 24
  misc_feature: MA Experiment 20000453 PARAMETER Experiment Name: At_100uM_ABA_P Parameter: Tissue Value: Aerial
  misc_feature: MA Experiment 20000453 PARAMETER Experiment Name: At_100uM_ABA_P Parameter: Treatment Value: 100uM ABA vs. No Treatment
  misc_feature: MA Experiment ID: 20000455 Result: Up-regulated in Transcription
  misc_feature: MA Experiment 20000455 PARAMETER Experiment Name: At_100uM_ABA_P Parameter: Age (day) Value: 16
  misc_feature: MA Experiment 20000455 PARAMETER Experiment Name: At_100uM_ABA_P Parameter: Organism Value: A. thaliana
  misc_feature: MA Experiment 20000455 PARAMETER Experiment Name: At_100uM_ABA_P Parameter: Plant Line Value: WS
  misc_feature: MA Experiment 20000455 PARAMETER Experiment Name: At_100uM_ABA_P Parameter: Timepoint (hr) Value: 48
  misc_feature: MA Experiment 20000455 PARAMETER Experiment Name: At_100uM_ABA_P Parameter: Tissue Value: Aerial
  misc_feature: MA Experiment 20000455 PARAMETER Experiment Name: At_100uM_ABA_P Parameter: Treatment Value: 100uM ABA vs. No Treatment
  misc_feature: MA Experiment ID: 20000496 Result: Down-regulated in Transcription
  misc_feature: MA Experiment 20000496 PARAMETER Experiment Name: At_Guard_Cells_P Parameter: Harvest Date Value: 7/19/2002
  misc_feature: MA Experiment 20000496 PARAMETER Experiment Name: At_Guard_Cells_P Parameter: Organism Value: Canola
  misc_feature: MA Experiment 20000496 PARAMETER Experiment Name: At_Guard_Cells_P Parameter: Tissue Value: Guard Cells vs. Leaves
  misc_feature: MA Experiment ID: 20000794 Result: Up-regulated in Transcription
  misc_feature: MA Experiment 20000794 PARAMETER Experiment Name: At_Petals_P Parameter: Age (day) Value: 23-25 days
  misc_feature: MA Experiment 20000794 PARAMETER Experiment Name: At_Petals_P Parameter: Plant Line Value: WS
  misc_feature: MA Experiment 20000794 PARAMETER Experiment Name: At_Petals_P Parameter: Tissue Value: Petals vs. Whole plant
  misc_feature: MA Experiment ID: 20001247 Result: Down-regulated in Transcription
  misc_feature: MA Experiment 20001247 PARAMETER Experiment Name: At_Far-red-induction_P Parameter: Age (day) Value: 7
  misc_feature: MA Experiment 20001247 PARAMETER Experiment Name: At_Far-red-induction_P Parameter: Light Value: Far-red vs. White
  misc_feature: MA Experiment 20001247 PARAMETER Experiment Name: At_Far-red-induction_P Parameter: Organism Value: A. thaliana
  misc_feature: MA Experiment 20001247 PARAMETER Experiment Name: At_Far-red-induction_P Parameter: Plant Line Value: Columbia
  misc_feature: MA Experiment 20001247 PARAMETER Experiment Name: At_Far-red-induction_P Parameter: Timepoint (hr) Value: 1
  misc_feature: MA Experiment 20001247 PARAMETER Experiment Name: At_Far-red-induction_P Parameter: Tissue Value: Whole Plant
  misc_feature: MA Experiment ID: 20001248 Result: Down-regulated in Transcription
  misc_feature: MA Experiment 20001248 PARAMETER Experiment Name: At_Far-red-induction_P Parameter: Age (day) Value: 7
  misc_feature: MA Experiment 20001248 PARAMETER Experiment Name: At_Far-red-induction_P Parameter: Light Value: Far-red vs. White
  misc_feature: MA Experiment 20001248 PARAMETER Experiment Name: At_Far-red-induction_P Parameter: Organism Value: A. thaliana
  misc_feature: MA Experiment 20001248 PARAMETER Experiment Name: At_Far-red-induction_P Parameter: Plant Line Value: Columbia
  misc_feature: MA Experiment 20001248 PARAMETER Experiment Name: At_Far-red-induction_P Parameter: Timepoint (hr) Value: 4
  misc_feature: MA Experiment 20001248 PARAMETER Experiment Name: At_Far-red-induction_P Parameter: Tissue Value: Whole Plant
  misc_feature: MA Experiment ID: 20001450 Result: Down-regulated in Transcription
  misc_feature: MA Experiment 20001450 PARAMETER Experiment Name: At_Far-red-induction_P Parameter: Age (day) Value: 7
  misc_feature: MA Experiment 20001450 PARAMETER Experiment Name: At_Far-red-induction_P Parameter: Light Value: Far-red vs. White
  misc_feature: MA Experiment 20001450 PARAMETER Experiment Name: At_Far-red-induction_P Parameter: Organism Value: A. thaliana
  misc_feature: MA Experiment 20001450 PARAMETER Experiment Name: At_Far-red-induction_P Parameter: Plant Line Value: Columbia
  misc_feature: MA Experiment 20001450 PARAMETER Experiment Name: At_Far-red-induction_P Parameter: Timepoint (hr) Value: 8
  misc_feature: MA Experiment 20001450 PARAMETER Experiment Name: At_Far-red-induction_P Parameter: Tissue Value: Whole Plant
  misc_feature: MA Experiment ID: 20001451 Result: Down-regulated in Transcription
  misc_feature: MA Experiment 20001451 PARAMETER Experiment Name: At_Far-red-induction_P Parameter: Age (day) Value: 7
  misc_feature: MA Experiment 20001451 PARAMETER Experiment Name: At_Far-red-induction_P Parameter: Light Value: Far-red vs. White
  misc_feature: MA Experiment 20001451 PARAMETER Experiment Name: At_Far-red-induction_P Parameter: Organism Value: A. thaliana
  misc_feature: MA Experiment 20001451 PARAMETER Experiment Name: At_Far-red-induction_P Parameter: Plant Line Value: Columbia
  misc_feature: MA Experiment 20001451 PARAMETER Experiment Name: At_Far-red-induction_P Parameter: Timepoint (hr) Value: 24
  misc_feature: MA Experiment 20001451 PARAMETER Experiment Name: At_Far-red-induction_P Parameter: Tissue Value: Whole Plant
  misc_feature: MA Experiment ID: 20001904 Result: Up-regulated in Transcription
  misc_feature: MA Experiment 20001904 PARAMETER Experiment Name: At_Drought_Reproduction_P Parameter: Age (day) Value: 37
  misc_feature: MA Experiment 20001904 PARAMETER Experiment Name: At_Drought_Reproduction_P Parameter: Organism Value: A. thaliana
  misc_feature: MA Experiment 20001904 PARAMETER Experiment Name: At_Drought_Reproduction_P Parameter: Plant Line Value: WS
  misc_feature: MA Experiment 20001904 PARAMETER Experiment Name: At_Drought_Reproduction_P Parameter: Timepoint (day) Value: 7
  misc_feature: MA Experiment 20001904 PARAMETER Experiment Name: At_Drought_Reproduction_P Parameter: Tissue Value: Rosettes
  misc_feature: MA Experiment 20001904 PARAMETER Experiment Name: At_Drought_Reproduction_P Parameter: Treatment Value: Drought vs. No Drought
  misc_feature: MA Experiment ID: 20001905 Result: Up-regulated in Transcription
  misc_feature: MA Experiment 20001905 PARAMETER Experiment Name: At_Drought_Reproduction_P Parameter: Age (day) Value: 40
  misc_feature: MA Experiment 20001905 PARAMETER Experiment Name: At_Drought_Reproduction_P Parameter: Organism Value: A. thaliana
  misc_feature: MA Experiment 20001905 PARAMETER Experiment Name: At_Drought_Reproduction_P Parameter: Plant Line Value: WS
  misc_feature: MA Experiment 20001905 PARAMETER Experiment Name: At_Drought_Reproduction_P Parameter: Timepoint (day) Value: 10
  misc_feature: MA Experiment 20001905 PARAMETER Experiment Name: At_Drought_Reproduction_P Parameter: Tissue Value: Rosettes
  misc_feature: MA Experiment 20001905 PARAMETER Experiment Name: At_Drought_Reproduction_P Parameter: Treatment Value: Drought vs. No Drought
caaagcctaaaaaatccgacctttttttgttttctctctctagaagtctctctgttttcatctttctctctctctctctagctcttcttcctcgtttctggcttttctgggaattttgatcctttggcccccattgctcgcttgaattacgaatcagatatcgccgatcgtcgtagatctgcgttgatactgtccggctgagtaaacagggtgaacaaaaaccaaaaacagagagggggtttaaaaatcctgaagaaaatcgcatgaatttgtttggaagcctgattttttcatcttcgatttcgagccacttcacgacttgtcttctcatctttattcttcatttctctccccagcttaatagtaataataataataataatagtaatcgtaattccaataatctcgagagtaatcgtttgatcaattgaaaaaaaaatcatggagtccaggaaaaactctgatcgtcaaatgcgtagagctaattgcttttcagctggtgagaggatgaagacaaggtcgccctccgtgattgtgatcggaggtggtttcggtgggatttcagctgctcgcactcttcaggatgcttcctttcaggttatggtactggagtcccgtgacagaattggtggacgagttcacactgattactcatttggttttcctgttgatcttggtgcatcatggctgcatggagtatgcaaggagaatcctctcgcaccagttattggaagacttggactgcccttgtatcgtactagcggtgacaattccgtcctgtatgatcatgatctcgagagctatgctctgtttgatatggatggcaaccaagttcctcaagaattggtaactcagattggcgtaacgtttgagcgtattttggaagagatcaataaagtcagggatgagcaggatgctgacatttcaatttctcaggctttctcaattgtcttttctaggaaacccgagctgaggttagaggggcttgcacacaacgtacttcaatggtatgtatgccgcatggaaggatggtttgccgcagatgctgaaaccatctctgcaaagtgttgggaccaggaggaattgttgcctggtggacacggtcttatggttagagggtatcgtcctgtcatcaatactctggcgaaaggtcttgatatccgagtaggccacagggttactaagattgtcaggcggtacaatggagtgaaggtaacgacagaaaacgggcaaacttttgttgcggatgctgcagtcattgctgtccctcttggagttttaaaatcgggaaccataaagttcgaacctaagctacctgagtggaaacaagaagcaatcaacgacctaggagtaggtattgagaacaagatcatactacattttgagaaagtcttttggccgaaagtagagtttctaggagtggtagctgaaacctcctacggttgcagttattttttgaacctgcacaaggccacgggtcatccggttctggtttacatgccggctggtcagcttgccaaagacattgagaaaatgtctgatgaagcagctgcaaatttcgccgtcttgcaactccagagaattcttcccgatgcattgcctccggtacagtatctcgtgtcgaggtggggatctgatgtgaattcaatgggatcttatagctatgatatcgtgggcaaacctcatgatctctacgagaggcttagggttccagtggataacttattctttgccggtgaagcgacgagctcgagcttcccgggctcggttcacggcgcttattcaactggattgatggcagctgaagattgtaggatgcgagttctggagcggtatggtgagttggatctgttccagcctgtgatgggcgaggaaggacctgcctctgtacctcttcttatatctcgtctctaaactccatcagttatcgtttactagaaggaacctcaagtgatgattgtcttaatatgaaactaaaattattctcgtgtcggatcgtttaaaacattcccagtcttattttctcagtgtttttaattcaataaattggaacattatatccttgtgatattatttatatatgataatcatctttaa

SEQ ID NO: 102050 - protein, 490 aa, Arabidopsis thaliana; identical to SEQ ID NO: 37591
  peptide (1)..(490): Ceres Seq. ID no. 13609328
  misc_feature (37)..(458): Pfam Name: Flavin containing amine oxidoreductase Pfam Description: Flavin containing amine oxidoreductase
  misc_feature (1)..(490): Homolog of NCBI NO: 15224204 NR Description: amine oxidase family [Arabidopsis thaliana]
  misc_feature (1)..(490): Homolog of NCBI NO: 18650598 NR Description: At2g43020/MFL8.12 [Arabidopsis thaliana]
  misc_feature (1)..(490): Homolog of NCBI NO: 21553762 NR Description: putative amine oxidase [Arabidopsis thaliana]
  misc_feature (1)..(490): Homolog of NCBI NO: 15231622 NR Description: amine oxidase family [Arabidopsis thaliana]
  misc_feature (14)..(490): Homolog of NCBI NO: 38344167 NR Description: OSJNBa0053K19.6 [Oryza sativa (japonica
  misc_feature (1)..(490): Homolog of NCBI NO: 15218830 NR Description: amine oxidase family [Arabidopsis thaliana] putative protein kinase gb|AAD22129 [Arabidopsis thaliana]
  misc_feature (1)..(490): Homolog of NCBI NO: 13877615 NR Description: putative protein kinase gb|AAD22129 [Arabidopsis
  misc_feature (1)..(392): Homolog of NCBI NO: 25404949 NR Description: protein F1E22.18 [imported] - Arabidopsis >gi|6686400|gb|AAF23834.1|AC007234_6 F1E22.18 [Arabidopsis
  misc_feature (357)..(490): Homolog of NCBI NO: 25404949 NR Description: protein F1E22.18 [imported] - Arabidopsis >gi|6686400|gb|AAF23834.1|AC007234_6 F1E22.18 [Arabidopsis
  misc_feature (27)..(456): Homolog of NCBI NO: 38505628 NR Description: slr5093 [Synechocystis sp. PCC 6803]

SEQ ID NO: 102051 - protein, 480 aa, Arabidopsis thaliana; identical to SEQ ID NO: 37592
  peptide (1)..(480): Ceres Seq. ID no. 13609329
  misc_feature (27)..(448): Pfam Name: Flavin containing amine oxidoreductase Pfam Description: Flavin containing amine oxidoreductase
  misc_feature (1)..(480): Homolog of NCBI NO: 15224204 NR Description: amine oxidase family [Arabidopsis thaliana]
  misc_feature (1)..(480): Homolog of NCBI NO: 18650598 NR Description: At2g43020/MFL8.12 [Arabidopsis thaliana]
  misc_feature (1)..(480): Homolog of NCBI NO: 21553762 NR Description: putative amine oxidase [Arabidopsis thaliana]
  misc_feature (1)..(480): Homolog of NCBI NO: 15231622 NR Description: amine oxidase family [Arabidopsis thaliana]
  misc_feature (4)..(480): Homolog of NCBI NO: 38344167 NR Description: OSJNBa0053K19.6 [Oryza sativa (japonica
  misc_feature (1)..(480): Homolog of NCBI NO: 15218830 NR Description: amine oxidase family [Arabidopsis thaliana] putative protein kinase gb|AAD22129 [Arabidopsis thaliana]
  misc_feature (1)..(480): Homolog of NCBI NO: 13877615 NR Description: putative protein kinase gb|AAD22129 [Arabidopsis
  misc_feature (1)..(382): Homolog of NCBI NO: 25404949 NR Description: protein F1E22.18 [imported] - Arabidopsis >gi|6686400|gb|AAF23834.1|AC007234_6 F1E22.18 [Arabidopsis
  misc_feature (347)..(480): Homolog of NCBI NO: 25404949 NR Description: protein F1E22.18 [imported] - Arabidopsis >gi|6686400|gb|AAF23834.1|AC007234_6 F1E22.18 [Arabidopsis
  misc_feature (17)..(446): Homolog of NCBI NO: 38505628 NR Description: slr5093 [Synechocystis sp. PCC 6803]

SEQ ID NO: 102052 - protein, 468 aa, Arabidopsis thaliana; identical to SEQ ID NO: 37593
  peptide (1)..(468): Ceres Seq. ID no. 13609330
  misc_feature (15)..(436): Pfam Name: Flavin containing amine oxidoreductase Pfam Description: Flavin containing amine oxidoreductase
  misc_feature (1)..(468): Homolog of NCBI NO: 15224204 NR Description: amine oxidase family [Arabidopsis thaliana]
  misc_feature (1)..(468): Homolog of NCBI NO: 18650598 NR Description: At2g43020/MFL8.12 [Arabidopsis thaliana]
  misc_feature (1)..(468): Homolog of NCBI NO: 21553762 NR Description: putative amine oxidase [Arabidopsis thaliana]
  misc_feature (1)..(468): Homolog of NCBI NO: 15231622 NR Description: amine oxidase family [Arabidopsis thaliana]
  misc_feature (1)..(468): Homolog of NCBI NO: 38344167 NR Description: OSJNBa0053K19.6 [Oryza sativa (japonica
  misc_feature (1)..(468): Homolog of NCBI NO: 15218830 NR Description: amine oxidase family [Arabidopsis thaliana] putative protein kinase gb|AAD22129 [Arabidopsis thaliana]
  misc_feature (1)..(468): Homolog of NCBI NO: 13877615 NR Description: putative protein kinase gb|AAD22129 [Arabidopsis
  misc_feature (1)..(370): Homolog of NCBI NO: 25404949 NR Description: protein F1E22.18 [imported] - Arabidopsis >gi|6686400|gb|AAF23834.1|AC007234_6 F1E22.18 [Arabidopsis
  misc_feature (335)..(468): Homolog of NCBI NO: 25404949 NR Description: protein F1E22.18 [imported] - Arabidopsis >gi|6686400|gb|AAF23834.1|AC007234_6 F1E22.18 [Arabidopsis
  misc_feature (5)..(434): Homolog of NCBI NO: 38505628 NR Description: slr5093 [Synechocystis sp. PCC 6803]

SEQ ID NO: 102053 - DNA, 1163 bp, Arabidopsis thaliana
  misc_feature (1)..(1163): Ceres Seq. ID no. 13609349
  misc_feature: MA Experiment ID: 108461 Result: Up-regulated in Transcription
  misc_feature: MA Experiment 108461 PARAMETER Experiment Name: At_Germinating_Seeds_cDNA_P Parameter: Age (day) Value: 1 vs. 0
  misc_feature: MA Experiment 108461 PARAMETER Experiment Name: At_Germinating_Seeds_cDNA_P Parameter: Tissue Value: Germinating Seeds
  misc_feature: MA Experiment ID: 108463 Result: Up-regulated in Transcription
  misc_feature: MA Experiment 108463 PARAMETER Experiment Name: At_Germinating_Seeds_cDNA_P Parameter: Age (day) Value: 3 vs. 0
  misc_feature: MA Experiment 108463 PARAMETER Experiment Name: At_Germinating_Seeds_cDNA_P Parameter: Tissue Value: Germinating Seeds
  misc_feature: MA Experiment ID: 108464 Result: Up-regulated in Transcription
  misc_feature: MA Experiment 108464 PARAMETER Experiment Name: At_Germinating_Seeds_cDNA_P Parameter: Age (day) Value: 4 vs. 0
  misc_feature: MA Experiment 108464 PARAMETER Experiment Name: At_Germinating_Seeds_cDNA_P Parameter: Tissue Value: Germinating Seeds
  misc_feature: MA Experiment ID: 108488 Result: Down-regulated in Transcription
  misc_feature: MA Experiment ID: 108607 Result: Up-regulated in Transcription
  misc_feature: MA Experiment 108607 PARAMETER Experiment Name: At_100uM_ABA_cDNA_P Parameter: Timepoint (hr) Value: 4
  misc_feature: MA Experiment 108607 PARAMETER Experiment Name: At_100uM_ABA_cDNA_P Parameter: Tissue Value: Aerial
  misc_feature: MA Experiment 108607 PARAMETER Experiment Name: At_100uM_ABA_cDNA_P Parameter: Treatment Value: 100uM ABA vs. No Treatment
  misc_feature: MA Experiment ID: 108668 Result: Up-regulated in Transcription
  misc_feature: MA Experiment 108668 PARAMETER Experiment Name: At_2mM_SA_cDNA_P Parameter: Plant Line Value: WS
  misc_feature: MA Experiment 108668 PARAMETER Experiment Name: At_2mM_SA_cDNA_P Parameter: Timepoint (hr) Value: 6
  misc_feature: MA Experiment 108668 PARAMETER Experiment Name: At_2mM_SA_cDNA_P Parameter: Treatment Value: 2mM SA vs. No Treatment
  misc_feature: MA Experiment ID: 20000089 Result: Down-regulated in Transcription
  misc_feature: MA Experiment ID: 20000182 Result: Up-regulated in Transcription
  misc_feature: MA Experiment 20000182 PARAMETER Experiment Name: At_2mM_SA_P Parameter: Age (day) Value: 14
  misc_feature: MA Experiment 20000182 PARAMETER Experiment Name: At_2mM_SA_P Parameter: Organism Value: A. thaliana
  misc_feature: MA Experiment 20000182 PARAMETER Experiment Name: At_2mM_SA_P Parameter: Plant Line Value: WS
  misc_feature: MA Experiment 20000182 PARAMETER Experiment Name: At_2mM_SA_P Parameter: Timepoint (hr) Value: 6
  misc_feature: MA Experiment 20000182 PARAMETER Experiment Name: At_2mM_SA_P Parameter: Tissue Value: Aerial
  misc_feature: MA Experiment 20000182 PARAMETER Experiment Name: At_2mM_SA_P Parameter: Treatment Value: 2mM SA vs. No Treatment
  misc_feature: MA Experiment ID: 20000437 Result: Up-regulated in Transcription
  misc_feature: MA Experiment 20000437 PARAMETER Experiment Name: At_Drought_P Parameter: Age (day) Value: 8
  misc_feature: MA Experiment 20000437 PARAMETER Experiment Name: At_Drought_P Parameter: Organism Value: A. thaliana
  misc_feature: MA Experiment 20000437 PARAMETER Experiment Name: At_Drought_P Parameter: Plant Line Value: WS
  misc_feature: MA Experiment 20000437 PARAMETER Experiment Name: At_Drought_P Parameter: Timepoint (hr) Value: 24
  misc_feature: MA Experiment 20000437 PARAMETER Experiment Name: At_Drought_P Parameter: Tissue Value: Whole Plant
  misc_feature: MA Experiment 20000437 PARAMETER Experiment Name: At_Drought_P Parameter: Treatment Value: Drought vs. No Drought
  misc_feature: MA Experiment ID: 20001248 Result: Down-regulated in Transcription
  misc_feature: MA Experiment 20001248 PARAMETER Experiment Name: At_Far-red-induction_P Parameter: Age (day) Value: 7
  misc_feature: MA Experiment 20001248 PARAMETER Experiment Name: At_Far-red-induction_P Parameter: Light Value: Far-red vs. White
  misc_feature: MA Experiment 20001248 PARAMETER Experiment Name: At_Far-red-induction_P Parameter: Organism Value: A. thaliana
  misc_feature: MA Experiment 20001248 PARAMETER Experiment Name: At_Far-red-induction_P Parameter: Plant Line Value: Columbia
  misc_feature: MA Experiment 20001248 PARAMETER Experiment Name: At_Far-red-induction_P Parameter: Timepoint (hr) Value: 4
  misc_feature: MA Experiment 20001248 PARAMETER Experiment Name: At_Far-red-induction_P Parameter: Tissue Value: Whole Plant
  misc_feature: MA Experiment ID: 20001905 Result: Up-regulated in Transcription
  misc_feature: MA Experiment 20001905 PARAMETER Experiment Name: At_Drought_Reproduction_P Parameter: Age (day) Value: 40
  misc_feature: MA Experiment 20001905 PARAMETER Experiment Name: At_Drought_Reproduction_P Parameter: Organism Value: A. thaliana
  misc_feature: MA Experiment 20001905 PARAMETER Experiment Name: At_Drought_Reproduction_P Parameter: Plant Line Value: WS
  misc_feature: MA Experiment 20001905 PARAMETER Experiment Name: At_Drought_Reproduction_P Parameter: Timepoint (day) Value: 10
  misc_feature: MA Experiment 20001905 PARAMETER Experiment Name: At_Drought_Reproduction_P Parameter: Tissue Value: Rosettes
  misc_feature: MA Experiment 20001905 PARAMETER Experiment Name: At_Drought_Reproduction_P Parameter: Treatment Value: Drought vs. No Drought
ttttgtcctcttaacaaaatattcttcaaactctctctgttgtttgtttgttgacaaatctctcaaaaccatttgttttgcaatcgcagatccgtttttcttcgggtctcatcacaatgaatggcttctctgatcttaatccttctgagagcaaaccttctctgtcacaactagctccattagaagccattctgtttgatgttgatggaacactctgtgactcagatcccatccaccttattgccttccaagaactgcttcaagagattggttttaacaatggtgtcccaatcgatgagaaattctttgttgagaacattgctggaaaacacaattctgaaattgctctacttctgttccctgatgatgtttcaagagggttaaaattctgtgatgaaaaggaagctctttaccgcaaaattgttgcagagaagataaagccacttgatgggcttataaaactgaccaaatggatcgaagatcgtggattgaaacgagctgcggtaacaaacgctccaaaagaaaacgcagagctcatgatatcgaaacttggtctgactgatttctttcaagcagtgattcttggctctgaatgtgaatttcccaaaccacaccctggaccttacttgaaggctcttgaagtgcttaacgtgtcaaaggagcacacgctagttttcgaagactcgatctctgggataaaagctggagttgcagctggaatgccagtgattggactgactacagggaatccagcaagcctgcttatgcaagcaaaacccgcttttctcatcgagaactatgcggatccaaaactgtgggctgtgttggaagaacttgataacaagtcttaagtctcacttgtttggcttatggaaacccacacatgcatgagcagcctctgaagtttaccttatgtcttagatgatcattgttgaataattcattgggagtttatgacaatgggagctttcaaatatctgattattttgtattgatacatgcacaatgctagatttgtatccaggagatagttgcataaaccaatatactataccctcggatcttagcttattttcattgatatcttgttgttttgtgctgtaaacatatcagcttttgaatacatttggtccatggcgcaaaataagacttttttttttttt

SEQ ID NO: 102054 - protein, 244 aa, Arabidopsis thaliana; identical to SEQ ID NO: 25320
  peptide (1)..(244): Ceres Seq. ID no. 13609350
  misc_feature (22)..(210): Pfam Name: haloacid dehalogenase-like hydrolase Pfam Description: haloacid dehalogenase-like hydrolase
  misc_feature (1)..(244): Homolog of NCBI NO: 18404847 NR Description: haloacid dehalogenase-like hydrolase family thaliana] >gi|15912257|gb|AAL08262.1| At2g38740/T6A23.6 thaliana] >gi|19547993|gb|AAL87360.1| At2g38740/T6A23.6
  misc_feature (39)..(244): Homolog of NCBI NO: 25408616 NR Description: hypothetical protein At2g38740 [imported] -
  misc_feature (12)..(241): Homolog of NCBI NO: 37536998 NR Description: putative beta-phosphoglucomutase [Oryza sativa
  misc_feature (15)..(240): Homolog of NCBI NO: 34897820 NR Description: P0514G12.30 [Oryza sativa (japonica
  misc_feature (85)..(241): Homolog of NCBI NO: 37700485 NR Description: putative beta-phosphoglucomutase [Oryza sativa]
  misc_feature (22)..(240): Homolog of NCBI NO: 23127812 NR Description: hypothetical protein [Nostoc punctiforme]
  misc_feature (22)..(240): Homolog of NCBI NO: 17228223 NR Description: hypothetical protein [Nostoc sp. PCC 7120]
  misc_feature (22)..(237): Homolog of NCBI NO: 37521914 NR Description: hypothetical protein glr2345 [Gloeobacter
  misc_feature (22)..(233): Homolog of NCBI NO: 23042473 NR Description: hypothetical protein [Trichodesmium erythraeum
  misc_feature (24)..(237): Homolog of NCBI NO: 27377543 NR Description: blr2432 [Bradyrhizobium japonicum]

SEQ ID NO: 102055 - DNA, 1383 bp, Arabidopsis thaliana
  misc_feature (1)..(1383): Ceres Seq. ID no. 13609351
  misc_feature: MA Experiment ID: 108434 Result: Down-regulated in Transcription
  misc_feature: MA Experiment 108434 PARAMETER Experiment Name: At_Root_Tips_cDNA_P Parameter: Tissue Value: Root Tips
  misc_feature: MA Experiment ID: 108435 Result: Up-regulated in Transcription
  misc_feature: MA Experiment 108435 PARAMETER Experiment Name: At_stm_Mutants_cDNA_P Parameter: Plant Line Value: wt Landsburg vs stm
  misc_feature: MA Experiment 108435 PARAMETER Experiment Name: At_stm_Mutants_cDNA_P Parameter: Tissue Value: Shoot Apical Meristem Region
  misc_feature: MA Experiment ID: 108469 Result: Up-regulated in Transcription
  misc_feature: MA Experiment ID: 108501 Result: Down-regulated in Transcription
  misc_feature: MA Experiment 108501 PARAMETER Experiment Name: At_ap2_floral_buds_cDNA_P Parameter: Plant Line Value: ap2 (Ler.)
  misc_feature: MA Experiment 108501 PARAMETER Experiment Name: At_ap2_floral_buds_cDNA_P Parameter: Tissue Value: Closed Flower
  misc_feature: MA Experiment ID: 108576 Result: Down-regulated in Transcription
  misc_feature: MA Experiment 108576 PARAMETER Experiment Name: At_42deg_Heat_cDNA_P Parameter: Temperature (deg C) Value: 42 vs. 22
  misc_feature: MA Experiment 108576 PARAMETER Experiment Name: At_42deg_Heat_cDNA_P Parameter: Timepoint (hr) Value: 1
  misc_feature: MA Experiment 108576 PARAMETER Experiment Name: At_42deg_Heat_cDNA_P Parameter: Tissue Value: Aerial
  misc_feature: MA Experiment ID: 108668 Result: Up-regulated in Transcription
  misc_feature: MA Experiment 108668 PARAMETER Experiment Name: At_2mM_SA_cDNA_P Parameter: Plant Line Value: WS
  misc_feature: MA Experiment 108668 PARAMETER Experiment Name: At_2mM_SA_cDNA_P Parameter: Timepoint (hr) Value: 6
  misc_feature: MA Experiment 108668 PARAMETER Experiment Name: At_2mM_SA_cDNA_P Parameter: Treatment Value: 2mM SA vs. No Treatment
  misc_feature: MA Experiment ID: 20000087 Result: Down-regulated in Transcription
  misc_feature: MA Experiment 20000087 PARAMETER Experiment Name: At_100uM_ABA_Mutants_cDNA_P Parameter: Plant Line Value: WS
  misc_feature: MA Experiment 20000087 PARAMETER Experiment Name: At_100uM_ABA_Mutants_cDNA_P Parameter: Timepoint (hr) Value: 6
  misc_feature: MA Experiment 20000087 PARAMETER Experiment Name: At_100uM_ABA_Mutants_cDNA_P Parameter: Tissue Value: Aerial
  misc_feature: MA Experiment 20000087 PARAMETER Experiment Name: At_100uM_ABA_Mutants_cDNA_P Parameter: Treatment Value: 100uM ABA vs. No Treatment
  misc_feature: MA Experiment ID: 20000090 Result: Up-regulated in Transcription
  misc_feature: MA Experiment ID: 20000112 Result: Down-regulated in Transcription
  misc_feature: MA Experiment 20000112 PARAMETER Experiment Name: At_42deg_Heat_cDNA_P Parameter: Temperature (deg C) Value: 42 vs. 22
  misc_feature: MA Experiment 20000112 PARAMETER Experiment Name: At_42deg_Heat_cDNA_P Parameter: Timepoint (hr) Value: 2
  misc_feature: MA Experiment 20000112 PARAMETER Experiment Name: At_42deg_Heat_cDNA_P Parameter: Tissue Value: Aerial
  misc_feature: MA Experiment ID: 20000113 Result: Down-regulated in Transcription
  misc_feature: MA Experiment 20000113 PARAMETER Experiment Name: At_42deg_Heat_cDNA_P Parameter: Temperature (deg C) Value: 42 vs. 22
  misc_feature: MA Experiment 20000113 PARAMETER Experiment Name: At_42deg_Heat_cDNA_P Parameter: Timepoint (hr) Value: 8
  misc_feature: MA Experiment 20000113 PARAMETER Experiment Name: At_42deg_Heat_cDNA_P Parameter: Tissue Value: Aerial
  misc_feature: MA Experiment ID: 20000328 Result: Down-regulated in Transcription
  misc_feature: MA Experiment 20000328 PARAMETER Experiment Name: At_42deg_Heat_Sub_P Parameter: Age (day) Value: 14
  misc_feature: MA Experiment 20000328 PARAMETER Experiment Name: At_42deg_Heat_Sub_P Parameter: Organism Value: A. thaliana
  misc_feature: MA Experiment 20000328 PARAMETER Experiment Name: At_42deg_Heat_Sub_P Parameter: Plant Line Value: WS
  misc_feature: MA Experiment 20000328 PARAMETER Experiment Name: At_42deg_Heat_Sub_P Parameter: Temperature (deg C) Value: 42 vs. 22
  misc_feature: MA Experiment 20000328 PARAMETER Experiment Name: At_42deg_Heat_Sub_P Parameter: Timepoint (hr) Value: 6
  misc_feature: MA Experiment 20000328 PARAMETER Experiment Name: At_42deg_Heat_Sub_P Parameter: Tissue Value: Aerial
  misc_feature: MA Experiment ID: 20000347 Result: Up-regulated in Transcription
  misc_feature: MA Experiment 20000347 PARAMETER Experiment Name: At_2mM_SA_Sub_P Parameter: Age (day) Value: 14
  misc_feature: MA Experiment 20000347 PARAMETER Experiment Name: At_2mM_SA_Sub_P Parameter: Organism Value: A. thaliana
  misc_feature: MA Experiment 20000347 PARAMETER Experiment Name: At_2mM_SA_Sub_P Parameter: Plant Line Value: WS
  misc_feature: MA Experiment 20000347 PARAMETER Experiment Name: At_2mM_SA_Sub_P Parameter: Timepoint (hr) Value: 6
  misc_feature: MA Experiment 20000347 PARAMETER Experiment Name: At_2mM_SA_Sub_P Parameter: Tissue Value: Aerial
  misc_feature: MA Experiment 20000347 PARAMETER Experiment Name: At_2mM_SA_Sub_P Parameter: Treatment Value: 2mM SA vs. No Treatment
  misc_feature: MA Experiment ID: 20000355 Result: Down-regulated in Transcription
  misc_feature: MA Experiment 20000355 PARAMETER Experiment Name: At_Siliques_Sub_P Parameter: Age (day) Value: 21
  misc_feature: MA Experiment 20000355 PARAMETER Experiment Name: At_Siliques_Sub_P Parameter: Organism Value: A. thaliana
  misc_feature: MA Experiment 20000355 PARAMETER Experiment Name: At_Siliques_Sub_P Parameter: Plant Line Value: WS
  misc_feature: MA Experiment 20000355 PARAMETER Experiment Name: At_Siliques_Sub_P Parameter: Tissue Value: Less Than 5mm Siliques vs. Whole Plant
  misc_feature: MA Experiment ID: 20000440 Result: Down-regulated in Transcription
  misc_feature: MA Experiment 20000440 PARAMETER Experiment Name: At_Closed-Flower__Sub_P Parameter: Tissue Value: Closed Flower vs. Whole Plant
attcaatgcacacaaacatttacccaaaatggcatcggcggttcagaaatcagcgttgctcttatgtggagactacatggaagcctatgaaacgattgttcctctctatgttctccaatcgtttggggttagcgttcattgcgtttcacccaaccgcaacgccggcgatcgctgcgttatgtctgcccacgatttcttgggcctcgagttgactttaaacgcaaacttcgatgacgtcactccggagaattacgacgtcatcatcatcccaggaggccgattcacggagcttctcagcgccgacgagaaatgcgttgacctcgtggcgcgattcgccgaatccaagaagctgatcttcactagctgtcatagccaggttatgctgatggcggccggaatcctcgccggtggtgtgaaatgcacggcgtttgaaagcataaagcctttgatcgaactctccggcggtgagtggtggcaacagcctgggattcagagcatgttcgagatcaccgattgcgttaaagacgggaatttcatgagtacggttggttggccaacgcttggtcacggcattaagcttttgcttgaatctcttggtggcaaagtctgtagcttggagaagaagcaagcttctgtgcttttcctcattggggactatgtagaagattatgggatcaatgtaccgtttagagcactacaagctttaggttgtaaagtggatgctgtgacaccgaacaagaagaagggagaagtgtgtgcaacggcggtttatgaccttgaggatggacggcagattcctgcagagaagcgtggacataacttctttgtgactgcatcgtgggatgatatatgtgtggatgattatgactgtgtagtggttccaggagggagatcacctgagctattggtgatgaatgaaaaggctgttgctttggttaagagttttgcagagaaagataaggtgtttgcagctattggacaggggaaattgcttcttgcagccactggtgttcttaaggggaagcgatgcgcgagtgggaaagggatgaaggtgatggtgaaggtggctggaggtgaggctgtgatggaaaagggatgtgtaactgatgggaaggttgtgacggcagcatcagccacggatctgcctgcctttttgtttgatttatcaactgctcttggtctaactgtcatgttctaagattttgcaactaaaaaacataaaagatagtttgagtaataaaatcatatcttcaatttgctcaattgaagtgaaaagaaaaacaaaagagctcgattgtagtgtctctgctttcatgagttcatggcactcctaacaaactatattgtagctgcttcttggaaataaaagcatgtagtttggtg

SEQ ID NO: 102056 - protein, 398 aa, Arabidopsis thaliana; identical to SEQ ID NO: 40376
  peptide (1)..(398): Ceres Seq. ID no. 13609352
  misc_feature (10)..(398): Homolog of NCBI NO: 18404881 NR Description: (YLS5) proteaseI (pfpI)-like protein, complete [Arabidopsis thaliana] >gi|20197441|gb|AAC79625.2| expressed [Arabidopsis thaliana] >gi|21536875|gb|AAM61207.1| unknown
  misc_feature (10)..(398): Homolog of NCBI NO: 30687679 NR Description: (YLS5) proteaseI (pfpI)-like protein, complete [Arabidopsis thaliana] >gi|25408625|pir||C84810 hypothetical
  misc_feature (10)..(398): Homolog of NCBI NO: 15232554 NR Description: expressed protein [Arabidopsis thaliana]
  misc_feature (13)..(398): Homolog of NCBI NO: 15232958 NR Description: protease-related [Arabidopsis thaliana] unknown protein [Arabidopsis thaliana]
  misc_feature (67)..(398): Homolog of NCBI NO: 21954064 NR Description: unknown protein [Arabidopsis thaliana]
  misc_feature (212)..(393): Homolog of NCBI NO: 15890541 NR Description: AGR_L_853p [Agrobacterium tumefaciens] conserved hypothetical protein [Agrobacterium tumefaciens str. (U. Washington)] >gi|25322933|pir||D98184 hypothetical protein
  misc_feature (212)..(392): Homolog of NCBI NO: 23040436 NR Description: hypothetical protein [Trichodesmium erythraeum
  misc_feature (212)..(396): Homolog of NCBI NO: 33591328 NR Description: conserved hypothetical protein [Bordetella >gi|33570970|emb|CAE40443.1| conserved hypothetical protein
  misc_feature (212)..(397): Homolog of NCBI NO: 22978710 NR Description: hypothetical protein [Ralstonia metallidurans]
  misc_feature (212)..(396): Homolog of NCBI NO: 33595226 NR Description: conserved hypothetical protein [Bordetella >gi|33565303|emb|CAE36103.1| conserved hypothetical protein

SEQ ID NO: 102057 - protein, 389 aa, Arabidopsis thaliana; identical to SEQ ID NO: 40377
  peptide (1)..(389): Ceres Seq. ID no. 13609353
  misc_feature (1)..(389): Homolog of NCBI NO: 18404881 NR Description: (YLS5) proteaseI (pfpI)-like protein, complete [Arabidopsis thaliana] >gi|20197441|gb|AAC79625.2| expressed [Arabidopsis thaliana] >gi|21536875|gb|AAM61207.1| unknown
  misc_feature (1)..(389): Homolog of NCBI NO: 30687679 NR Description: (YLS5) proteaseI (pfpI)-like protein, complete [Arabidopsis thaliana] >gi|25408625|pir||C84810 hypothetical
  misc_feature (1)..(389): Homolog of NCBI NO: 15232554 NR Description: expressed protein [Arabidopsis thaliana]
  misc_feature (4)..(389): Homolog of NCBI NO: 15232958 NR Description: protease-related [Arabidopsis thaliana] unknown protein [Arabidopsis thaliana]
  misc_feature (58)..(389): Homolog of NCBI NO: 21954064 NR Description: unknown protein [Arabidopsis thaliana]
  misc_feature (203)..(384): Homolog of NCBI NO: 15890541 NR Description: AGR_L_853p [Agrobacterium tumefaciens] conserved hypothetical protein [Agrobacterium tumefaciens str. (U. Washington)] >gi|25322933|pir||D98184 hypothetical protein
  misc_feature (203)..(383): Homolog of NCBI NO: 23040436 NR Description: hypothetical protein [Trichodesmium erythraeum
  misc_feature (203)..(387): Homolog of NCBI NO: 33591328 NR Description: conserved hypothetical protein [Bordetella >gi|33570970|emb|CAE40443.1| conserved hypothetical protein
  misc_feature (203)..(388): Homolog of NCBI NO: 22978710 NR Description: hypothetical protein [Ralstonia metallidurans]
  misc_feature (203)..(387): Homolog of NCBI NO: 33595226 NR Description: conserved hypothetical protein [Bordetella >gi|33565303|emb|CAE36103.1| conserved hypothetical protein

SEQ ID NO: 102058 - protein, 373 aa, Arabidopsis thaliana; identical to SEQ ID NO: 40378
  peptide (1)..(373): Ceres Seq. ID no. 13609354
  misc_feature (1)..(373): Homolog of NCBI NO: 18404881 NR Description: (YLS5) proteaseI (pfpI)-like protein, complete [Arabidopsis thaliana] >gi|20197441|gb|AAC79625.2| expressed [Arabidopsis thaliana] >gi|21536875|gb|AAM61207.1| unknown
  misc_feature (1)..(373): Homolog of NCBI NO: 30687679 NR Description: (YLS5) proteaseI (pfpI)-like protein, complete [Arabidopsis thaliana] >gi|25408625|pir||C84810 hypothetical
  misc_feature (1)..(373): Homolog of NCBI NO: 15232554 NR Description: expressed protein [Arabidopsis thaliana]
  misc_feature (1)..(373): Homolog of NCBI NO: 15232958 NR Description: protease-related [Arabidopsis thaliana] unknown protein [Arabidopsis thaliana]
  misc_feature (42)..(373): Homolog of NCBI NO: 21954064 NR Description: unknown protein [Arabidopsis thaliana]
  misc_feature (187)..(368): Homolog of NCBI NO: 15890541 NR Description: AGR_L_853p [Agrobacterium tumefaciens] conserved hypothetical protein [Agrobacterium tumefaciens str. (U. Washington)] >gi|25322933|pir||D98184 hypothetical protein
  misc_feature (187)..(367): Homolog of NCBI NO: 23040436 NR Description: hypothetical protein [Trichodesmium erythraeum
  misc_feature (187)..(371): Homolog of NCBI NO: 33591328 NR Description: conserved hypothetical protein [Bordetella >gi|33570970|emb|CAE40443.1| conserved hypothetical protein
  misc_feature (187)..(372): Homolog of NCBI NO: 22978710 NR Description: hypothetical protein [Ralstonia metallidurans]
  misc_feature (187)..(371): Homolog of NCBI NO: 33595226 NR Description: conserved hypothetical protein [Bordetella >gi|33565303|emb|CAE36103.1| conserved hypothetical protein

SEQ ID NO: 102059 - DNA, 1217 bp, Arabidopsis thaliana
  misc_feature (1)..(1217): Ceres Seq. ID no. 13609355
  misc_feature: MA Experiment ID: 108434 Result: Down-regulated in Transcription
  misc_feature: MA Experiment 108434 PARAMETER Experiment Name: At_Root_Tips_cDNA_P Parameter: Tissue Value: Root Tips
  misc_feature: MA Experiment ID: 108461 Result: Up-regulated in Transcription
  misc_feature: MA Experiment 108461 PARAMETER Experiment Name: At_Germinating_Seeds_cDNA_P Parameter: Age (day) Value: 1 vs. 0
  misc_feature: MA Experiment 108461 PARAMETER Experiment Name: At_Germinating_Seeds_cDNA_P Parameter: Tissue Value: Germinating Seeds
  misc_feature: MA Experiment ID: 108561 Result: Up-regulated in Transcription
  misc_feature: MA Experiment 108561 PARAMETER Experiment Name: At_100uM_ABA_cDNA_P Parameter: Timepoint (hr) Value: 6
  misc_feature: MA Experiment 108561 PARAMETER Experiment Name: At_100uM_ABA_cDNA_P Parameter: Tissue Value: Aerial
  misc_feature: MA Experiment 108561 PARAMETER Experiment Name: At_100uM_ABA_cDNA_P Parameter: Treatment Value: 100uM ABA vs. No Treatment
  misc_feature: MA Experiment ID: 108574 Result: Up-regulated in Transcription
  misc_feature: MA Experiment 108574 PARAMETER Experiment Name: At_Wounding__cDNA_P Parameter: Timepoint (hr) Value: 1
  misc_feature: MA Experiment 108574 PARAMETER Experiment Name: At_Wounding__cDNA_P Parameter: Tissue Value: Aerial
  misc_feature: MA Experiment 108574 PARAMETER Experiment Name: At_Wounding__cDNA_P Parameter: Treatment Value: Wounding vs. No Wounding
  misc_feature: MA Experiment ID: 108605 Result: Up-regulated in Transcription
  misc_feature: MA Experiment 108605 PARAMETER Experiment Name: At_100uM_ABA_cDNA_P Parameter: Timepoint (hr) Value: 6
  misc_feature: MA Experiment 108605 PARAMETER Experiment Name: At_100uM_ABA_cDNA_P Parameter: Tissue Value: Aerial
  misc_feature: MA Experiment 108605 PARAMETER Experiment Name: At_100uM_ABA_cDNA_P Parameter: Treatment Value: 100uM ABA vs. No Treatment
  misc_feature: MA Experiment ID: 108607 Result: Up-regulated in Transcription
  misc_feature: MA Experiment 108607 PARAMETER Experiment Name: At_100uM_ABA_cDNA_P Parameter: Timepoint (hr) Value: 4
  misc_feature: MA Experiment 108607 PARAMETER Experiment Name: At_100uM_ABA_cDNA_P Parameter: Tissue Value: Aerial
  misc_feature: MA Experiment 108607 PARAMETER Experiment Name: At_100uM_ABA_cDNA_P Parameter: Treatment Value: 100uM ABA vs. No Treatment
  misc_feature: MA Experiment ID: 20000069 Result: Up-regulated in Transcription
  misc_feature: MA Experiment 20000069 PARAMETER Experiment Name: At_100uM_ABA_Mutants_cDNA_P Parameter: Plant Line Value: CS23
  misc_feature: MA Experiment 20000069 PARAMETER Experiment Name: At_100uM_ABA_Mutants_cDNA_P Parameter: Timepoint (hr) Value: 6
  misc_feature: MA Experiment 20000069 PARAMETER Experiment Name: At_100uM_ABA_Mutants_cDNA_P Parameter: Tissue Value: Aerial
  misc_feature: MA Experiment 20000069 PARAMETER Experiment Name: At_100uM_ABA_Mutants_cDNA_P Parameter: Treatment Value: 100uM ABA vs. No Treatment
  misc_feature: MA Experiment ID: 20000071 Result: Up-regulated in Transcription
  misc_feature: MA Experiment 20000071 PARAMETER Experiment Name: At_100uM_ABA_Mutants_cDNA_P Parameter: Plant Line Value: CS8104
  misc_feature: MA Experiment 20000071 PARAMETER Experiment Name: At_100uM_ABA_Mutants_cDNA_P Parameter: Timepoint (hr) Value: 6
  misc_feature: MA Experiment 20000071 PARAMETER Experiment Name: At_100uM_ABA_Mutants_cDNA_P Parameter: Tissue Value: Aerial
  misc_feature: MA Experiment 20000071 PARAMETER Experiment Name: At_100uM_ABA_Mutants_cDNA_P Parameter: Treatment Value: 100uM ABA vs. No Treatment
  misc_feature: MA Experiment ID: 20000072 Result: Up-regulated in Transcription
  misc_feature: MA Experiment 20000072 PARAMETER Experiment Name: At_100uM_ABA_Mutants_cDNA_P Parameter: Plant Line Value: CS8105
  misc_feature: MA Experiment 20000072 PARAMETER Experiment Name: At_100uM_ABA_Mutants_cDNA_P Parameter: Timepoint (hr) Value: 6
  misc_feature: MA Experiment 20000072 PARAMETER Experiment Name: At_100uM_ABA_Mutants_cDNA_P Parameter: Tissue Value: Aerial
  misc_feature: MA Experiment 20000072 PARAMETER Experiment Name: At_100uM_ABA_Mutants_cDNA_P Parameter: Treatment Value: 100uM ABA vs. No Treatment
  misc_feature: MA Experiment ID: 20000117 Result: Up-regulated in Transcription
  misc_feature: MA Experiment 20000117 PARAMETER Experiment Name: At_100uM_ABA_Mutants_cDNA_P Parameter: Plant Line Value: Columbia
  misc_feature: MA Experiment 20000117 PARAMETER Experiment Name: At_100uM_ABA_Mutants_cDNA_P Parameter: Timepoint (hr) Value: 6
  misc_feature: MA Experiment 20000117 PARAMETER Experiment Name: At_100uM_ABA_Mutants_cDNA_P Parameter: Tissue Value: Aerial
  misc_feature: MA Experiment 20000117 PARAMETER Experiment Name: At_100uM_ABA_Mutants_cDNA_P Parameter: Treatment Value: 100uM ABA vs. No Treatment
  misc_feature: MA Experiment ID: 20000180 Result: Up-regulated in Transcription
  misc_feature: MA Experiment 20000180 PARAMETER Experiment Name: At_Germinating_Seeds_P Parameter: Age (hr) Value: 24 vs. 0
  misc_feature: MA Experiment 20000180 PARAMETER Experiment Name: At_Germinating_Seeds_P Parameter: Tissue Value: Germinating Seeds
  misc_feature: MA Experiment ID: 20000185 Result: Up-regulated in Transcription
  misc_feature: MA Experiment 20000185 PARAMETER Experiment Name: At_Roots__P Parameter: Age (day) Value: 7 vs. 21
  misc_feature: MA Experiment 20000185 PARAMETER Experiment Name: At_Roots__P Parameter: Organism Value: A. thaliana
  misc_feature: MA Experiment 20000185 PARAMETER Experiment Name: At_Roots__P Parameter: Tissue Value: Roots vs. Whole Plant
  misc_feature: MA Experiment ID: 20000211 Result: Up-regulated in Transcription
  misc_feature: MA Experiment 20000211 PARAMETER Experiment Name: At_0.001percent_MeJA__P Parameter: Age (day) Value: 14
  misc_feature: MA Experiment 20000211 PARAMETER Experiment Name: At_0.001percent_MeJA__P Parameter: Organism Value: A. thaliana
  misc_feature: MA Experiment 20000211 PARAMETER Experiment Name: At_0.001percent_MeJA__P Parameter: Plant Line Value: WS
  misc_feature: MA Experiment 20000211 PARAMETER Experiment Name: At_0.001percent_MeJA__P Parameter: Timepoint (hr) Value: 1
  misc_feature: MA Experiment 20000211 PARAMETER Experiment Name: At_0.001percent_MeJA__P Parameter: Tissue Value: Aerial
  misc_feature: MA Experiment 20000211 PARAMETER Experiment Name: At_0.001percent_MeJA__P Parameter: Treatment Value: 0.001percent MeJA vs. No Treatment
  misc_feature: MA Experiment ID: 20000439 Result: Up-regulated in Transcription
  misc_feature: MA Experiment 20000439 PARAMETER Experiment Name: At_Roots__P Parameter: Age (day) Value: 14 vs. 21
  misc_feature: MA Experiment 20000439 PARAMETER Experiment Name: At_Roots__P Parameter: Organism Value: A. thaliana
  misc_feature: MA Experiment 20000439 PARAMETER Experiment Name: At_Roots__P Parameter: Tissue Value: Roots vs. Whole Plant
  misc_feature: MA Experiment ID: 20000495 Result: Down-regulated in Transcription
  misc_feature: MA Experiment 20000495 PARAMETER Experiment Name: At_Guard_Cells_P Parameter: Harvest Date Value: 8/2/2002
  misc_feature: MA Experiment 20000495 PARAMETER Experiment Name: At_Guard_Cells_P Parameter: Organism Value: A. thaliana
  misc_feature: MA Experiment 20000495 PARAMETER Experiment Name: At_Guard_Cells_P Parameter: Tissue Value: Guard Cells vs. Leaves
  misc_feature: MA Experiment ID: 20000527 Result: Down-regulated in Transcription
  misc_feature: MA Experiment 20000527 PARAMETER Experiment Name: At_10percent_PEG_P Parameter: Age (day) Value: 20
  misc_feature: MA Experiment 20000527 PARAMETER Experiment Name: At_10percent_PEG_P Parameter: Organism Value: A. thaliana
  misc_feature: MA Experiment 20000527 PARAMETER Experiment Name: At_10percent_PEG_P Parameter: Plant Line Value: WS
  misc_feature: MA Experiment 20000527 PARAMETER Experiment Name: At_10percent_PEG_P Parameter: Timepoint (day) Value: 20
  misc_feature: MA Experiment 20000527 PARAMETER Experiment Name: At_10percent_PEG_P Parameter: Tissue Value: Whole Plant
  misc_feature: MA Experiment 20000527 PARAMETER Experiment Name: At_10percent_PEG_P Parameter: Treatment Value: 10percent PEG vs. No Treatment
  misc_feature: MA Experiment ID: 20001248 Result: Down-regulated in Transcription
  misc_feature: MA Experiment 20001248 PARAMETER Experiment Name: At_Far-red-induction_P Parameter: Age (day) Value: 7
  misc_feature: MA Experiment 20001248 PARAMETER Experiment Name: At_Far-red-induction_P Parameter: Light Value: Far-red vs. White
  misc_feature: MA Experiment 20001248 PARAMETER Experiment Name: At_Far-red-induction_P Parameter: Organism Value: A. thaliana
  misc_feature: MA Experiment 20001248 PARAMETER Experiment Name: At_Far-red-induction_P Parameter: Plant Line Value: Columbia
  misc_feature: MA Experiment 20001248 PARAMETER Experiment Name: At_Far-red-induction_P Parameter: Timepoint (hr) Value: 4
  misc_feature: MA Experiment 20001248 PARAMETER Experiment Name: At_Far-red-induction_P Parameter: Tissue Value: Whole Plant
aaaacggctctaaattgaaaacaaaagaagagagagagagagagagacgaagaaacagagagattctctcgaaaatggccaccattagagtaccaaacgaagttccttctccagctcaggattctgaaactctcaaacaagctattcgcggatggggaacagatgagaaggcgattatacgagttttagggcaaagagaccagagccagagaaggaagattagagaaagttttagagagatttatggcaaagatcttatcgatgttctatcctccgaactgtctggtgatttcatgaaagctgtggtttcgtggacgtatgatccagcagagagagacgcaaggcttgtgaacaagattttgaacaaggagaagaagaagaaaagcttagagaatttgaaggttatagtagagatctcttgcacgacttccccaaaccatttgattgctgtgaggaaagcttattgttcactctttgactcttctcttgaagaacacattgcttcttctctgccttttcctcttgcaaagttactggtgacattggcaagtacattcagatatgacaaagataggactgatgcagaagtagctactattgaggcggctatgctacgtgaagccatagagaagaaacaattagatcatgaccatgtcctgtacatattaggaacgcgtagtatctatcagctcagagaaacttttgttgcttacaagaagaattatggggtcacaattgataaggatgttgatggatgtccaggagatgctgatctgagaagtctattgaaggtggcaatcttttgtattgatactcctgagaaacactttgcaaaggtggtaagagattcgattgagggttttggaacagatgaggattcgttgacgagggcgattgtgacgcgtgcagagatcgatttgatgaaagtaagaggagagtatttcaacatgtataatacaagcatggacaatgctattactggtgatatttctggagactacaaggacttcattatcaccttacttggatccaaaatctgatcgttctttcgtttctttgtcagttgttatattcttggctttgcttgtgacttgtataatcaatcaatacattgtattccaactccagtttgaattgtttaaaaaataatcaaatttctcttgattcttgcatttttgaatcaaagcaaatctatgtttaattttgttttcaaaatt

SEQ ID NO: 102060 - protein, 345 aa, Arabidopsis thaliana
  peptide (1)..(345): Ceres Seq. ID no. 13609356
  misc_feature (109)..(181): Pfam Name: Annexin Pfam Description: Annexin
  misc_feature (25)..(345): Homolog of NCBI NO: 15224947 NR Description: annexin -related [Arabidopsis thaliana]
  misc_feature (25)..(345): Homolog of NCBI NO: 6503082 NR Description: AnnAt3 [Arabidopsis thaliana]
  misc_feature (25)..(342): Homolog of NCBI NO: 22326753 NR Description: annexin-related protein [Arabidopsis thaliana]
  misc_feature (25)..(344): Homolog of NCBI NO: 21264397 NR Description: Annexin-like protein RJ4
  misc_feature (25)..(344): Homolog of NCBI NO: 6272285 NR Description: annexin p33 [Zea mays]
  misc_feature (25)..(344): Homolog of NCBI NO: 7441506 NR Description: annexin P33 - maize
  misc_feature (25)..(342): Homolog of NCBI NO: 4580920 NR Description: vacuole-associated annexin VCaB42 [Nicotiana
  misc_feature (25)..(342): Homolog of NCBI NO: 3928134 NR Description: annexin P38 [Capsicum annuum]
  misc_feature (25)..(344): Homolog of NCBI NO: 7441507 NR Description: annexin P35 - maize >gi|1370603|emb|CAA66901.1|
  misc_feature (25)..(342): Homolog of NCBI NO: 15238320 NR Description: annexin [Arabidopsis thaliana] annexin [Arabidopsis thaliana] >gi|8843766|dbj|BAA97314.1| [Arabidopsis thaliana] >gi|17979341|gb|AAL49896.1| putative
NGSKLKTKEERERERRRNREILSKMATIRVPNEVPSPAQDSETLKQAIRGWGTDEKAIIRVLGQRDQSQRRKIRESFREIYGKDLIDVLSSELSGDFMKAVVSWTYDPAERDARLVNKILNKEKKKKSLENLKVIVEISCTTSPNHLIAVRKAYCSLFDSSLEEHIASSLPFPLAKLLVTLASTFRYDKDRTDAEVATIEAAMLREAIEKKQLDHDHVLYILGTRSIYQLRETFVAYKKNYGVTIDKDVDGCPGDADLRSLLKVAIFCIDTPEKHFAKVVRDSIEGFGTDEDSLTRAIVTRAEIDLMKVRGEYFNMYNTSMDNAITGDISGDYKDFIITLLGSKI

SEQ ID NO: 102061 - protein, 321 aa, Arabidopsis thaliana; identical to SEQ ID NO: 26654
  peptide (1)..(321): Ceres Seq. ID no. 13609357
  misc_feature (85)..(157): Pfam Name: Annexin Pfam Description: Annexin
  misc_feature (1)..(321): Homolog of NCBI NO: 15224947 NR Description: annexin -related [Arabidopsis thaliana]
  misc_feature (1)..(321): Homolog of NCBI NO: 6503082 NR Description: AnnAt3 [Arabidopsis thaliana]
  misc_feature (1)..(318): Homolog of NCBI NO: 22326753 NR Description: annexin-related protein [Arabidopsis thaliana]
  misc_feature (1)..(320): Homolog of NCBI NO: 21264397 NR Description: Annexin-like protein RJ4
  misc_feature (1)..(320): Homolog of NCBI NO: 6272285 NR Description: annexin p33 [Zea mays]
  misc_feature (1)..(320): Homolog of NCBI NO: 7441506 NR Description: annexin P33 - maize
  misc_feature (1)..(318): Homolog of NCBI NO: 4580920 NR Description: vacuole-associated annexin VCaB42 [Nicotiana
  misc_feature (1)..(318): Homolog of NCBI NO: 3928134 NR Description: annexin P38 [Capsicum annuum]
  misc_feature (1)..(320): Homolog of NCBI NO: 7441507 NR Description: annexin P35 - maize >gi|1370603|emb|CAA66901.1|
  misc_feature (1)..(318): Homolog of NCBI NO: 15238320 NR Description: annexin [Arabidopsis thaliana] annexin [Arabidopsis thaliana] >gi|8843766|dbj|BAA97314.1| [Arabidopsis thaliana] >gi|17979341|gb|AAL49896.1| putative

SEQ ID NO: 102062 - protein, 248 aa, Arabidopsis thaliana; identical to SEQ ID NO: 26655
  peptide (1)..(248): Ceres Seq. ID no. 13609358
  misc_feature (12)..(84): Pfam Name: Annexin Pfam Description: Annexin
  misc_feature (1)..(248): Homolog of NCBI NO: 15224947 NR Description: annexin -related [Arabidopsis thaliana]
  misc_feature (1)..(248): Homolog of NCBI NO: 6503082 NR Description: AnnAt3 [Arabidopsis thaliana]
  misc_feature (1)..(245): Homolog of NCBI NO: 22326753 NR Description: annexin-related protein [Arabidopsis thaliana]
  misc_feature (1)..(247): Homolog of NCBI NO: 21264397 NR Description: Annexin-like protein RJ4
  misc_feature (1)..(247): Homolog of NCBI NO: 6272285 NR Description: annexin p33 [Zea mays]
  misc_feature (1)..(247): Homolog of NCBI NO: 7441506 NR Description: annexin P33 - maize
  misc_feature (1)..(245): Homolog of NCBI NO: 4580920 NR Description: vacuole-associated annexin VCaB42 [Nicotiana
  misc_feature (1)..(245): Homolog of NCBI NO: 3928134 NR Description: annexin P38 [Capsicum annuum]
  misc_feature (1)..(247): Homolog of NCBI NO: 7441507 NR Description: annexin P35 - maize >gi|1370603|emb|CAA66901.1|
  misc_feature (1)..(245): Homolog of NCBI NO: 15238320 NR Description: annexin [Arabidopsis thaliana] annexin [Arabidopsis thaliana] >gi|8843766|dbj|BAA97314.1| [Arabidopsis thaliana] >gi|17979341|gb|AAL49896.1| putative

SEQ ID NO: 102063 - DNA, 1885 bp, Arabidopsis thaliana
  misc_feature (1)..(1885): Ceres Seq. ID no. 13609359
  misc_feature: MA Experiment ID: 108434 Result: Down-regulated in Transcription
  misc_feature: MA Experiment 108434 PARAMETER Experiment Name: At_Root_Tips_cDNA_P Parameter: Tissue Value: Root Tips
  misc_feature: MA Experiment ID: 108463 Result: Up-regulated in Transcription
  misc_feature: MA Experiment 108463 PARAMETER Experiment Name: At_Germinating_Seeds_cDNA_P Parameter: Age (day) Value: 3 vs. 0
  misc_feature: MA Experiment 108463 PARAMETER Experiment Name: At_Germinating_Seeds_cDNA_P Parameter: Tissue Value: Germinating Seeds
  misc_feature: MA Experiment ID: 108464 Result: Up-regulated in Transcription
  misc_feature: MA Experiment 108464 PARAMETER Experiment Name: At_Germinating_Seeds_cDNA_P Parameter: Age (day) Value: 4 vs. 0
  misc_feature: MA Experiment 108464 PARAMETER Experiment Name: At_Germinating_Seeds_cDNA_P Parameter: Tissue Value: Germinating Seeds
  misc_feature: MA Experiment ID: 108489 Result: Up-regulated in Transcription
  misc_feature: MA Experiment ID: 108573 Result: Up-regulated in Transcription
  misc_feature: MA Experiment 108573 PARAMETER Experiment Name: At_Drought_cDNA_P Parameter: Timepoint (hr) Value: 6
  misc_feature: MA Experiment 108573 PARAMETER Experiment Name: At_Drought_cDNA_P Parameter: Tissue Value: Aerial
  misc_feature: MA Experiment 108573 PARAMETER Experiment Name: At_Drought_cDNA_P Parameter: Treatment Value: Drought vs. No Drought
  misc_feature: MA Experiment ID: 108576 Result: Down-regulated in Transcription
  misc_feature: MA Experiment 108576 PARAMETER Experiment Name: At_42deg_Heat_cDNA_P Parameter: Temperature (deg C) Value: 42 vs. 22
  misc_feature: MA Experiment 108576 PARAMETER Experiment Name: At_42deg_Heat_cDNA_P Parameter: Timepoint (hr) Value: 1
  misc_feature: MA Experiment 108576 PARAMETER Experiment Name: At_42deg_Heat_cDNA_P Parameter: Tissue Value: Aerial
  misc_feature: MA Experiment ID: 108595 Result: Down-regulated in Transcription
  misc_feature: MA Experiment 108595 PARAMETER Experiment Name: At_Ler-pi_Ovule_cDNA_P Parameter: Plant Line Value: null
  misc_feature: MA Experiment ID: 108608 Result: Down-regulated in Transcription
  misc_feature: MA Experiment 108608 PARAMETER Experiment Name: At_100uM_ABA_cDNA_P Parameter: Timepoint (hr) Value: 1
  misc_feature: MA Experiment 108608 PARAMETER Experiment Name: At_100uM_ABA_cDNA_P Parameter: Tissue Value: Aerial
  misc_feature: MA Experiment 108608 PARAMETER Experiment Name: At_100uM_ABA_cDNA_P Parameter: Treatment Value: 100uM ABA vs. No Treatment
  misc_feature: MA Experiment ID: 20000069 Result: Down-regulated in Transcription
  misc_feature: MA Experiment 20000069 PARAMETER Experiment Name: At_100uM_ABA_Mutants_cDNA_P Parameter: Plant Line Value: CS23
  misc_feature: MA Experiment 20000069 PARAMETER Experiment Name: At_100uM_ABA_Mutants_cDNA_P Parameter: Timepoint (hr) Value: 6
  misc_feature: MA Experiment 20000069 PARAMETER Experiment Name: At_100uM_ABA_Mutants_cDNA_P Parameter: Tissue Value: Aerial
  misc_feature: MA Experiment 20000069 PARAMETER Experiment Name: At_100uM_ABA_Mutants_cDNA_P Parameter: Treatment Value: 100uM ABA vs. No Treatment
  misc_feature: MA Experiment ID: 20000070 Result: Down-regulated in Transcription
  misc_feature: MA Experiment 20000070 PARAMETER Experiment Name: At_100uM_ABA_Mutants_cDNA_P Parameter: Plant Line Value: CS24
  misc_feature: MA Experiment 20000070 PARAMETER Experiment Name: At_100uM_ABA_Mutants_cDNA_P Parameter: Timepoint (hr) Value: 6
  misc_feature: MA Experiment 20000070 PARAMETER Experiment Name: At_100uM_ABA_Mutants_cDNA_P Parameter: Tissue Value: Aerial
  misc_feature: MA Experiment 20000070 PARAMETER Experiment Name: At_100uM_ABA_Mutants_cDNA_P Parameter: Treatment Value: 100uM ABA vs. No Treatment
  misc_feature: MA Experiment ID: 20000071 Result: Down-regulated in Transcription
  misc_feature: MA Experiment 20000071 PARAMETER Experiment Name: At_100uM_ABA_Mutants_cDNA_P Parameter: Plant Line Value: CS8104
  misc_feature: MA Experiment 20000071 PARAMETER Experiment Name: At_100uM_ABA_Mutants_cDNA_P Parameter: Timepoint (hr) Value: 6
  misc_feature: MA Experiment 20000071 PARAMETER Experiment Name: At_100uM_ABA_Mutants_cDNA_P Parameter: Tissue Value: Aerial
  misc_feature: MA Experiment 20000071 PARAMETER Experiment Name: At_100uM_ABA_Mutants_cDNA_P Parameter: Treatment Value: 100uM ABA vs. No Treatment
  misc_feature: MA Experiment ID: 20000072 Result: Down-regulated in Transcription
  misc_feature: MA Experiment 20000072 PARAMETER Experiment Name: At_100uM_ABA_Mutants_cDNA_P Parameter: Plant Line Value: CS8105
  misc_feature: MA Experiment 20000072 PARAMETER Experiment Name: At_100uM_ABA_Mutants_cDNA_P Parameter: Timepoint (hr) Value: 6
  misc_feature: MA Experiment 20000072 PARAMETER Experiment Name: At_100uM_ABA_Mutants_cDNA_P Parameter: Tissue Value: Aerial
  misc_feature: MA Experiment 20000072 PARAMETER Experiment Name: At_100uM_ABA_Mutants_cDNA_P Parameter: Treatment Value: 100uM ABA vs. No Treatment
  misc_feature: MA Experiment ID: 20000086 Result: Down-regulated in Transcription
  misc_feature: MA Experiment 20000086 PARAMETER Experiment Name: At_100uM_ABA_Mutants_cDNA_P Parameter: Plant Line Value: CS22
  misc_feature: MA Experiment 20000086 PARAMETER Experiment Name: At_100uM_ABA_Mutants_cDNA_P Parameter: Timepoint (hr) Value: 6
  misc_feature: MA Experiment 20000086 PARAMETER Experiment Name: At_100uM_ABA_Mutants_cDNA_P Parameter: Tissue Value: Aerial
  misc_feature: MA Experiment 20000086 PARAMETER Experiment Name: At_100uM_ABA_Mutants_cDNA_P Parameter: Treatment Value: 100uM ABA vs. No Treatment
  misc_feature: MA Experiment ID: 20000087 Result: Down-regulated in Transcription
  misc_feature: MA Experiment 20000087 PARAMETER Experiment Name: At_100uM_ABA_Mutants_cDNA_P Parameter: Plant Line Value: WS
  misc_feature: MA Experiment 20000087 PARAMETER Experiment Name: At_100uM_ABA_Mutants_cDNA_P Parameter: Timepoint (hr) Value: 6
  misc_feature: MA Experiment 20000087 PARAMETER Experiment Name: At_100uM_ABA_Mutants_cDNA_P Parameter: Tissue Value: Aerial
  misc_feature: MA Experiment 20000087 PARAMETER Experiment Name: At_100uM_ABA_Mutants_cDNA_P Parameter: Treatment Value: 100uM ABA vs. No Treatment
  misc_feature: MA Experiment ID: 20000088 Result: Down-regulated in Transcription
  misc_feature: MA Experiment 20000088 PARAMETER Experiment Name: At_100uM_ABA_Mutants_cDNA_P Parameter: Plant Line Value: Landsberg
  misc_feature: MA Experiment 20000088 PARAMETER Experiment Name: At_100uM_ABA_Mutants_cDNA_P Parameter: Timepoint (hr) Value: 6
  misc_feature: MA Experiment 20000088 PARAMETER Experiment Name: At_100uM_ABA_Mutants_cDNA_P Parameter: Tissue Value: Aerial
  misc_feature: MA Experiment 20000088 PARAMETER Experiment Name: At_100uM_ABA_Mutants_cDNA_P Parameter: Treatment Value: 100uM ABA vs. No Treatment
  misc_feature: MA Experiment ID: 20000089 Result: Down-regulated in Transcription
  misc_feature: MA Experiment ID: 20000090 Result: Down-regulated in Transcription
  misc_feature: MA Experiment ID: 20000117 Result: Down-regulated in Transcription
  misc_feature: MA Experiment 20000117 PARAMETER Experiment Name: At_100uM_ABA_Mutants_cDNA_P Parameter: Plant Line Value: Columbia
  misc_feature: MA Experiment 20000117 PARAMETER Experiment Name: At_100uM_ABA_Mutants_cDNA_P Parameter: Timepoint (hr) Value: 6
  misc_feature: MA Experiment 20000117 PARAMETER Experiment Name: At_100uM_ABA_Mutants_cDNA_P Parameter: Tissue Value: Aerial
  misc_feature: MA Experiment 20000117 PARAMETER Experiment Name: At_100uM_ABA_Mutants_cDNA_P Parameter: Treatment Value: 100uM ABA vs. No Treatment
  misc_feature: MA Experiment ID: 20000166 Result: Down-regulated in Transcription
  misc_feature: MA Experiment 20000166 PARAMETER Experiment Name: At_100uM_ABA_P Parameter: Age (day) Value: 14
  misc_feature: MA Experiment 20000166 PARAMETER Experiment Name: At_100uM_ABA_P Parameter: Organism Value: A. thaliana
  misc_feature: MA Experiment 20000166 PARAMETER Experiment Name: At_100uM_ABA_P Parameter: Plant Line Value: WS
  misc_feature: MA Experiment 20000166 PARAMETER Experiment Name: At_100uM_ABA_P Parameter: Timepoint (hr) Value: 1
  misc_feature: MA Experiment 20000166 PARAMETER Experiment Name: At_100uM_ABA_P Parameter: Tissue Value: Aerial
  misc_feature: MA Experiment 20000166 PARAMETER Experiment Name: At_100uM_ABA_P Parameter: Treatment Value: 100uM ABA vs. No Treatment
  misc_feature: MA Experiment ID: 20000224 Result: Up-regulated in Transcription
  misc_feature: MA Experiment ID: 20000234 Result: Down-regulated in Transcription
  misc_feature: MA Experiment 20000234 PARAMETER Experiment Name: At_Siliques_P Parameter: Age (day) Value: 21
  misc_feature: MA Experiment 20000234 PARAMETER Experiment Name: At_Siliques_P Parameter: Organism Value: A. thaliana
  misc_feature: MA Experiment 20000234 PARAMETER Experiment Name: At_Siliques_P Parameter: Plant Line Value: WS
  misc_feature: MA Experiment 20000234 PARAMETER Experiment Name: At_Siliques_P Parameter: Tissue Value: Less Than 5mm Siliques vs. Whole Plant
  misc_feature: MA Experiment ID: 20000235 Result: Down-regulated in Transcription
  misc_feature: MA Experiment 20000235 PARAMETER Experiment Name: At_Siliques_P Parameter: Age (day) Value: 21
  misc_feature: MA Experiment 20000235 PARAMETER Experiment Name: At_Siliques_P Parameter: Organism Value: A. thaliana
  misc_feature: MA Experiment 20000235 PARAMETER Experiment Name: At_Siliques_P Parameter: Plant Line Value: WS
  misc_feature: MA Experiment 20000235 PARAMETER Experiment Name: At_Siliques_P Parameter: Tissue Value: 5-10mm Siliques vs. Whole Plant
  misc_feature: MA Experiment ID: 20000264 Result: Down-regulated in Transcription
  misc_feature: MA Experiment 20000264 PARAMETER Experiment Name: At_Open_Flower_P Parameter: Age (day) Value: 21
  misc_feature: MA Experiment 20000264 PARAMETER Experiment Name: At_Open_Flower_P Parameter: Plant Line Value: WS
  misc_feature: MA Experiment 20000264 PARAMETER Experiment Name: At_Open_Flower_P Parameter: Tissue Value: Open Flower vs. Whole Plant
  misc_feature: MA Experiment ID: 20000265 Result: Down-regulated in Transcription
  misc_feature: MA Experiment 20000265 PARAMETER Experiment Name: At_Open_Flower_P Parameter: Age (day) Value: 21
  misc_feature: MA Experiment 20000265 PARAMETER Experiment Name: At_Open_Flower_P Parameter: Plant Line Value: WS
  misc_feature: MA Experiment 20000265 PARAMETER Experiment Name: At_Open_Flower_P Parameter: Tissue Value: Closed Flower vs. Whole Plant
  misc_feature: MA Experiment ID: 20000286 Result: Down-regulated in Transcription
  misc_feature: MA Experiment 20000286 PARAMETER Experiment Name: At_Open_Flower_P Parameter: Age (day) Value: 21
  misc_feature: MA Experiment 20000286 PARAMETER Experiment Name: At_Open_Flower_P Parameter: Plant Line Value: WS
  misc_feature: MA Experiment 20000286 PARAMETER Experiment Name: At_Open_Flower_P Parameter: Tissue Value: Half Open vs. Whole Plant
  misc_feature: MA Experiment ID: 20000308 Result: Down-regulated in Transcription
  misc_feature: MA Experiment 20000308 PARAMETER Experiment Name: At_100mM_NaCl__P Parameter: Age (day) Value: 17
  misc_feature: MA Experiment 20000308 PARAMETER Experiment Name: At_100mM_NaCl__P Parameter: Organism Value: A. thaliana
  misc_feature: MA Experiment 20000308 PARAMETER Experiment Name: At_100mM_NaCl__P Parameter: Plant Line Value: WS
  misc_feature: MA Experiment 20000308 PARAMETER Experiment Name: At_100mM_NaCl__P Parameter: Timepoint (hr) Value: 72
  misc_feature: MA Experiment 20000308 PARAMETER Experiment Name: At_100mM_NaCl__P Parameter: Tissue Value: Whole Plant
  misc_feature: MA Experiment 20000308 PARAMETER Experiment Name: At_100mM_NaCl__P Parameter: Treatment Value: 100mM NaCl vs. No Treatment
  misc_feature: MA Experiment ID: 20000451 Result: Down-regulated in Transcription
  misc_feature: MA Experiment 20000451 PARAMETER Experiment Name: At_CS6879_Shoots-Roots_P Parameter: Age (day) Value: 14
  misc_feature: MA Experiment 20000451 PARAMETER Experiment Name: At_CS6879_Shoots-Roots_P Parameter: Organism Value: A. thaliana
  misc_feature: MA Experiment 20000451 PARAMETER Experiment Name: At_CS6879_Shoots-Roots_P Parameter: Plant Line Value: CS6879 vs. WS
  misc_feature: MA Experiment 20000451 PARAMETER Experiment Name: At_CS6879_Shoots-Roots_P Parameter: Tissue Value: Roots
  misc_feature: MA Experiment ID: 20000495 Result: Down-regulated in Transcription
  misc_feature: MA Experiment 20000495 PARAMETER Experiment Name: At_Guard_Cells_P Parameter: Harvest Date Value: 8/2/2002
  misc_feature: MA Experiment 20000495 PARAMETER Experiment Name: At_Guard_Cells_P Parameter: Organism Value: A. thaliana
  misc_feature: MA Experiment 20000495 PARAMETER Experiment Name: At_Guard_Cells_P Parameter: Tissue Value: Guard Cells vs. Leaves
  misc_feature: MA Experiment ID: 20000496 Result: Down-regulated in Transcription
  misc_feature: MA Experiment 20000496 PARAMETER Experiment Name: At_Guard_Cells_P Parameter: Harvest Date Value: 7/19/2002
  misc_feature: MA Experiment 20000496 PARAMETER Experiment Name: At_Guard_Cells_P Parameter: Organism Value: Canola
  misc_feature: MA Experiment 20000496 PARAMETER Experiment Name: At_Guard_Cells_P Parameter: Tissue Value: Guard Cells vs. Leaves
  misc_feature: MA Experiment ID: 20000527 Result: Up-regulated in Transcription
  misc_feature: MA Experiment 20000527 PARAMETER Experiment Name: At_10percent_PEG_P Parameter: Age (day) Value: 20
  misc_feature: MA Experiment 20000527 PARAMETER Experiment Name: At_10percent_PEG_P Parameter: Organism Value: A. thaliana
  misc_feature: MA Experiment 20000527 PARAMETER Experiment Name: At_10percent_PEG_P Parameter: Plant Line Value: WS
  misc_feature: MA Experiment 20000527 PARAMETER Experiment Name: At_10percent_PEG_P Parameter: Timepoint (day) Value: 20
  misc_feature: MA Experiment 20000527 PARAMETER Experiment Name: At_10percent_PEG_P Parameter: Tissue Value: Whole Plant
  misc_feature: MA Experiment 20000527 PARAMETER Experiment Name: At_10percent_PEG_P Parameter: Treatment Value: 10percent PEG vs. No Treatment
  misc_feature: MA Experiment ID: 20001450 Result: Up-regulated in Transcription
  misc_feature: MA Experiment 20001450 PARAMETER Experiment Name: At_Far-red-induction_P Parameter: Age (day) Value: 7
  misc_feature: MA Experiment 20001450 PARAMETER Experiment Name: At_Far-red-induction_P Parameter: Light Value: Far-red vs. White
  misc_feature: MA Experiment 20001450 PARAMETER Experiment Name: At_Far-red-induction_P Parameter: Organism Value: A. thaliana
  misc_feature: MA Experiment 20001450 PARAMETER Experiment Name: At_Far-red-induction_P Parameter: Plant Line Value: Columbia
  misc_feature: MA Experiment 20001450 PARAMETER Experiment Name: At_Far-red-induction_P Parameter: Timepoint (hr) Value: 8
  misc_feature: MA Experiment 20001450 PARAMETER Experiment Name: At_Far-red-induction_P Parameter: Tissue Value: Whole Plant
  misc_feature: MA Experiment ID: 20001451 Result: Up-regulated in Transcription
  misc_feature: MA Experiment 20001451 PARAMETER Experiment Name: At_Far-red-induction_P Parameter: Age (day) Value: 7
  misc_feature: MA Experiment 20001451 PARAMETER Experiment Name: At_Far-red-induction_P Parameter: Light Value: Far-red vs. White
  misc_feature: MA Experiment 20001451 PARAMETER Experiment Name: At_Far-red-induction_P Parameter: Organism Value: A. thaliana
  misc_feature: MA Experiment 20001451 PARAMETER Experiment Name: At_Far-red-induction_P Parameter: Plant Line Value: Columbia
  misc_feature: MA Experiment 20001451 PARAMETER Experiment Name: At_Far-red-induction_P Parameter: Timepoint (hr) Value: 24
  misc_feature: MA Experiment 20001451 PARAMETER Experiment Name: At_Far-red-induction_P Parameter: Tissue Value: Whole Plant
  misc_feature: MA Experiment ID: 20001459 Result: Up-regulated in Transcription
  misc_feature: MA Experiment 20001459 PARAMETER Experiment Name: At_50mM_NH4NO3_L-to-H_P Parameter: Age (day) Value: Undefined
  misc_feature: MA Experiment 20001459 PARAMETER Experiment Name: At_50mM_NH4NO3_L-to-H_P Parameter: Organism Value: Undefined
  misc_feature: MA Experiment 20001459 PARAMETER Experiment Name: At_50mM_NH4NO3_L-to-H_P Parameter: Plant Line Value: Undefined
  misc_feature: MA Experiment 20001459 PARAMETER Experiment Name: At_50mM_NH4NO3_L-to-H_P Parameter: Timepoint (hr) Value: 4
  misc_feature: MA Experiment 20001459 PARAMETER Experiment Name: At_50mM_NH4NO3_L-to-H_P Parameter: Tissue Value: Siliques
  misc_feature: MA Experiment 20001459 PARAMETER Experiment Name: At_50mM_NH4NO3_L-to-H_P Parameter: Treatment Value: 50mM NH4NO3 vs. 100mM Manitol
  misc_feature: MA Experiment ID: 20001555 Result: Down-regulated in Transcription
  misc_feature: MA Experiment 20001555 PARAMETER Experiment Name: At_Drought_Soil_Dry_P Parameter: Age (day) Value: 24
  misc_feature: MA Experiment 20001555 PARAMETER Experiment Name: At_Drought_Soil_Dry_P Parameter: Organism Value: A. thaliana
  misc_feature: MA Experiment 20001555 PARAMETER Experiment Name: At_Drought_Soil_Dry_P Parameter: Plant Line Value: WS
  misc_feature: MA Experiment 20001555 PARAMETER Experiment Name: At_Drought_Soil_Dry_P Parameter: Post Timepoint (hr) Value: None
  misc_feature: MA Experiment 20001555 PARAMETER Experiment Name: At_Drought_Soil_Dry_P Parameter: Post-Treatment Value: None
  misc_feature: MA Experiment 20001555 PARAMETER Experiment Name: At_Drought_Soil_Dry_P Parameter: Timepoint (day) Value: 10
  misc_feature: MA Experiment 20001555 PARAMETER Experiment Name: At_Drought_Soil_Dry_P Parameter: Treatment Value: Drought vs. No Drought
  misc_feature: MA Experiment ID: 20001556 Result: Down-regulated in Transcription
  misc_feature: MA Experiment 20001556 PARAMETER Experiment Name: At_Drought_Soil_Dry_P Parameter: Age (day) Value: 26
  misc_feature: MA Experiment 20001556 PARAMETER Experiment Name: At_Drought_Soil_Dry_P Parameter: Organism Value: A. thaliana
  misc_feature: MA Experiment 20001556 PARAMETER Experiment Name: At_Drought_Soil_Dry_P Parameter: Plant Line Value: WS
  misc_feature: MA Experiment 20001556 PARAMETER Experiment Name: At_Drought_Soil_Dry_P Parameter: Post Timepoint (hr) Value: None
  misc_feature: MA Experiment 20001556 PARAMETER Experiment Name: At_Drought_Soil_Dry_P Parameter: Post-Treatment Value: None
  misc_feature: MA Experiment 20001556 PARAMETER Experiment Name: At_Drought_Soil_Dry_P Parameter: Timepoint (day) Value: 12
  misc_feature: MA Experiment 20001556 PARAMETER Experiment Name: At_Drought_Soil_Dry_P Parameter: Treatment Value: Drought vs. No Drought
  misc_feature: MA Experiment ID: 20001557 Result: Down-regulated in Transcription
  misc_feature: MA Experiment 20001557 PARAMETER Experiment Name: At_Drought_Soil_Dry_P Parameter: Age (day) Value: 27
  misc_feature: MA Experiment 20001557 PARAMETER Experiment Name: At_Drought_Soil_Dry_P Parameter: Organism Value: A. thaliana
  misc_feature: MA Experiment 20001557 PARAMETER Experiment Name: At_Drought_Soil_Dry_P Parameter: Plant Line Value: WS
  misc_feature: MA Experiment 20001557 PARAMETER Experiment Name: At_Drought_Soil_Dry_P Parameter: Post Timepoint (hr) Value: 3
  misc_feature: MA Experiment 20001557 PARAMETER Experiment Name: At_Drought_Soil_Dry_P Parameter: Post-Treatment Value: Re-Water vs. No Drought
  misc_feature: MA Experiment 20001557 PARAMETER Experiment Name: At_Drought_Soil_Dry_P Parameter: Timepoint (day) Value: 13
  misc_feature: MA Experiment 20001557 PARAMETER Experiment Name: At_Drought_Soil_Dry_P Parameter: Treatment Value: Drought vs. No Drought
  misc_feature: MA Experiment ID: 20001558 Result: Down-regulated in Transcription
  misc_feature: MA Experiment 20001558 PARAMETER Experiment Name: At_Drought_Soil_Dry_P Parameter: Age (day) Value: 27
  misc_feature: MA Experiment 20001558 PARAMETER Experiment Name: At_Drought_Soil_Dry_P Parameter: Organism Value: A. thaliana
  misc_feature: MA Experiment 20001558 PARAMETER Experiment Name: At_Drought_Soil_Dry_P Parameter: Plant Line Value: WS
  misc_feature: MA Experiment 20001558 PARAMETER Experiment Name: At_Drought_Soil_Dry_P Parameter: Post Timepoint (hr) Value: 6
  misc_feature: MA Experiment 20001558 PARAMETER Experiment Name: At_Drought_Soil_Dry_P Parameter: Post-Treatment Value: Re-Water vs. No Drought
  misc_feature: MA Experiment 20001558 PARAMETER Experiment Name: At_Drought_Soil_Dry_P Parameter: Timepoint (day) Value: 13
  misc_feature: MA Experiment 20001558 PARAMETER Experiment Name: At_Drought_Soil_Dry_P Parameter: Treatment Value: Drought vs. No Drought
  misc_feature: MA Experiment ID: 20001560 Result: Down-regulated in Transcription
  misc_feature: MA Experiment 20001560 PARAMETER Experiment Name: At_Drought_Soil_Dry_P Parameter: Age (day) Value: 28
  misc_feature: MA Experiment 20001560 PARAMETER Experiment Name: At_Drought_Soil_Dry_P Parameter: Organism Value: A. thaliana
  misc_feature: MA Experiment 20001560 PARAMETER Experiment Name: At_Drought_Soil_Dry_P Parameter: Plant Line Value: WS
  misc_feature: MA Experiment 20001560 PARAMETER Experiment Name: At_Drought_Soil_Dry_P Parameter: Post Timepoint (hr) Value: None
  misc_feature: MA Experiment 20001560 PARAMETER Experiment Name: At_Drought_Soil_Dry_P Parameter: Post-Treatment Value: None
  misc_feature: MA Experiment 20001560 PARAMETER Experiment Name: At_Drought_Soil_Dry_P Parameter: Timepoint (day) Value: 14
  misc_feature: MA Experiment 20001560 PARAMETER Experiment Name: At_Drought_Soil_Dry_P Parameter: Treatment Value: Drought vs. No Drought
agaagaggaaacaaagagaagtagcgtcctctcttcaatttcaaccggcactttcttctcttcttcttcttcttcccaatcttcctcgtctctttacctacacctatatatatatatatatatatatctccttccctcacacacatacctgcacagctacaataatctacttcccctctttcaataacggaattaatagtaatctaatcggaagattcaagcgagaaatcgatttggttgtctgttaatttgttgggaaataaattgaaataggagattgattggatggtgagaaggcaagaggaggagaagaaggcggagaagggaatgcgtctggggaaatacgagctagggaggacgctcggcgagggtaatttcggtaaagttaaattcgctaaagataccgtctccggtcattccttcgccgttaaaatcatcgacaagtctcgtatcgccgatctcaacttctccttacagataaaaagagagatccggactctgaaaatgttgaaacatccccacattgttagattacatgaggtcttggctagcaaaacgaaaattaatatggtaatggaacttgttaccggaggagaattgttcgacagaattgtttccaacggaaaattaacagaaactgatggaagaaaaatgtttcagcagcttatcgatggaatcagctactgtcatagcaaaggtgttttccacagggatctcaagctagagaatgttcttcttgatgcaaagggacatataaagatcactgattttggcctcagtgctctgcctcagcattttagggatgacggattgttgcatacaacctgtggaagtcctaattacgttgcgcctgaggttttagctaacagaggctacgatggtgcagcatcagacatatggtcctgtggtgtaatcttgtatgtgattctaaccggatgtcttcctttcgacgacagaaaccttgcagttctttaccagaagatatgtaaaggagacccaccaataccaagatggttatccccgggtgcaagaaccatgattaagagaatgcttgatccaaatccagtcacgaggatcacagttgtgggtattaaagccagcgagtggttcaaacttgagtacattccttcaattcccgatgatgatgacgaagaagaagttgacacagacgatgatgctttctcaatccaagaactcggatcagaagaagggaagggcagtgattcaccgaccatcatcaatgcgtttcagttaatcggaatgtcttcctttcttgacctgtccggtttctttgaacaagagaatgtatcagagaggagaataagattcacttcaaatagctcagcaaaagatttactggagaaaatcgaaacagccgttacagaaatgggattcagtgtacaaaagaaacatgccaagttaagagtaaaacaagaagaaagaaaccagaaaggtcaagttggtttatcagtaacagctgaggttttcgagataaagccgtcactgaacgtggttgagctaagaaaatcttatggcgattcatgtttatatagacagttgtacgagagactattaaaagacgtgggcacatcctcgccggagcaagagatagtaacttaggtgttggtgttttcggctgaagagatatacatagctctaataatttatcatatggaacacaccatccatgttcatataatttattatcttaagtatatataaaaggagctcgatttatatgattagtgcaaatagtaattgcatttaagtataaaccgtggcgtagatctttcctcaagaattagagattttattcactacctttgtatttgtttttattattatttggtgtggcaaatctgcctactagcaaaaaagatcccat

SEQ ID NO: 102064 - protein, 444 aa, Arabidopsis thaliana
  peptide (1)..(444): Ceres Seq. ID no. 13609360
  misc_feature (20)..(275): Pfam Name: Protein kinase domain Pfam Description: Protein kinase domain
  misc_feature (1)..(444): Homolog of NCBI NO: 18401539 NR Description: CBL-interacting protein kinase 1 [Arabidopsis
  misc_feature (1)..(444): Homolog of NCBI NO: 20260556 NR Description: unknown protein [Arabidopsis thaliana]
  misc_feature (1)..(444): Homolog of NCBI NO: 11066952 NR Description: CBL-interacting protein kinase 1 [Arabidopsis
  misc_feature (1)..(425): Homolog of NCBI NO: 9294138 NR Description: serine/threonine kinase [Arabidopsis thaliana]
  misc_feature (13)..(443): Homolog of NCBI NO: 15221136 NR Description: CBL-interacting protein kinase 17 [Arabidopsis
  misc_feature (108)..(443): Homolog of NCBI NO: 8778506 NR Description: F21D18.2 [Arabidopsis thaliana]
  misc_feature (13)..(110): Homolog of NCBI NO: 8778506 NR Description: F21D18.2 [Arabidopsis thaliana]
  misc_feature (13)..(425): Homolog of NCBI NO: 25387053 NR Description: hypothetical protein F11A17.18 [imported] - thaliana >gi|8778963|gb|AAD49770.2|AC007932_18 Similar to a serine/threonine kinase from Sorghum bicolor gb|Y12464. It
  misc_feature (6)..(440): Homolog of NCBI NO: 34894358 NR Description: unnamed protein product [Oryza sativa (japonica group)] >gi|8468028|dbj|BAA96628.1| unnamed protein product
  misc_feature (15)..(440): Homolog of NCBI NO: 23237825 NR Description: putative serine/threonine kinase [Oryza sativa
MVRRQEEEKKAEKGMRLGKYELGRTLGEGNFGKVKFAKDTVSGHSFAVKIIDKSRIADLNFSLQIKREIRTLKMLKHPHIVRLHEVLASKTKINMVMELVTGGELFDRIVSNGKLTETDGRKMFQQLIDGISYCHSKGVFHRDLKLENVLLDAKGHIKITDFGLSALPQHFRDDGLLHTTCGSPNYVAPEVLANRGYDGAASDIWSCGVILYVILTGCLPFDDRNLAVLYQKICKGDPPIPRWLSPGARTMIKRMLDPNPVTRITVVGIKASEWFKLEYIPSIPDDDDEEEVDTDDDAFSIQELGSEEGKGSDSPTIINAFQLIGMSSFLDLSGFFEQENVSERRIRFTSNSSAKDLLEKIETAVTEMGFSVQKKHAKLRVKQEERNQKGQVGLSVTAEVFEIKPSLNVVELRKSYGDSCLYRQLYERLLKDVGTSSPEQEIVT

SEQ ID NO: 102065 - protein, 430 aa, Arabidopsis thaliana
  peptide (1)..(430): Ceres Seq. ID no. 13609361
  misc_feature (6)..(261): Pfam Name: Protein kinase domain Pfam Description: Protein kinase domain
  misc_feature (1)..(430): Homolog of NCBI NO: 18401539 NR Description: CBL-interacting protein kinase 1 [Arabidopsis
  misc_feature (1)..(430): Homolog of NCBI NO: 20260556 NR Description: unknown protein [Arabidopsis thaliana]
  misc_feature (1)..(430): Homolog of NCBI NO: 11066952 NR Description: CBL-interacting protein kinase 1 [Arabidopsis
  misc_feature (1)..(411): Homolog of NCBI NO: 9294138 NR Description: serine/threonine kinase [Arabidopsis thaliana]
  misc_feature (1)..(429): Homolog of NCBI NO: 15221136 NR Description: CBL-interacting protein kinase 17 [Arabidopsis
  misc_feature (94)..(429): Homolog of NCBI NO: 8778506 NR Description: F21D18.2 [Arabidopsis thaliana]
  misc_feature (1)..(96): Homolog of NCBI NO: 8778506 NR Description: F21D18.2 [Arabidopsis thaliana]
  misc_feature (1)..(411): Homolog of NCBI NO: 25387053 NR Description: hypothetical protein F11A17.18 [imported] - thaliana >gi|8778963|gb|AAD49770.2|AC007932_18 Similar to a serine/threonine kinase from Sorghum bicolor gb|Y12464. It
  misc_feature (1)..(426): Homolog of NCBI NO: 34894358 NR Description: unnamed protein product [Oryza sativa (japonica group)] >gi|8468028|dbj|BAA96628.1| unnamed protein product
  misc_feature (1)..(426): Homolog of NCBI NO: 23237825 NR Description: putative serine/threonine kinase [Oryza sativa
MRLGKYELGRTLGEGNFGKVKFAKDTVSGHSFAVKIIDKSRIADLNFSLQIKREIRTLKMLKHPHIVRLHEVLASKTKINMVMELVTGGELFDRIVSNGKLTETDGRKMFQQLIDGISYCHSKGVFHRDLKLENVLLDAKGHIKITDFGLSALPQHFRDDGLLHTTCGSPNYVAPEVLANRGYDGAASDIWSCGVILYVILTGCLPFDDRNLAVLYQKICKGDPPIPRWLSPGARTMIKRMLDPNPVTRITVVGIKASEWFKLEYIPSIPDDDDEEEVDTDDDAFSIQELGSEEGKGSDSPTIINAFQLIGMSSFLDLSGFFEQENVSERRIRFTSNSSAKDLLEKIETAVTEMGFSVQKKHAKLRVKQEERNQKGQVGLSVTAEVFEIKPSLNVVELRKSYGDSCLYRQLYERLLKDVGTSSPEQEIVT

SEQ ID NO: 102066 - protein, 371 aa, Arabidopsis thaliana
  peptide (1)..(371): Ceres Seq. ID no. 13609362
  misc_feature (1)..(202): Pfam Name: Protein kinase domain Pfam Description: Protein kinase domain
  misc_feature (1)..(371): Homolog of NCBI NO: 18401539 NR Description: CBL-interacting protein kinase 1 [Arabidopsis
  misc_feature (1)..(371): Homolog of NCBI NO: 20260556 NR Description: unknown protein [Arabidopsis thaliana]
  misc_feature (1)..(371): Homolog of NCBI NO: 11066952 NR Description: CBL-interacting protein kinase 1 [Arabidopsis
  misc_feature (1)..(352): Homolog of NCBI NO: 9294138 NR Description: serine/threonine kinase [Arabidopsis thaliana]
  misc_feature (1)..(370): Homolog of NCBI NO: 15221136 NR Description: CBL-interacting protein kinase 17 [Arabidopsis
  misc_feature (35)..(370): Homolog of NCBI NO: 8778506 NR Description: F21D18.2 [Arabidopsis thaliana]
  misc_feature (1)..(37): Homolog of NCBI NO: 8778506 NR Description: F21D18.2 [Arabidopsis thaliana]
  misc_feature (1)..(352): Homolog of NCBI NO: 25387053 NR Description: hypothetical protein F11A17.18 [imported] - thaliana >gi|8778963|gb|AAD49770.2|AC007932_18 Similar to a serine/threonine kinase from Sorghum bicolor gb|Y12464. It
  misc_feature (1)..(367): Homolog of NCBI NO: 34894358 NR Description: unnamed protein product [Oryza sativa (japonica group)] >gi|8468028|dbj|BAA96628.1| unnamed protein product
  misc_feature (1)..(367): Homolog of NCBI NO: 23237825 NR Description: putative serine/threonine kinase [Oryza sativa
MLKHPHIVRLHEVLASKTKINMVMELVTGGELFDRIVSNGKLTETDGRKMFQQLIDGISYCHSKGVFHRDLKLENVLLDAKGHIKITDFGLSALPQHFRDDGLLHTTCGSPNYVAPEVLANRGYDGAASDIWSCGVILYVILTGCLPFDDRNLAVLYQKICKGDPPIPRWLSPGARTMIKRMLDPNPVTRITVVGIKASEWFKLEYIPSIPDDDDEEEVDTDDDAFSIQELGSEEGKGSDSPTIINAFQLIGMSSFLDLSGFFEQENVSERRIRFTSNSSAKDLLEKIETAVTEMGFSVQKKHAKLRVKQEERNQKGQVGLSVTAEVFEIKPSLNVVELRKSYGDSCLYRQLYERLLKDVGTSSPEQEIVT

SEQ ID NO: 102067 - DNA, 1282 bp, Arabidopsis thaliana
  misc_feature (1)..(1282): Ceres Seq. ID no. 13609363
  misc_feature: MA Experiment ID: 108573 Result: Up-regulated in Transcription
  misc_feature: MA Experiment 108573 PARAMETER Experiment Name: At_Drought_cDNA_P Parameter: Timepoint (hr) Value: 6
  misc_feature: MA Experiment 108573 PARAMETER Experiment Name: At_Drought_cDNA_P Parameter: Tissue Value: Aerial
  misc_feature: MA Experiment 108573 PARAMETER Experiment Name: At_Drought_cDNA_P Parameter: Treatment Value: Drought vs. No Drought
  misc_feature: MA Experiment ID: 108595 Result: Down-regulated in Transcription
  misc_feature: MA Experiment 108595 PARAMETER Experiment Name: At_Ler-pi_Ovule_cDNA_P Parameter: Plant Line Value: null
  misc_feature: MA Experiment ID: 20000179 Result: Down-regulated in Transcription
  misc_feature: MA Experiment 20000179 PARAMETER Experiment Name: At_Germinating_Seeds_P Parameter: Age (hr) Value: 6 vs. 0
  misc_feature: MA Experiment 20000179 PARAMETER Experiment Name: At_Germinating_Seeds_P Parameter: Tissue Value: Germinating Seeds
  misc_feature: MA Experiment ID: 20000227 Result: Down-regulated in Transcription
  misc_feature: MA Experiment 20000227 PARAMETER Experiment Name: At_Root-Tips-vs-Tops_P Parameter: Tissue Value: Root Tips vs. Root Tops
  misc_feature: MA Experiment ID: 20001757 Result: Up-regulated in Transcription
  misc_feature: MA Experiment 20001757 PARAMETER Experiment Name: At_50mM_NH4NO3_L-to-H_P Parameter: Timepoint (hr) Value: 6
  misc_feature: MA Experiment 20001757 PARAMETER Experiment Name: At_50mM_NH4NO3_L-to-H_P Parameter: Tissue Value: Leaf
  misc_feature: MA Experiment 20001757 PARAMETER Experiment Name: At_50mM_NH4NO3_L-to-H_P Parameter: Treatment Value: 50mM NH4NO3 vs 100mM Mannitol
atggcggtgaacgcgtgtctatctccgccggagatgatggctgtccggccaggggaaggcgttccgaattcaaaatctacgcagggaaaaactaggctctatctcaccaaaccttcatggatagtcagaactcagtctggagctaagacgtgtatgaagtcgaaggcgaaaggacgatgcgtaatctgccatggaagtggaagagtcgattgtttcaattgttgtgggaaagggaggactaattgtgtggatgtggaaatgcttccaagaggagaatggcctaaatggtgcaagagttgtggagggagtggattaagtgactgttctcgctgtcttggcaccggagagcgcgcatctttcttcttcttgtggttcgatattcttatcgttatgtcttccgtcgctttgccggcgatgagctgccggagctcaggtgaacaagtgaaggagattcgcgtttgtacgaatcgcacctgccgaagacaaggctccttccagattctcgagactttaacagctctcgcacctcccgaactccgagtcactcactgcgcttgcctcggccgatgcggctccggtccaaacctcgtggctctccctcaaggtctcatcctacgtcactgcgccacgccttctcgagctgctgaaattttgttcagcctatgtggtgacggtcgtgaagcttcttcatcctccgccgtcacagacgctctcacggctttagcgttaaccaacaatgctctctctcaaatcgatgcgggaaatttctctgaagccgaagcacttctcactcaggctttagagctgaaaccctacggtggcttgcatagaatattcaaacacagatcagtagcaaaattgggaatgcttgattactctggggctcttgaagatataagccaagctctagctttagctcctaactattctgagccctacatatgccaaggggatgtctacgtagcaaaaggtcaatatgatcttgcagagaagtcatacttgacatgtctagagatagatccttctcttcgcagatcgaaaccattcaaggcccggattgcgaaacttcaacagaaagttgttgaactagatgtaacatagaagtattctgactctgggagttgatacaaaacagccgttgcaataaatgtctctttctttgggtgttccagagtggaaaggtatgtgtataggttattagtatagcaagaggtattgacattgcgttgtgtatatattactcagatgatattatcaatgttaatgacattattttggtact

SEQ ID NO: 102068 - protein, 366 aa, Arabidopsis thaliana
  peptide (1)..(366): Ceres Seq. ID no. 13609364
  misc_feature (310)..(343): Pfam Name: TPR Domain Pfam Description: TPR Domain
  misc_feature (1)..(366): Homolog of NCBI NO: 15229091 NR Description: hypothetical protein [Arabidopsis thaliana]
  misc_feature (131)..(366): Homolog of NCBI NO: 9294156 NR Description: gb|AAF19538.1~gene_id:MKP6.24~similar to unknown
  misc_feature (1)..(116): Homolog of NCBI NO: 9294155 NR Description: gene_id:MKP6.23~unknown protein [Arabidopsis
  misc_feature (140)..(366): Homolog of NCBI NO: 38344917 NR Description: OSJNBa0018M05.8 [Oryza sativa (japonica
  misc_feature (35)..(116): Homolog of NCBI NO: 38346709 NR Description: OSJNBa0086O06.7 [Oryza sativa (japonica
  misc_feature (147)..(207): Homolog of NCBI NO: 23040717 NR Description: hypothetical protein [Trichodesmium erythraeum
  misc_feature (255)..(343): Homolog of NCBI NO: 17228384 NR Description: hypothetical protein [Nostoc sp. PCC 7120]
MAVNACLSPPEMMAVRPGEGVPNSKSTQGKTRLYLTKPSWIVRTQSGAKTCMKSKAKGRCVICHGSGRVDCFNCCGKGRTNCVDVEMLPRGEWPKWCKSCGGSGLSDCSRCLGTGERASFFFLWFDILIVMSSVALPAMSCRSSGEQVKEIRVCTNRTCRRQGSFQILETLTALAPPELRVTHCACLGRCGSGPNLVALPQGLILRHCATPSRAAEILFSLCGDGREASSSSAVTDALTALALTNNALSQIDAGNFSEAEALLTQALELKPYGGLHRIFKHRSVAKLGMLDYSGALEDISQALALAPNYSEPYICQGDVYVAKGQYDLAEKSYLTCLEIDPSLRRSKPFKARIAKLQQKVVELDVT

SEQ ID NO: 102069 - protein, 355 aa, Arabidopsis thaliana
  peptide (1)..(355): Ceres Seq. ID no. 13609365
  misc_feature (299)..(332): Pfam Name: TPR Domain Pfam Description: TPR Domain
  misc_feature (1)..(355): Homolog of NCBI NO: 15229091 NR Description: hypothetical protein [Arabidopsis thaliana]
  misc_feature (120)..(355): Homolog of NCBI NO: 9294156 NR Description: gb|AAF19538.1~gene_id:MKP6.24~similar to unknown
  misc_feature (1)..(105): Homolog of NCBI NO: 9294155 NR Description: gene_id:MKP6.23~unknown protein [Arabidopsis
  misc_feature (129)..(355): Homolog of NCBI NO: 38344917 NR Description: OSJNBa0018M05.8 [Oryza sativa (japonica
  misc_feature (24)..(105): Homolog of NCBI NO: 38346709 NR Description: OSJNBa0086O06.7 [Oryza sativa (japonica
  misc_feature (136)..(196): Homolog of NCBI NO: 23040717 NR Description: hypothetical protein [Trichodesmium erythraeum
  misc_feature (244)..(332): Homolog of NCBI NO: 17228384 NR Description: hypothetical protein [Nostoc sp. PCC 7120]
MMAVRPGEGVPNSKSTQGKTRLYLTKPSWIVRTQSGAKTCMKSKAKGRCVICHGSGRVDCFNCCGKGRTNCVDVEMLPRGEWPKWCKSCGGSGLSDCSRCLGTGERASFFFLWFDILIVMSSVALPAMSCRSSGEQVKEIRVCTNRTCRRQGSFQILETLTALAPPELRVTHCACLGRCGSGPNLVALPQGLILRHCATPSRAAEILFSLCGDGREASSSSAVTDALTALALTNNALSQIDAGNFSEAEALLTQALELKPYGGLHRIFKHRSVAKLGMLDYSGALEDISQALALAPNYSEPYICQGDVYVAKGQYDLAEKSYLTCLEIDPSLRRSKPFKARIAKLQQKVVELDVT

SEQ ID NO: 102070 - protein, 354 aa, Arabidopsis thaliana
  peptide (1)..(354): Ceres Seq. ID no. 13609366
  misc_feature (298)..(331): Pfam Name: TPR Domain Pfam Description: TPR Domain
  misc_feature (1)..(354): Homolog of NCBI NO: 15229091 NR Description: hypothetical protein [Arabidopsis thaliana]
  misc_feature (119)..(354): Homolog of NCBI NO: 9294156 NR Description: gb|AAF19538.1~gene_id:MKP6.24~similar to unknown
  misc_feature (1)..(104): Homolog of NCBI NO: 9294155 NR Description: gene_id:MKP6.23~unknown protein [Arabidopsis
  misc_feature (128)..(354): Homolog of NCBI NO: 38344917 NR Description: OSJNBa0018M05.8 [Oryza sativa (japonica
  misc_feature (23)..(104): Homolog of NCBI NO: 38346709 NR Description: OSJNBa0086O06.7 [Oryza sativa (japonica
  misc_feature (135)..(195): Homolog of NCBI NO: 23040717 NR Description: hypothetical protein [Trichodesmium erythraeum
  misc_feature (243)..(331): Homolog of NCBI NO: 17228384 NR Description: hypothetical protein [Nostoc sp. PCC 7120]
MAVRPGEGVPNSKSTQGKTRLYLTKPSWIVRTQSGAKTCMKSKAKGRCVICHGSGRVDCFNCCGKGRTNCVDVEMLPRGEWPKWCKSCGGSGLSDCSRCLGTGERASFFFLWFDILIVMSSVALPAMSCRSSGEQVKEIRVCTNRTCRRQGSFQILETLTALAPPELRVTHCACLGRCGSGPNLVALPQGLILRHCATPSRAAEILFSLCGDGREASSSSAVTDALTALALTNNALSQIDAGNFSEAEALLTQALELKPYGGLHRIFKHRSVAKLGMLDYSGALEDISQALALAPNYSEPYICQGDVYVAKGQYDLAEKSYLTCLEIDPSLRRSKPFKARIAKLQQKVVELDVT

SEQ ID NO: 102071 - DNA, 1852 bp, Arabidopsis thaliana
  misc_feature (1)..(1852): Ceres Seq. ID no. 13609367
  misc_feature: MA Experiment ID: 20001557 Result: Up-regulated in Transcription
  misc_feature: MA Experiment 20001557 PARAMETER Experiment Name: At_Drought_Soil_Dry_P Parameter: Age (day) Value: 27
  misc_feature: MA Experiment 20001557 PARAMETER Experiment Name: At_Drought_Soil_Dry_P Parameter: Organism Value: A. thaliana
  misc_feature: MA Experiment 20001557 PARAMETER Experiment Name: At_Drought_Soil_Dry_P Parameter: Plant Line Value: WS
  misc_feature: MA Experiment 20001557 PARAMETER Experiment Name: At_Drought_Soil_Dry_P Parameter: Post Timepoint (hr) Value: 3
  misc_feature: MA Experiment 20001557 PARAMETER Experiment Name: At_Drought_Soil_Dry_P Parameter: Post-Treatment Value: Re-Water vs. No Drought
  misc_feature: MA Experiment 20001557 PARAMETER Experiment Name: At_Drought_Soil_Dry_P Parameter: Timepoint (day) Value: 13
  misc_feature: MA Experiment 20001557 PARAMETER Experiment Name: At_Drought_Soil_Dry_P Parameter: Treatment Value: Drought vs. No Drought
  misc_feature: MA Experiment ID: 20001558 Result: Up-regulated in Transcription
  misc_feature: MA Experiment 20001558 PARAMETER Experiment Name: At_Drought_Soil_Dry_P Parameter: Age (day) Value: 27
  misc_feature: MA Experiment 20001558 PARAMETER Experiment Name: At_Drought_Soil_Dry_P Parameter: Organism Value: A. thaliana
  misc_feature: MA Experiment 20001558 PARAMETER Experiment Name: At_Drought_Soil_Dry_P Parameter: Plant Line Value: WS
  misc_feature: MA Experiment 20001558 PARAMETER Experiment Name: At_Drought_Soil_Dry_P Parameter: Post Timepoint (hr) Value: 6
  misc_feature: MA Experiment 20001558 PARAMETER Experiment Name: At_Drought_Soil_Dry_P Parameter: Post-Treatment Value: Re-Water vs. No Drought
  misc_feature: MA Experiment 20001558 PARAMETER Experiment Name: At_Drought_Soil_Dry_P Parameter: Timepoint (day) Value: 13
  misc_feature: MA Experiment 20001558 PARAMETER Experiment Name: At_Drought_Soil_Dry_P Parameter: Treatment Value: Drought vs. No Drought
atggcgtctcaagctgcgaatctctgggttcttctaggtttaggtctcgctgggattcttatgcttaccaaaaagctgaagaagaccgtccgtgaagatttcggcgcttttatcgataaactcatgcttcttccccctccgcaacctgctcctcccaaagctcctcatcctctcaccggtctaacctttgccgtttccgacgtattcgatattacagggtatgtgactggatttggtcatccagactgggtcaggacccatgaagctgcttcgtcaacatctcctgtggtttcaactctcgttgaaggtggagccacttgtgttggaaaaactgtagttgatgagtttgcgtttagtattagtggagaaaacaagcattacgattcacctacaaatcctgcagctcctactcgtattcctggtggcgcttgcagtggagctgctgtagccgtagcaacaaatgctgtggattttgctctaggcatcgacacagttggcggggtaagagtgcctgctggatactgtggcgttcttggattcaaatcttcttatggggctatttcaaacaccggaatcataccagtatcttcaagtcttgactctgttggatggtttgcccgcgatccaaacaccctacgtcgtgttggccatgtactcttgcaacttccatttgccactcaacggaatccaaggcaaatcatactagctgatgactgttttcagctgttaaagatccctgtggatcggattacccaggtggtgaccaaatcagctgaaaagctttttggaagacaattgctaaagcatcagaacttggagacctattttgaaactaaagttcctagcttgaaagagttcgctaggacaaaagccattgctaacacgaaggtctcaacatcgagactactggcgaatgtgatgcagctccttcaaaggcacgagttccttcaaaatcatggggattggatcaacacagtgaagccagccattgatcctgtgattttatcacaagtgtgtgagaacccagaactaaccaatgaagagactgagaacctgaatgctatcagaaacgagactcgagtggctattggttcacttctcaaggatgatggcattctggtaattccaacattgccagctgttcctccaaaacttggtagcaaggagataacatctgaagactatcaaaaccgagcttcaagtctgcttagcattgctagcatatcaggatgttgtcaggtgactgtgccactcggacatcatgagaaatgccctatttcagtttctttcataggaagacacggtggtgaccgctttttactagatacagtgcagacaatgtatccatctttgcaagagtactcgagtattgttaccgatcccaaatcttctaaaaaggctatcaccaaagaagagtcagccgagattgccaaagagaagggtaaccaagcgttcaaagagaaactatggcagaaagctattggtctatactcagaagctataaagctaagtgacaacaatgctacctattacagtaacagagctgctgcatatcttgaacttggaggctttcttcaagccgaagaagactgtaccaaagccatcaccctcgacaagaagaatgttaaagcctatttacgaagaggaaccgcaagagaaatgttaggcgattgcaagggagccatagaagatttcagatacgcacttgtgctggaaccaaacaacaaacgagcgtctctctcagcagagagactgagaaaattccagtgagcttcttttgtccgtacctcaccgatcattgagaaaacgtttgttccttagaatttgtccaagagtataggccaattttgtc

SEQ ID NO: 102072 - protein, 589 aa, Arabidopsis thaliana
  peptide (1)..(589): Ceres Seq. ID no. 13609368
  misc_feature (10)..(441): Pfam Name: Amidase Pfam Description: Amidase
  misc_feature (1)..(589): Homolog of NCBI NO: 30684733 NR Description: chloroplast outer membrane translocon subunit, [Arabidopsis thaliana] >gi|9294499|dbj|BAB02718.1|
  misc_feature (1)..(589): Homolog of NCBI NO: 7453538 NR Description: Toc64 [Pisum sativum]
  misc_feature (2)..(587): Homolog of NCBI NO: 13937285 NR Description: chloroplast protein-translocon-like protein
  misc_feature (3)..(587): Homolog of NCBI NO: 30682691 NR Description: subunit of TOC complex -related [Arabidopsis
  misc_feature (3)..(587): Homolog of NCBI NO: 9955529 NR Description: putative subunit of TOC complex [Arabidopsis
  misc_feature (33)..(447): Homolog of NCBI NO: 18390964 NR Description: amidase [Arabidopsis thaliana] amidase [Arabidopsis thaliana] >gi|14335038|gb|AAK59783.1| [Arabidopsis thaliana] >gi|28416539|gb|AAO42800.1|
  misc_feature (32)..(368): Homolog of NCBI NO: 38344119 NR Description: OSJNBb0050O03.16 [Oryza sativa (japonica
  misc_feature (33)..(283): Homolog of NCBI NO: 25402505 NR Description: hypothetical protein [imported] - Arabidopsis >gi|2342685|gb|AAB70409.1| Contains similarity to Rhodococcus (gb|D16207). ESTs gb|T20504,gb|H36650,gb|N97423,gb|H36595 come
  misc_feature (44)..(264): Homolog of NCBI NO: 22978544 NR Description: hypothetical protein [Ralstonia metallidurans]
  misc_feature (42)..(220): Homolog of NCBI NO: 23499864 NR Description: conserved hypothetical protein [Brucella suis >gi|23463436|gb|AAN33309.1|AE014513_14 conserved hypothetical
MASQAANLWVLLGLGLAGILMLTKKLKKTVREDFGAFIDKLMLLPPPQPAPPKAPHPLTGLTFAVSDVFDITGYVTGFGHPDWVRTHEAASSTSPVVSTLVEGGATCVGKTVVDEFAFSISGENKHYDSPTNPAAPTRIPGGACSGAAVAVATNAVDFALGIDTVGGVRVPAGYCGVLGFKSSYGAISNTGIIPVSSSLDSVGWFARDPNTLRRVGHVLLQLPFATQRNPRQIILADDCFQLLKIPVDRITQVVTKSAEKLFGRQLLKHQNLETYFETKVPSLKEFARTKAIANTKVSTSRLLANVMQLLQRHEFLQNHGDWINTVKPAIDPVILSQVCENPELTNEETENLNAIRNETRVAIGSLLKDDGILVIPTLPAVPPKLGSKEITSEDYQNRASSLLSIASISGCCQVTVPLGHHEKCPISVSFIGRHGGDRFLLDTVQTMYPSLQEYSSIVTDPKSSKKAITKEESAEIAKEKGNQAFKEKLWQKAIGLYSEAIKLSDNNATYYSNRAAAYLELGGFLQAEEDCTKAITLDKKNVKAYLRRGTAREMLGDCKGAIEDFRYALVLEPNNKRASLSAERLRKFQ

SEQ ID NO: 102073 - protein, 569 aa, Arabidopsis thaliana
  peptide (1)..(569): Ceres Seq. ID no. 13609369
  misc_feature (1)..(421): Pfam Name: Amidase Pfam Description: Amidase
  misc_feature (1)..(569): Homolog of NCBI NO: 30684733 NR Description: chloroplast outer membrane translocon subunit, [Arabidopsis thaliana] >gi|9294499|dbj|BAB02718.1|
  misc_feature (1)..(569): Homolog of NCBI NO: 7453538 NR Description: Toc64 [Pisum sativum]
  misc_feature (1)..(567): Homolog of NCBI NO: 13937285 NR Description: chloroplast protein-translocon-like protein
  misc_feature (1)..(567): Homolog of NCBI NO: 30682691 NR Description: subunit of TOC complex -related [Arabidopsis
  misc_feature (1)..(567): Homolog of NCBI NO: 9955529 NR Description: putative subunit of TOC complex [Arabidopsis
  misc_feature (13)..(427): Homolog of NCBI NO: 18390964 NR Description: amidase [Arabidopsis thaliana] amidase [Arabidopsis thaliana] >gi|14335038|gb|AAK59783.1| [Arabidopsis thaliana] >gi|28416539|gb|AAO42800.1|
  misc_feature (12)..(348): Homolog of NCBI NO: 38344119 NR Description: OSJNBb0050O03.16 [Oryza sativa (japonica
  misc_feature (13)..(263): Homolog of NCBI NO: 25402505 NR Description: hypothetical protein [imported] - Arabidopsis >gi|2342685|gb|AAB70409.1| Contains similarity to Rhodococcus (gb|D16207). ESTs gb|T20504,gb|H36650,gb|N97423,gb|H36595 come
  misc_feature (24)..(244): Homolog of NCBI NO: 22978544 NR Description: hypothetical protein [Ralstonia metallidurans]
  misc_feature (22)..(200): Homolog of NCBI NO: 23499864 NR Description: conserved hypothetical protein [Brucella suis >gi|23463436|gb|AAN33309.1|AE014513_14 conserved hypothetical
MLTKKLKKTVREDFGAFIDKLMLLPPPQPAPPKAPHPLTGLTFAVSDVFDITGYVTGFGHPDWVRTHEAASSTSPVVSTLVEGGATCVGKTVVDEFAFSISGENKHYDSPTNPAAPTRIPGGACSGAAVAVATNAVDFALGIDTVGGVRVPAGYCGVLGFKSSYGAISNTGIIPVSSSLDSVGWFARDPNTLRRVGHVLLQLPFATQRNPRQIILADDCFQLLKIPVDRITQVVTKSAEKLFGRQLLKHQNLETYFETKVPSLKEFARTKAIANTKVSTSRLLANVMQLLQRHEFLQNHGDWINTVKPAIDPVILSQVCENPELTNEETENLNAIRNETRVAIGSLLKDDGILVIPTLPAVPPKLGSKEITSEDYQNRASSLLSIASISGCCQVTVPLGHHEKCPISVSFIGRHGGDRFLLDTVQTMYPSLQEYSSIVTDPKSSKKAITKEESAEIAKEKGNQAFKEKLWQKAIGLYSEAIKLSDNNATYYSNRAAAYLELGGFLQAEEDCTKAITLDKKNVKAYLRRGTAREMLGDCKGAIEDFRYALVLEPNNKRASLSAERLRKFQ

SEQ ID NO: 102074 - protein, 548 aa, Arabidopsis thaliana
  peptide (1)..(548): Ceres Seq. ID no. 13609370
  misc_feature (1)..(400): Pfam Name: Amidase Pfam Description: Amidase
  misc_feature (1)..(548): Homolog of NCBI NO: 30684733 NR Description: chloroplast outer membrane translocon subunit, [Arabidopsis thaliana] >gi|9294499|dbj|BAB02718.1|
  misc_feature (1)..(548): Homolog of NCBI NO: 7453538 NR Description: Toc64 [Pisum sativum]
  misc_feature (1)..(546): Homolog of NCBI NO: 13937285 NR Description: chloroplast protein-translocon-like protein
  misc_feature (1)..(546): Homolog of NCBI NO: 30682691 NR Description: subunit of TOC complex -related [Arabidopsis
  misc_feature (1)..(546): Homolog of NCBI NO: 9955529 NR Description: putative subunit of TOC complex [Arabidopsis
  misc_feature (1)..(406): Homolog of NCBI NO: 18390964 NR Description: amidase [Arabidopsis thaliana] amidase [Arabidopsis thaliana] >gi|14335038|gb|AAK59783.1| [Arabidopsis thaliana] >gi|28416539|gb|AAO42800.1|
  misc_feature (1)..(327): Homolog of NCBI NO: 38344119 NR Description: OSJNBb0050O03.16 [Oryza sativa (japonica
  misc_feature (1)..(242): Homolog of NCBI NO: 25402505 NR Description: hypothetical protein [imported] - Arabidopsis >gi|2342685|gb|AAB70409.1| Contains similarity to Rhodococcus (gb|D16207). ESTs gb|T20504,gb|H36650,gb|N97423,gb|H36595 come
  misc_feature (3)..(223): Homolog of NCBI NO: 22978544 NR Description: hypothetical protein [Ralstonia metallidurans]
  misc_feature (1)..(179): Homolog of NCBI NO: 23499864 NR Description: conserved hypothetical protein [Brucella suis >gi|23463436|gb|AAN33309.1|AE014513_14 conserved hypothetical
MLLPPPQPAPPKAPHPLTGLTFAVSDVFDITGYVTGFGHPDWVRTHEAASSTSPVVSTLVEGGATCVGKTVVDEFAFSISGENKHYDSPTNPAAPTRIPGGACSGAAVAVATNAVDFALGIDTVGGVRVPAGYCGVLGFKSSYGAISNTGIIPVSSSLDSVGWFARDPNTLRRVGHVLLQLPFATQRNPRQIILADDCFQLLKIPVDRITQVVTKSAEKLFGRQLLKHQNLETYFETKVPSLKEFARTKAIANTKVSTSRLLANVMQLLQRHEFLQNHGDWINTVKPAIDPVILSQVCENPELTNEETENLNAIRNETRVAIGSLLKDDGILVIPTLPAVPPKLGSKEITSEDYQNRASSLLSIASISGCCQVTVPLGHHEKCPISVSFIGRHGGDRFLLDTVQTMYPSLQEYSSIVTDPKSSKKAITKEESAEIAKEKGNQAFKEKLWQKAIGLYSEAIKLSDNNATYYSNRAAAYLELGGFLQAEEDCTKAITLDKKNVKAYLRRGTAREMLGDCKGAIEDFRYALVLEPNNKRASLSAERLRKFQ

SEQ ID NO: 102075 - DNA, 597 bp, Arabidopsis thaliana
  misc_feature (1)..(597): Ceres Seq. ID no. 13609371
  misc_feature: MA Experiment ID: 108434 Result: Down-regulated in Transcription
  misc_feature: MA Experiment 108434 PARAMETER Experiment Name: At_Root_Tips_cDNA_P Parameter: Tissue Value: Root Tips
  misc_feature: MA Experiment ID: 108435 Result: Up-regulated in Transcription
  misc_feature: MA Experiment 108435 PARAMETER Experiment Name: At_stm_Mutants_cDNA_P Parameter: Plant Line Value: wt Landsburg vs stm
  misc_feature: MA Experiment 108435 PARAMETER Experiment Name: At_stm_Mutants_cDNA_P Parameter: Tissue Value: Shoot Apical Meristem Region
  misc_feature: MA Experiment ID: 108463 Result: Up-regulated in Transcription
  misc_feature: MA Experiment 108463 PARAMETER Experiment Name: At_Germinating_Seeds_cDNA_P Parameter: Age (day) Value: 3 vs. 0
  misc_feature: MA Experiment 108463 PARAMETER Experiment Name: At_Germinating_Seeds_cDNA_P Parameter: Tissue Value: Germinating Seeds
  misc_feature: MA Experiment ID: 108473 Result: Up-regulated in Transcription
  misc_feature: MA Experiment 108473 PARAMETER Experiment Name: At_Drought_Flowers_cDNA_P Parameter: Timepoint (hr) Value: 7 d
  misc_feature: MA Experiment 108473 PARAMETER Experiment Name: At_Drought_Flowers_cDNA_P Parameter: Tissue Value: Flower
  misc_feature: MA Experiment 108473 PARAMETER Experiment Name: At_Drought_Flowers_cDNA_P Parameter: Treatment Value: Drought vs. No Drought
  misc_feature: MA Experiment ID: 108501 Result: Up-regulated in Transcription
  misc_feature: MA Experiment 108501 PARAMETER Experiment Name: At_ap2_floral_buds_cDNA_P Parameter: Plant Line Value: ap2 (Ler.)
  misc_feature: MA Experiment 108501 PARAMETER Experiment Name: At_ap2_floral_buds_cDNA_P Parameter: Tissue Value: Closed Flower
  misc_feature: MA Experiment ID: 108561 Result: Up-regulated in Transcription
  misc_feature: MA Experiment 108561 PARAMETER Experiment Name: At_100uM_ABA_cDNA_P Parameter: Timepoint (hr) Value: 6
  misc_feature: MA Experiment 108561 PARAMETER Experiment Name: At_100uM_ABA_cDNA_P Parameter: Tissue Value: Aerial
  misc_feature: MA Experiment 108561 PARAMETER Experiment Name: At_100uM_ABA_cDNA_P Parameter: Treatment Value: 100uM ABA vs. No Treatment
  misc_feature: MA Experiment ID: 108572 Result: Up-regulated in Transcription
  misc_feature: MA Experiment 108572 PARAMETER Experiment Name: At_Drought_cDNA_P Parameter: Timepoint (hr) Value: 1
  misc_feature: MA Experiment 108572 PARAMETER Experiment Name: At_Drought_cDNA_P Parameter: Tissue Value: Aerial
  misc_feature: MA Experiment 108572 PARAMETER Experiment Name: At_Drought_cDNA_P Parameter: Treatment Value: Drought vs. No Drought
  misc_feature: MA Experiment ID: 108585 Result: Up-regulated in Transcription
  misc_feature: MA Experiment 108585 PARAMETER Experiment Name: At_5mM_NaNP_cDNA_P Parameter: Timepoint (hr) Value: 6
  misc_feature: MA Experiment 108585 PARAMETER Experiment Name: At_5mM_NaNP_cDNA_P Parameter: Tissue Value: Aerial
  misc_feature: MA Experiment 108585 PARAMETER Experiment Name: At_5mM_NaNP_cDNA_P Parameter: Treatment Value: null
  misc_feature: MA Experiment ID: 108595 Result: Up-regulated in Transcription
  misc_feature: MA Experiment 108595 PARAMETER Experiment Name: At_Ler-pi_Ovule_cDNA_P Parameter: Plant Line Value: null
  misc_feature: MA Experiment ID: 108668 Result: Up-regulated in Transcription
  misc_feature: MA Experiment 108668 PARAMETER Experiment Name: At_2mM_SA_cDNA_P Parameter: Plant Line Value: WS
  misc_feature: MA Experiment 108668 PARAMETER Experiment Name: At_2mM_SA_cDNA_P Parameter: Timepoint (hr) Value: 6
  misc_feature: MA Experiment 108668 PARAMETER Experiment Name: At_2mM_SA_cDNA_P Parameter: Treatment Value: 2mM SA vs. No Treatment
  misc_feature: MA Experiment ID: 20000087 Result: Up-regulated in Transcription
  misc_feature: MA Experiment 20000087 PARAMETER Experiment Name: At_100uM_ABA_Mutants_cDNA_P Parameter: Plant Line Value: WS
  misc_feature: MA Experiment 20000087 PARAMETER Experiment Name: At_100uM_ABA_Mutants_cDNA_P Parameter: Timepoint (hr) Value: 6
  misc_feature: MA Experiment 20000087 PARAMETER Experiment Name: At_100uM_ABA_Mutants_cDNA_P Parameter: Tissue Value: Aerial
  misc_feature: MA Experiment 20000087 PARAMETER Experiment Name: At_100uM_ABA_Mutants_cDNA_P Parameter: Treatment Value: 100uM ABA vs. No Treatment
  misc_feature: MA Experiment ID: 20000093 Result: Down-regulated in Transcription
  misc_feature: MA Experiment 20000093 PARAMETER Experiment Name: At_42deg_Heat_cDNA_P Parameter: Temperature (deg C) Value: 42 vs. 22
  misc_feature: MA Experiment 20000093 PARAMETER Experiment Name: At_42deg_Heat_cDNA_P Parameter: Timepoint (hr) Value: 0.5
  misc_feature: MA Experiment 20000093 PARAMETER Experiment Name: At_42deg_Heat_cDNA_P Parameter: Tissue Value: Aerial
  misc_feature: MA Experiment ID: 20000185 Result: Up-regulated in Transcription
  misc_feature: MA Experiment 20000185 PARAMETER Experiment Name: At_Roots__P Parameter: Age (day) Value: 7 vs. 21
  misc_feature: MA Experiment 20000185 PARAMETER Experiment Name: At_Roots__P Parameter: Organism Value: A. thaliana
  misc_feature: MA Experiment 20000185 PARAMETER Experiment Name: At_Roots__P Parameter: Tissue Value: Roots vs. Whole Plant
  misc_feature: MA Experiment ID: 20000264 Result: Up-regulated in Transcription
  misc_feature: MA Experiment 20000264 PARAMETER Experiment Name: At_Open_Flower_P Parameter: Age (day) Value: 21
  misc_feature: MA Experiment 20000264 PARAMETER Experiment Name: At_Open_Flower_P Parameter: Plant Line Value: WS
  misc_feature: MA Experiment 20000264 PARAMETER Experiment Name: At_Open_Flower_P Parameter: Tissue Value: Open Flower vs. Whole Plant
  misc_feature: MA Experiment ID: 20000436 Result: Up-regulated in Transcription
  misc_feature: MA Experiment 20000436 PARAMETER Experiment Name: At_Drought_P Parameter: Age (day) Value: 7
  misc_feature: MA Experiment 20000436 PARAMETER Experiment Name: At_Drought_P Parameter: Organism Value: A. thaliana
  misc_feature: MA Experiment 20000436 PARAMETER Experiment Name: At_Drought_P Parameter: Plant Line Value: WS
  misc_feature: MA Experiment 20000436 PARAMETER Experiment Name: At_Drought_P Parameter: Timepoint (hr) Value: 12
  misc_feature: MA Experiment 20000436 PARAMETER Experiment Name: At_Drought_P Parameter: Tissue Value: Whole Plant
  misc_feature: MA Experiment 20000436 PARAMETER Experiment Name: At_Drought_P Parameter: Treatment Value: Drought vs. No Drought
  misc_feature: MA Experiment ID: 20000439 Result: Up-regulated in Transcription
  misc_feature: MA Experiment 20000439 PARAMETER Experiment Name: At_Roots__P Parameter: Age (day) Value: 14 vs. 21
  misc_feature: MA Experiment 20000439 PARAMETER Experiment Name: At_Roots__P Parameter: Organism Value: A. thaliana
  misc_feature: MA Experiment 20000439 PARAMETER Experiment Name: At_Roots__P Parameter: Tissue Value: Roots vs. Whole Plant
  misc_feature: MA Experiment ID: 20000453 Result: Up-regulated in Transcription
  misc_feature: MA Experiment 20000453 PARAMETER Experiment Name: At_100uM_ABA_P Parameter: Age (day) Value: 15
  misc_feature: MA Experiment 20000453 PARAMETER Experiment Name: At_100uM_ABA_P Parameter: Organism Value: A. thaliana
  misc_feature: MA Experiment 20000453 PARAMETER Experiment Name: At_100uM_ABA_P Parameter: Plant Line Value: WS
  misc_feature: MA Experiment 20000453 PARAMETER Experiment Name: At_100uM_ABA_P Parameter: Timepoint (hr) Value: 24
  misc_feature: MA Experiment 20000453 PARAMETER Experiment Name: At_100uM_ABA_P Parameter: Tissue Value: Aerial
  misc_feature: MA Experiment 20000453 PARAMETER Experiment Name: At_100uM_ABA_P Parameter: Treatment Value: 100uM ABA vs. No Treatment
  misc_feature: MA Experiment ID: 20000495 Result: Up-regulated in Transcription
  misc_feature: MA Experiment 20000495 PARAMETER Experiment Name: At_Guard_Cells_P Parameter: Harvest Date Value: 8/2/2002
  misc_feature: MA Experiment 20000495 PARAMETER Experiment Name: At_Guard_Cells_P Parameter: Organism Value: A. thaliana
  misc_feature: MA Experiment 20000495 PARAMETER Experiment Name: At_Guard_Cells_P Parameter: Tissue Value: Guard Cells vs. Leaves
  misc_feature: MA Experiment ID: 20001554 Result: Up-regulated in Transcription
  misc_feature: MA Experiment 20001554 PARAMETER Experiment Name: At_Drought_Soil_Dry_P Parameter: Age (day) Value: 21
  misc_feature: MA Experiment 20001554 PARAMETER Experiment Name: At_Drought_Soil_Dry_P Parameter: Organism Value: A. thaliana
  misc_feature: MA Experiment 20001554 PARAMETER Experiment Name: At_Drought_Soil_Dry_P Parameter: Plant Line Value: WS
  misc_feature: MA Experiment 20001554 PARAMETER Experiment Name: At_Drought_Soil_Dry_P Parameter: Post Timepoint (hr) Value: None
  misc_feature: MA Experiment 20001554 PARAMETER Experiment Name: At_Drought_Soil_Dry_P Parameter: Post-Treatment Value: None
  misc_feature: MA Experiment 20001554 PARAMETER Experiment Name: At_Drought_Soil_Dry_P Parameter: Timepoint (day) Value: 7
  misc_feature: MA Experiment 20001554 PARAMETER Experiment Name: At_Drought_Soil_Dry_P Parameter: Treatment Value: Drought vs. No Drought
  misc_feature: MA Experiment ID: 20001555 Result: Up-regulated in Transcription
  misc_feature: MA Experiment 20001555 PARAMETER Experiment Name: At_Drought_Soil_Dry_P Parameter: Age (day) Value: 24
  misc_feature: MA Experiment 20001555 PARAMETER Experiment Name: At_Drought_Soil_Dry_P Parameter: Organism Value: A. thaliana
  misc_feature: MA Experiment 20001555 PARAMETER Experiment Name: At_Drought_Soil_Dry_P Parameter: Plant Line Value: WS
  misc_feature: MA Experiment 20001555 PARAMETER Experiment Name: At_Drought_Soil_Dry_P Parameter: Post Timepoint (hr) Value: None
  misc_feature: MA Experiment 20001555 PARAMETER Experiment Name: At_Drought_Soil_Dry_P Parameter: Post-Treatment Value: None
  misc_feature: MA Experiment 20001555 PARAMETER Experiment Name: At_Drought_Soil_Dry_P Parameter: Timepoint (day) Value: 10
  misc_feature: MA Experiment 20001555 PARAMETER Experiment Name: At_Drought_Soil_Dry_P Parameter: Treatment Value: Drought vs. No Drought
  misc_feature: MA Experiment ID: 20001560 Result: Up-regulated in Transcription
  misc_feature: MA Experiment 20001560 PARAMETER Experiment Name: At_Drought_Soil_Dry_P Parameter: Age (day) Value: 28
  misc_feature: MA Experiment 20001560 PARAMETER Experiment Name: At_Drought_Soil_Dry_P Parameter: Organism Value: A. thaliana
  misc_feature: MA Experiment 20001560 PARAMETER Experiment Name: At_Drought_Soil_Dry_P Parameter: Plant Line Value: WS
  misc_feature: MA Experiment 20001560 PARAMETER Experiment Name: At_Drought_Soil_Dry_P Parameter: Post Timepoint (hr) Value: None
  misc_feature: MA Experiment 20001560 PARAMETER Experiment Name: At_Drought_Soil_Dry_P Parameter: Post-Treatment Value: None
  misc_feature: MA Experiment 20001560 PARAMETER Experiment Name: At_Drought_Soil_Dry_P Parameter: Timepoint (day) Value: 14
  misc_feature: MA Experiment 20001560 PARAMETER Experiment Name: At_Drought_Soil_Dry_P Parameter: Treatment Value: Drought vs. No Drought
  misc_feature: MA Experiment ID: 20001904 Result: Up-regulated in Transcription
  misc_feature: MA Experiment 20001904 PARAMETER Experiment Name: At_Drought_Reproduction_P Parameter: Age (day) Value: 37
  misc_feature: MA Experiment 20001904 PARAMETER Experiment Name: At_Drought_Reproduction_P Parameter: Organism Value: A. thaliana
  misc_feature: MA Experiment 20001904 PARAMETER Experiment Name: At_Drought_Reproduction_P Parameter: Plant Line Value: WS
  misc_feature: MA Experiment 20001904 PARAMETER Experiment Name: At_Drought_Reproduction_P Parameter: Timepoint (day) Value: 7
  misc_feature: MA Experiment 20001904 PARAMETER Experiment Name: At_Drought_Reproduction_P Parameter: Tissue Value: Rosettes
  misc_feature: MA Experiment 20001904 PARAMETER Experiment Name: At_Drought_Reproduction_P Parameter: Treatment Value: Drought vs. No Drought
  misc_feature: MA Experiment ID: 20001905 Result: Up-regulated in Transcription
  misc_feature: MA Experiment 20001905 PARAMETER Experiment Name: At_Drought_Reproduction_P Parameter: Age (day) Value: 40
  misc_feature: MA Experiment 20001905 PARAMETER Experiment Name: At_Drought_Reproduction_P Parameter: Organism Value: A. thaliana
  misc_feature: MA Experiment 20001905 PARAMETER Experiment Name: At_Drought_Reproduction_P Parameter: Plant Line Value: WS
  misc_feature: MA Experiment 20001905 PARAMETER Experiment Name: At_Drought_Reproduction_P Parameter: Timepoint (day) Value: 10
  misc_feature: MA Experiment 20001905 PARAMETER Experiment Name: At_Drought_Reproduction_P Parameter: Tissue Value: Rosettes
  misc_feature: MA Experiment 20001905 PARAMETER Experiment Name: At_Drought_Reproduction_P Parameter: Treatment Value: Drought vs. No Drought
  misc_feature: MA Experiment ID: 20001910 Result: Up-regulated in Transcription
  misc_feature: MA Experiment 20001910 PARAMETER Experiment Name: At_Drought_Reproduction_P Parameter: Age (day) Value: 37
  misc_feature: MA Experiment 20001910 PARAMETER Experiment Name: At_Drought_Reproduction_P Parameter: Organism Value: A. thaliana
  misc_feature: MA Experiment 20001910 PARAMETER Experiment Name: At_Drought_Reproduction_P Parameter: Plant Line Value: WS
  misc_feature: MA Experiment 20001910 PARAMETER Experiment Name: At_Drought_Reproduction_P Parameter: Timepoint (day) Value: 7
  misc_feature: MA Experiment 20001910 PARAMETER Experiment Name: At_Drought_Reproduction_P Parameter: Tissue Value: Flowers
  misc_feature: MA Experiment 20001910 PARAMETER Experiment Name: At_Drought_Reproduction_P Parameter: Treatment Value: Drought vs. No Drought
  misc_feature: MA Experiment ID: 20001911 Result: Up-regulated in Transcription
  misc_feature: MA Experiment 20001911 PARAMETER Experiment Name: At_Drought_Reproduction_P Parameter: Age (day) Value: 40
  misc_feature: MA Experiment 20001911 PARAMETER Experiment Name: At_Drought_Reproduction_P Parameter: Organism Value: A. thaliana
  misc_feature: MA Experiment 20001911 PARAMETER Experiment Name: At_Drought_Reproduction_P Parameter: Plant Line Value: WS
  misc_feature: MA Experiment 20001911 PARAMETER Experiment Name: At_Drought_Reproduction_P Parameter: Timepoint (day) Value: 10
  misc_feature: MA Experiment 20001911 PARAMETER Experiment Name: At_Drought_Reproduction_P Parameter: Tissue Value: Flowers
  misc_feature: MA Experiment 20001911 PARAMETER Experiment Name: At_Drought_Reproduction_P Parameter: Treatment Value: Drought vs. No Drought
acaccaaaaacacatttctataaactcagaaacaaacaaaagatcaagaagaaacatggtgatgatcaagaccacaatggtttccctttttgctctagcggcggttctcctaatgattctagccccggcggcagaagccgtgacgtgctcgccaatgcagctaagcccatgtgcaacggcgataacgtcgtcttctccaccatcggctttgtgctgtgcaaagctgaaggagcagaggccatgcttatgtggttacatgagaaaccctagcctccgtcgcttcgtcagcactcccaacgctcgtaaagtctctaaaagttgcaaactccccatcccaaggtgttaaaaagtcagaaaagtgtttgctgtttatgatcatcctatatatgtttgaatcctacttttggtgtgtgtttaaggatgtttatttatgaccactataagtagtagagttaaataagtaagtggtactcttggtgatgctttgtatgcatcttatttaaatttttgctatcttattctggttgttgttgatatatatatatatacatgatggtgtaataactgagatgatataatatatgaaaattatatttc

SEQ ID NO: 102076 - protein, 114 aa, Arabidopsis thaliana
  peptide (1)..(114): Ceres Seq. ID no. 13609372
  misc_feature (49)..(114): Pfam Name: Protease inhibitor/seed storage/LTP family Pfam Description: Protease inhibitor/seed storage/LTP family
  misc_feature (19)..(114): Homolog of NCBI NO: 15229614 NR Description: protease inhibitor/seed storage/lipid transfer (LTP) family [Arabidopsis thaliana] >gi|9279661|dbj|BAB01177.1| transfer protein [Arabidopsis thaliana]
  misc_feature (21)..(114): Homolog of NCBI NO: 18402345 NR Description: protease inhibitor/seed storage/lipid transfer (LTP) family [Arabidopsis thaliana] >gi|15028045|gb|AAK76553.1| lipid transfer protein [Arabidopsis thaliana]
  misc_feature (21)..(114): Homolog of NCBI NO: 543565 NR Description: hypothetical 10.0K protein - Zinnia elegans TED4 [Zinnia elegans] >gi|641903|gb|AAB06586.1| putative
  misc_feature (21)..(114): Homolog of NCBI NO: 543650 NR Description: P48h-10 protein precursor - Zinnia elegans (cv.
  misc_feature (21)..(114): Homolog of NCBI NO: 12597812 NR Description: lipid transfer protein, putative [Arabidopsis
  misc_feature (19)..(114): Homolog of NCBI NO: 7489428 NR Description: probable lipid transfer protein - barley
  misc_feature (22)..(114): Homolog of NCBI NO: 24745959 NR Description: putative lipid transfer protein [Solanum
  misc_feature (28)..(114): Homolog of NCBI NO: 498036 NR Description: lipid transfer protein
  misc_feature (47)..(114): Homolog of NCBI NO: 14423789 NR Description: NONSPECIFIC LIPID-TRANSFER PROTEIN 2 (LTP 2)
  misc_feature (22)..(114): Homolog of NCBI NO: 3183088 NR Description: Probable nonspecific lipid-transfer protein AKCS9
HQKHISINSETNKRSRRNMVMIKTTMVSLFALAAVLLMILAPAAEAVTCSPMQLSPCATAITSSSPPSALCCAKLKEQRPCLCGYMRNPSLRRFVSTPNARKVSKSCKLPIPRC

SEQ ID NO: 102077 - protein, 96 aa, Arabidopsis thaliana; identical to SEQ ID NO: 20537
  peptide (1)..(96): Ceres Seq. ID no. 13609373
  misc_feature (31)..(96): Pfam Name: Protease inhibitor/seed storage/LTP family Pfam Description: Protease inhibitor/seed storage/LTP family
  misc_feature (1)..(96): Homolog of NCBI NO: 15229614 NR Description: protease inhibitor/seed storage/lipid transfer (LTP) family [Arabidopsis thaliana] >gi|9279661|dbj|BAB01177.1| transfer protein [Arabidopsis thaliana]
  misc_feature (3)..(96): Homolog of NCBI NO: 18402345 NR Description: protease inhibitor/seed storage/lipid transfer (LTP) family [Arabidopsis thaliana] >gi|15028045|gb|AAK76553.1| lipid transfer protein [Arabidopsis thaliana]
  misc_feature (3)..(96): Homolog of NCBI NO: 543565 NR Description: hypothetical 10.0K protein - Zinnia elegans TED4 [Zinnia elegans] >gi|641903|gb|AAB06586.1| putative
  misc_feature (3)..(96): Homolog of NCBI NO: 543650 NR Description: P48h-10 protein precursor - Zinnia elegans (cv.
  misc_feature (3)..(96): Homolog of NCBI NO: 12597812 NR Description: lipid transfer protein, putative [Arabidopsis
  misc_feature (1)..(96): Homolog of NCBI NO: 7489428 NR Description: probable lipid transfer protein - barley
  misc_feature (4)..(96): Homolog of NCBI NO: 24745959 NR Description: putative lipid transfer protein [Solanum
  misc_feature (10)..(96): Homolog of NCBI NO: 498036 NR Description: lipid transfer protein
  misc_feature (29)..(96): Homolog of NCBI NO: 14423789 NR Description: NONSPECIFIC LIPID-TRANSFER PROTEIN 2 (LTP 2)
  misc_feature (4)..(96): Homolog of NCBI NO: 3183088 NR Description: Probable nonspecific lipid-transfer protein AKCS9

SEQ ID NO: 102078 - protein, 94 aa, Arabidopsis thaliana; identical to SEQ ID NO: 20538
  peptide (1)..(94): Ceres Seq. ID no. 13609374
  misc_feature (29)..(94): Pfam Name: Protease inhibitor/seed storage/LTP family Pfam Description: Protease inhibitor/seed storage/LTP family
  misc_feature (1)..(94): Homolog of NCBI NO: 15229614 NR Description: protease inhibitor/seed storage/lipid transfer (LTP) family [Arabidopsis thaliana] >gi|9279661|dbj|BAB01177.1| transfer protein [Arabidopsis thaliana]
  misc_feature (1)..(94): Homolog of NCBI NO: 18402345 NR Description: protease inhibitor/seed storage/lipid transfer (LTP) family [Arabidopsis thaliana] >gi|15028045|gb|AAK76553.1| lipid transfer protein [Arabidopsis thaliana]
  misc_feature (1)..(94): Homolog of NCBI NO: 543565 NR Description: hypothetical 10.0K protein - Zinnia elegans TED4 [Zinnia elegans] >gi|641903|gb|AAB06586.1| putative
  misc_feature (1)..(94): Homolog of NCBI NO: 543650 NR Description: P48h-10 protein precursor - Zinnia elegans (cv.
  misc_feature (1)..(94): Homolog of NCBI NO: 12597812 NR Description: lipid transfer protein, putative [Arabidopsis
  misc_feature (1)..(94): Homolog of NCBI NO: 7489428 NR Description: probable lipid transfer protein - barley
  misc_feature (2)..(94): Homolog of NCBI NO: 24745959 NR Description: putative lipid transfer protein [Solanum
  misc_feature (8)..(94): Homolog of NCBI NO: 498036 NR Description: lipid transfer protein
  misc_feature (27)..(94): Homolog of NCBI NO: 14423789 NR Description: NONSPECIFIC LIPID-TRANSFER PROTEIN 2 (LTP 2)
  misc_feature (2)..(94): Homolog of NCBI NO: 3183088 NR Description: Probable nonspecific lipid-transfer protein AKCS9

SEQ ID NO: 102079 - protein, 89 aa, Arabidopsis thaliana
  peptide (1)..(89): Ceres Seq. ID no. 13609375
TPKTHFYKLRNKQKIKKKHGDDQDHNGFPFCSSGGSPNDSSPGGRSRDVLANAAKPMCNGDNVVFSTIGFVLCKAEGAEAMLMWLHEKP

SEQ ID NO: 102080 - DNA, 1189 bp, Arabidopsis thaliana
  misc_feature (1)..(1189): Ceres Seq. ID no. 13609404
  misc_feature: MA Experiment ID: 108595 Result: Down-regulated in Transcription
  misc_feature: MA Experiment 108595 PARAMETER Experiment Name: At_Ler-pi_Ovule_cDNA_P Parameter: Plant Line Value: null
  misc_feature: MA Experiment ID: 20000185 Result: Down-regulated in Transcription
  misc_feature: MA Experiment 20000185 PARAMETER Experiment Name: At_Roots__P Parameter: Age (day) Value: 7 vs. 21
  misc_feature: MA Experiment 20000185 PARAMETER Experiment Name: At_Roots__P Parameter: Organism Value: A. thaliana
  misc_feature: MA Experiment 20000185 PARAMETER Experiment Name: At_Roots__P Parameter: Tissue Value: Roots vs. Whole Plant
  misc_feature: MA Experiment ID: 20000439 Result: Down-regulated in Transcription
  misc_feature: MA Experiment 20000439 PARAMETER Experiment Name: At_Roots__P Parameter: Age (day) Value: 14 vs. 21
  misc_feature: MA Experiment 20000439 PARAMETER Experiment Name: At_Roots__P Parameter: Organism Value: A. thaliana
  misc_feature: MA Experiment 20000439 PARAMETER Experiment Name: At_Roots__P Parameter: Tissue Value: Roots vs. Whole Plant
  misc_feature: MA Experiment ID: 20000495 Result: Down-regulated in Transcription
  misc_feature: MA Experiment 20000495 PARAMETER Experiment Name: At_Guard_Cells_P Parameter: Harvest Date Value: 8/2/2002
  misc_feature: MA Experiment 20000495 PARAMETER Experiment Name: At_Guard_Cells_P Parameter: Organism Value: A. thaliana
  misc_feature: MA Experiment 20000495 PARAMETER Experiment Name: At_Guard_Cells_P Parameter: Tissue Value: Guard Cells vs. Leaves
  misc_feature: MA Experiment ID: 20001557 Result: Down-regulated in Transcription
  misc_feature: MA Experiment 20001557 PARAMETER Experiment Name: At_Drought_Soil_Dry_P Parameter: Age (day) Value: 27
  misc_feature: MA Experiment 20001557 PARAMETER Experiment Name: At_Drought_Soil_Dry_P Parameter: Organism Value: A. thaliana
  misc_feature: MA Experiment 20001557 PARAMETER Experiment Name: At_Drought_Soil_Dry_P Parameter: Plant Line Value: WS
  misc_feature: MA Experiment 20001557 PARAMETER Experiment Name: At_Drought_Soil_Dry_P Parameter: Post Timepoint (hr) Value: 3
  misc_feature: MA Experiment 20001557 PARAMETER Experiment Name: At_Drought_Soil_Dry_P Parameter: Post-Treatment Value: Re-Water vs. No Drought
  misc_feature: MA Experiment 20001557 PARAMETER Experiment Name: At_Drought_Soil_Dry_P Parameter: Timepoint (day) Value: 13
  misc_feature: MA Experiment 20001557 PARAMETER Experiment Name: At_Drought_Soil_Dry_P Parameter: Treatment Value: Drought vs. No Drought
  misc_feature: MA Experiment ID: 20001558 Result: Down-regulated in Transcription
  misc_feature: MA Experiment 20001558 PARAMETER Experiment Name: At_Drought_Soil_Dry_P Parameter: Age (day) Value: 27
  misc_feature: MA Experiment 20001558 PARAMETER Experiment Name: At_Drought_Soil_Dry_P Parameter: Organism Value: A. thaliana
  misc_feature: MA Experiment 20001558 PARAMETER Experiment Name: At_Drought_Soil_Dry_P Parameter: Plant Line Value: WS
  misc_feature: MA Experiment 20001558 PARAMETER Experiment Name: At_Drought_Soil_Dry_P Parameter: Post Timepoint (hr) Value: 6
  misc_feature: MA Experiment 20001558 PARAMETER Experiment Name: At_Drought_Soil_Dry_P Parameter: Post-Treatment Value: Re-Water vs. No Drought
  misc_feature: MA Experiment 20001558 PARAMETER Experiment Name: At_Drought_Soil_Dry_P Parameter: Timepoint (day) Value: 13
  misc_feature: MA Experiment 20001558 PARAMETER Experiment Name: At_Drought_Soil_Dry_P Parameter: Treatment Value: Drought vs. No Drought
gagcttctgtaatggctacttggagtggtttcaacgtctcttcttctccgttgcttaggcttcggtcttcctccgtctcaaatgtcactaagcttccgtttctctctcctatttgccggcgtcggttactggcagaacgctttggtctcgcaactgtcgttgttacgcgccaaaacctcacggttactccgtcgtctgcggcggtggaagctcgtatctcagggaaaagagaacctatgacgcctccgtataacatattgatcactggctcaaccaaaggtataggatatgcattagctagagagtttctgaaagcaggcgacaatgttgtgatttgctctagatcagctgaacgagttgagactgctgttcagagtcttaaggaagaatttggggagcatgtgtggggaactaagtgtgatgttacggaagggaaggatgtgagggaacttgtagcttatagtcagaagaatcttaaatacattgacatttggataaataatgcgggatctaatgcatatagctttaaacctttggcagaggcctcagatgaggatcttattgaagttgtgaaaaccaacactctaggtctcatgttatgttgccgagaggcaatgaatatgatgttgacccaatctcgaggtggtcatatcttcaatattgatggagctggttcagatgggagaccaacacccagatttgctgcatatggtgcaactaaacggagtgtcgttcacctgacaaagtcattacaggcagagttgcagatgcaagatgtcaaaaatgtcgtggtgcataatctatcgcctggaatggtcacaactgatctgctcatgtccggagcaactacaaaacaagccaagttcttcattaatgttttggcagagccagccgaagtggtggctgagtaccttgtcccaaacataagggcaataccggctagcggatctatgaagccgacttacatccgtttcctaactggaatcaaagcctacaccaaaatattctcaagagttgcgttgggagcaaggaagaacaggtatgttactgaagagtaggtgtcaaactaagtattagaattgtattgctttctcagtttgttcaatggtaaataaaaacctctacattttgttcatgacaactccaaaacatgcaatctattgtacaatttggatttaagctcatttgc

SEQ ID NO: 102081 - protein, 351 aa, Arabidopsis thaliana; identical to SEQ ID NO: 29410
  peptide (1)..(351): Ceres Seq. ID no. 13609405
  misc_feature (4)..(351): Homolog of NCBI NO: 18414726 NR Description: short-chain dehydrogenase/reductase family [Arabidopsis thaliana] >gi|21553369|gb|AAM62462.1| unknown
  misc_feature (4)..(336): Homolog of NCBI NO: 10178029 NR Description: gene_id:MUG13.25~pir||T07705~similar to unknown
  misc_feature (17)..(351): Homolog of NCBI NO: 29244639 NR Description: putative oxidoreductase protein [Oryza sativa
  misc_feature (82)..(315): Homolog of NCBI NO: 18413962 NR Description: short-chain dehydrogenase/reductase family [Arabidopsis thaliana] >gi|16323186|gb|AAL15327.1|
  misc_feature (79)..(351): Homolog of NCBI NO: 21673969 NR Description: oxidoreductase, short-chain
  misc_feature (86)..(351): Homolog of NCBI NO: 34904226 NR Description: P0443E07.30 [Oryza sativa (japonica
  misc_feature (117)..(315): Homolog of NCBI NO: 7485669 NR Description: hypothetical protein F17N18.140 - Arabidopsis >gi|4753659|emb|CAB41935.1| putative protein [Arabidopsis >gi|7268027|emb|CAB78367.1| putative protein [Arabidopsis
  misc_feature (86)..(305): Homolog of NCBI NO: 21674585 NR Description: oxidoreductase, short-chain
  misc_feature (86)..(276): Homolog of NCBI NO: 118571 NR Description: Granaticin polyketide synthase putative ketoacyl
  misc_feature (85)..(310): Homolog of NCBI NO: 37526146 NR Description: hypothetical protein [Photorhabdus luminescens laumondii TTO1] >gi|36785576|emb|CAE14526.1| unnamed protein

SEQ ID NO: 102082 - protein, 348 aa, Arabidopsis thaliana; identical to SEQ ID NO: 29411
  peptide (1)..(348): Ceres Seq. ID no. 13609406
  misc_feature (1)..(348): Homolog of NCBI NO: 18414726 NR Description: short-chain dehydrogenase/reductase family [Arabidopsis thaliana] >gi|21553369|gb|AAM62462.1| unknown
  misc_feature (1)..(333): Homolog of NCBI NO: 10178029 NR Description: gene_id:MUG13.25~pir||T07705~similar to unknown
  misc_feature (14)..(348): Homolog of NCBI NO: 29244639 NR Description: putative oxidoreductase protein [Oryza sativa
  misc_feature (79)..(312): Homolog of NCBI NO: 18413962 NR Description: short-chain dehydrogenase/reductase family [Arabidopsis thaliana] >gi|16323186|gb|AAL15327.1|
  misc_feature (76)..(348): Homolog of NCBI NO: 21673969 NR Description: oxidoreductase, short-chain
  misc_feature (83)..(348): Homolog of NCBI NO: 34904226 NR Description: P0443E07.30 [Oryza sativa (japonica
  misc_feature (114)..(312): Homolog of NCBI NO: 7485669 NR Description: hypothetical protein F17N18.140 - Arabidopsis >gi|4753659|emb|CAB41935.1| putative protein [Arabidopsis >gi|7268027|emb|CAB78367.1| putative protein [Arabidopsis
  misc_feature (83)..(302): Homolog of NCBI NO: 21674585 NR Description: oxidoreductase, short-chain
  misc_feature (83)..(273): Homolog of NCBI NO: 118571 NR Description: Granaticin polyketide synthase putative ketoacyl
  misc_feature (82)..(307): Homolog of NCBI NO: 37526146 NR Description: hypothetical protein [Photorhabdus luminescens laumondii TTO1] >gi|36785576|emb|CAE14526.1| unnamed protein

SEQ ID NO: 102083 - protein, 273 aa, Arabidopsis thaliana; identical to SEQ ID NO: 29412
  peptide (1)..(273): Ceres Seq. ID no. 13609407
  misc_feature (1)..(273): Homolog of NCBI NO: 18414726 NR Description: short-chain dehydrogenase/reductase family [Arabidopsis thaliana] >gi|21553369|gb|AAM62462.1| unknown
  misc_feature (1)..(258): Homolog of NCBI NO: 10178029 NR Description: gene_id:MUG13.25~pir||T07705~similar to unknown
  misc_feature (1)..(273): Homolog of NCBI NO: 29244639 NR Description: putative oxidoreductase protein [Oryza sativa
  misc_feature (4)..(237): Homolog of NCBI NO: 18413962 NR Description: short-chain dehydrogenase/reductase family [Arabidopsis thaliana] >gi|16323186|gb|AAL15327.1|
  misc_feature (1)..(273): Homolog of NCBI NO: 21673969 NR Description: oxidoreductase, short-chain
  misc_feature (8)..(273): Homolog of NCBI NO: 34904226 NR Description: P0443E07.30 [Oryza sativa (japonica
  misc_feature (39)..(237): Homolog of NCBI NO: 7485669 NR Description: hypothetical protein F17N18.140 - Arabidopsis >gi|4753659|emb|CAB41935.1| putative protein [Arabidopsis >gi|7268027|emb|CAB78367.1| putative protein [Arabidopsis
  misc_feature (8)..(227): Homolog of NCBI NO: 21674585 NR Description: oxidoreductase, short-chain
  misc_feature (8)..(198): Homolog of NCBI NO: 118571 NR Description: Granaticin polyketide synthase putative ketoacyl
  misc_feature (7)..(232): Homolog of NCBI NO: 37526146 NR Description: hypothetical protein [Photorhabdus luminescens laumondii TTO1] >gi|36785576|emb|CAE14526.1| unnamed protein

SEQ ID NO: 102084 - DNA, 1590 bp, Arabidopsis thaliana
  misc_feature (1)..(1590): Ceres Seq. ID no. 13609408
atgcttgactccaccccaatgctcgcgtttattataggtttgcttcttcttgcattaactatgaagcgtaaggagaagaagaaaaccatgttaattagccctacgagaaacctctctctccctcccgggccgaaatcttggcctttaatcggaaacctaccggaaatactagggaggaacaaaccggtgttccggtggatacattctctcatgaaagaactcaacaccgatattgcatgtatccgtcttgcgaatactcacgtgatccccgtgacatccccgagaattgcaagagagattctgaagaagcaagactccgttttcgccactagaccgctaacgatgggcacggagtactgcagccgcgggtacttgaccgttgcggtggagccacaaggagagcagtggaagaagatgaggagagtggtggcatctcacgtgacgagcaagaagagcttccaaatgatgctacaaaagagaaccgaagaggctgataacttagtccggtacatcaataaccgtagtgtcaaaaaccgtggtaatgcttttgtggttattgatttaaggcttgcggtacggcaatacagtggaaatgtagctcggaagatgatgtttggtataaggcattttggtaaaggaagtgaagatggatcgggaccagggttggaagagattgaacatgtggaatctttgtttacggttttaacccatctttacgcctttgcattgtcagattatgtcccgtggctaaggttcttggacttggaaggccatgagaaggttgtgagtaacgcaatgagaaatgtaagtaagtataacgacccttttgttgatgaaagactcatgcaatggcgaaatgggaagatgaaagaacctcaagattttcttgacatgtttataatagctaaagacactgacgggaagcctactctgtcggacgaagagatcaaagcacaagtgacggaactaatgttggcgacggttgataatccgtctaacgcggcagagtggggtatggcggagatgattaacgagccgagcatcatgcaaaaagccgtggaagagattgatagggtagttggaaaagaccgtcttgtcattgagtctgatctcccaaatcttaactatgtgaaggcttgtgtgaaagaagcattccggttacaccccgtggcaccgttcaacctccctcacatgtccaccactgatactgtggtagacggttatttcatccccaagggaagccacgtattgattagtcgtatggggattgggagaaatcctagtgtgtgggacaagccgcataagttcgaccctgagagacatttgagcactaacacatgtgtggatctaaacgagtctgatctgaatataatatcgttcagtgcaggacgaagaggttgtatgggtgtggacattgggtcagccatgacgtacatgttactggctcggttgattcaaggattcacgtggttaccagtgcctggtaagaataagattgatatttcagaaagcaagaatgatctttttatggcaaaaccattatacgcggttgccacacctcgtttagctccacatgtgtatccaacctaa

SEQ ID NO: 102085 - protein, 529 aa, Arabidopsis thaliana
  peptide (1)..(529): Ceres Seq. ID no. 13609409
  misc_feature (1)..(529): Homolog of NCBI NO: 13878375 NR Description: Cytochrome P450 79A2 >gi|10176738|dbj|BAB09969.1|
  misc_feature (7)..(529): Homolog of NCBI NO: 18414836 NR Description: cytochrome P450 CYP79A2 [Arabidopsis thaliana]
  misc_feature (3)..(446): Homolog of NCBI NO: 22327385 NR Description: cytochrome P450, putative [Arabidopsis thaliana]
  misc_feature (474)..(529): Homolog of NCBI NO: 22327385 NR Description: cytochrome P450, putative [Arabidopsis thaliana]
  misc_feature (7)..(529): Homolog of NCBI NO: 5915822 NR Description: CYTOCHROME P450 79A1 (CYTOCHROME P450TYR)
  misc_feature (11)..(529): Homolog of NCBI NO: 6739530 NR Description: N-hydroxylating cytochrome P450 [Manihot
  misc_feature (4)..(529): Homolog of NCBI NO: 6739527 NR Description: N-hydroxylating cytochrome P450 [Manihot
  misc_feature (17)..(529): Homolog of NCBI NO: 15236088 NR Description: cytochrome P450 79B2 [Arabidopsis thaliana]
  misc_feature (28)..(529): Homolog of NCBI NO: 25991347 NR Description: cytochrome P450 [Brassica napus]
  misc_feature (2)..(521): Homolog of NCBI NO: 7672519 NR Description: cytochrome P450 CYP79E1 [Triglochin maritimum]
MLDSTPMLAFIIGLLLLALTMKRKEKKKTMLISPTRNLSLPPGPKSWPLIGNLPEILGRNKPVFRWIHSLMKELNTDIACIRLANTHVIPVTSPRIAREILKKQDSVFATRPLTMGTEYCSRGYLTVAVEPQGEQWKKMRRVVASHVTSKKSFQMMLQKRTEEADNLVRYINNRSVKNRGNAFVVIDLRLAVRQYSGNVARKMMFGIRHFGKGSEDGSGPGLEEIEHVESLFTVLTHLYAFALSDYVPWLRFLDLEGHEKVVSNAMRNVSKYNDPFVDERLMQWRNGKMKEPQDFLDMFIIAKDTDGKPTLSDEEIKAQVTELMLATVDNPSNAAEWGMAEMINEPSIMQKAVEEIDRVVGKDRLVIESDLPNLNYVKACVKEAFRLHPVAPFNLPHMSTTDTVVDGYFIPKGSHVLISRMGIGRNPSVWDKPHKFDPERHLSTNTCVDLNESDLNIISFSAGRRGCMGVDIGSAMTYMLLARLIQGFTWLPVPGKNKIDISESKNDLFMAKPLYAVATPRLAPHVYPT

SEQ ID NO: 102086 - protein, 523 aa, Arabidopsis thaliana; identical to SEQ ID NO: 79638
  peptide (1)..(523): Ceres Seq. ID no. 13609410
  misc_feature (1)..(523): Homolog of NCBI NO: 13878375 NR Description: Cytochrome P450 79A2 >gi|10176738|dbj|BAB09969.1|
  misc_feature (1)..(523): Homolog of NCBI NO: 18414836 NR Description: cytochrome P450 CYP79A2 [Arabidopsis thaliana]
  misc_feature (1)..(440): Homolog of NCBI NO: 22327385 NR Description: cytochrome P450, putative [Arabidopsis thaliana]
  misc_feature (468)..(523): Homolog of NCBI NO: 22327385 NR Description: cytochrome P450, putative [Arabidopsis thaliana]
  misc_feature (1)..(523): Homolog of NCBI NO: 5915822 NR Description: CYTOCHROME P450 79A1 (CYTOCHROME P450TYR)
  misc_feature (5)..(523): Homolog of NCBI NO: 6739530 NR Description: N-hydroxylating cytochrome P450 [Manihot
  misc_feature (1)..(523): Homolog of NCBI NO: 6739527 NR Description: N-hydroxylating cytochrome P450 [Manihot
  misc_feature (11)..(523): Homolog of NCBI NO: 15236088 NR Description: cytochrome P450 79B2 [Arabidopsis thaliana]
  misc_feature (22)..(523): Homolog of NCBI NO: 25991347 NR Description: cytochrome P450 [Brassica napus]
  misc_feature (1)..(515): Homolog of NCBI NO: 7672519 NR Description: cytochrome P450 CYP79E1 [Triglochin maritimum]

SEQ ID NO: 102087 - protein, 509 aa, Arabidopsis thaliana; identical to SEQ ID NO: 79639
  peptide (1)..(509): Ceres Seq. ID no. 13609411
  misc_feature (1)..(509): Homolog of NCBI NO: 13878375 NR Description: Cytochrome P450 79A2 >gi|10176738|dbj|BAB09969.1|
  misc_feature (1)..(509): Homolog of NCBI NO: 18414836 NR Description: cytochrome P450 CYP79A2 [Arabidopsis thaliana]
  misc_feature (1)..(426): Homolog of NCBI NO: 22327385 NR Description: cytochrome P450, putative [Arabidopsis thaliana]
  misc_feature (454)..(509): Homolog of NCBI NO: 22327385 NR Description: cytochrome P450, putative [Arabidopsis thaliana]
  misc_feature (1)..(509): Homolog of NCBI NO: 5915822 NR Description: CYTOCHROME P450 79A1 (CYTOCHROME P450TYR)
  misc_feature (1)..(509): Homolog of NCBI NO: 6739530 NR Description: N-hydroxylating cytochrome P450 [Manihot
  misc_feature (1)..(509): Homolog of NCBI NO: 6739527 NR Description: N-hydroxylating cytochrome P450 [Manihot
  misc_feature (1)..(509): Homolog of NCBI NO: 15236088 NR Description: cytochrome P450 79B2 [Arabidopsis thaliana]
  misc_feature (8)..(509): Homolog of NCBI NO: 25991347 NR Description: cytochrome P450 [Brassica napus]
  misc_feature (1)..(501): Homolog of NCBI NO: 7672519 NR Description: cytochrome P450 CYP79E1 [Triglochin maritimum]

SEQ ID NO: 102088 - DNA, 924 bp, Arabidopsis thaliana
  misc_feature (1)..(924): Ceres Seq. ID no. 13609412
  misc_feature: MA Experiment ID: 108434 Result: Down-regulated in Transcription
  misc_feature: MA Experiment 108434 PARAMETER Experiment Name: At_Root_Tips_cDNA_P Parameter: Tissue Value: Root Tips
  misc_feature: MA Experiment ID: 108461 Result: Down-regulated in Transcription
  misc_feature: MA Experiment 108461 PARAMETER Experiment Name: At_Germinating_Seeds_cDNA_P Parameter: Age (day) Value: 1 vs. 0
  misc_feature: MA Experiment 108461 PARAMETER Experiment Name: At_Germinating_Seeds_cDNA_P Parameter: Tissue Value: Germinating Seeds
  misc_feature: MA Experiment ID: 108488 Result: Down-regulated in Transcription
  misc_feature: MA Experiment ID: 108576 Result: Down-regulated in Transcription
  misc_feature: MA Experiment 108576 PARAMETER Experiment Name: At_42deg_Heat_cDNA_P Parameter: Temperature (deg C) Value: 42 vs. 22
  misc_feature: MA Experiment 108576 PARAMETER Experiment Name: At_42deg_Heat_cDNA_P Parameter: Timepoint (hr) Value: 1
  misc_feature: MA Experiment 108576 PARAMETER Experiment Name: At_42deg_Heat_cDNA_P Parameter: Tissue Value: Aerial
  misc_feature: MA Experiment ID: 108577 Result: Down-regulated in Transcription
  misc_feature: MA Experiment 108577 PARAMETER Experiment Name: At_42deg_Heat_cDNA_P Parameter: Temperature (deg C) Value: 42 vs. 22
  misc_feature: MA Experiment 108577 PARAMETER Experiment Name: At_42deg_Heat_cDNA_P Parameter: Timepoint (hr) Value: 6
  misc_feature: MA Experiment 108577 PARAMETER Experiment Name: At_42deg_Heat_cDNA_P Parameter: Tissue Value: Aerial
  misc_feature: MA Experiment ID: 108585 Result: Up-regulated in Transcription
  misc_feature: MA Experiment 108585 PARAMETER Experiment Name: At_5mM_NaNP_cDNA_P Parameter: Timepoint (hr) Value: 6
  misc_feature: MA Experiment 108585 PARAMETER Experiment Name: At_5mM_NaNP_cDNA_P Parameter: Tissue Value: Aerial
  misc_feature: MA Experiment 108585 PARAMETER Experiment Name: At_5mM_NaNP_cDNA_P Parameter: Treatment Value: null
  misc_feature: MA Experiment ID: 20000179 Result: Down-regulated in Transcription
  misc_feature: MA Experiment 20000179 PARAMETER Experiment Name: At_Germinating_Seeds_P Parameter: Age (hr) Value: 6 vs. 0
  misc_feature: MA Experiment 20000179 PARAMETER Experiment Name: At_Germinating_Seeds_P Parameter: Tissue Value: Germinating Seeds
  misc_feature: MA Experiment ID: 20000227 Result: Down-regulated in Transcription
  misc_feature: MA Experiment 20000227 PARAMETER Experiment Name: At_Root-Tips-vs-Tops_P Parameter: Tissue Value: Root Tips vs. Root Tops
  misc_feature: MA Experiment ID: 20000234 Result: Down-regulated in Transcription
  misc_feature: MA Experiment 20000234 PARAMETER Experiment Name: At_Siliques_P Parameter: Age (day) Value: 21
  misc_feature: MA Experiment 20000234 PARAMETER Experiment Name: At_Siliques_P Parameter: Organism Value: A. thaliana
  misc_feature: MA Experiment 20000234 PARAMETER Experiment Name: At_Siliques_P Parameter: Plant Line Value: WS
  misc_feature: MA Experiment 20000234 PARAMETER Experiment Name: At_Siliques_P Parameter: Tissue Value: Less Than 5mm Siliques vs. Whole Plant
  misc_feature: MA Experiment ID: 20000264 Result: Down-regulated in Transcription
  misc_feature: MA Experiment 20000264 PARAMETER Experiment Name: At_Open_Flower_P Parameter: Age (day) Value: 21
  misc_feature: MA Experiment 20000264 PARAMETER Experiment Name: At_Open_Flower_P Parameter: Plant Line Value: WS
  misc_feature: MA Experiment 20000264 PARAMETER Experiment Name: At_Open_Flower_P Parameter: Tissue Value: Open Flower vs. Whole Plant
  misc_feature: MA Experiment ID: 20000265 Result: Down-regulated in Transcription
  misc_feature: MA Experiment 20000265 PARAMETER Experiment Name: At_Open_Flower_P Parameter: Age (day) Value: 21
  misc_feature: MA Experiment 20000265 PARAMETER Experiment Name: At_Open_Flower_P Parameter: Plant Line Value: WS
  misc_feature: MA Experiment 20000265 PARAMETER Experiment Name: At_Open_Flower_P Parameter: Tissue Value: Closed Flower vs. Whole Plant
  misc_feature: MA Experiment ID: 20000286 Result: Down-regulated in Transcription
  misc_feature: MA Experiment 20000286 PARAMETER Experiment Name: At_Open_Flower_P Parameter: Age (day) Value: 21
  misc_feature: MA Experiment 20000286 PARAMETER Experiment Name: At_Open_Flower_P Parameter: Plant Line Value: WS
  misc_feature: MA Experiment 20000286 PARAMETER Experiment Name: At_Open_Flower_P Parameter: Tissue Value: Half Open vs. Whole Plant
  misc_feature: MA Experiment ID: 20000437 Result: Down-regulated in Transcription
  misc_feature: MA Experiment 20000437 PARAMETER Experiment Name: At_Drought_P Parameter: Age (day) Value: 8
  misc_feature: MA Experiment 20000437 PARAMETER Experiment Name: At_Drought_P Parameter: Organism Value: A. thaliana
  misc_feature: MA Experiment 20000437 PARAMETER Experiment Name: At_Drought_P Parameter: Plant Line Value: WS
  misc_feature: MA Experiment 20000437 PARAMETER Experiment Name: At_Drought_P Parameter: Timepoint (hr) Value: 24
  misc_feature: MA Experiment 20000437 PARAMETER Experiment Name: At_Drought_P Parameter: Tissue Value: Whole Plant
  misc_feature: MA Experiment 20000437 PARAMETER Experiment Name: At_Drought_P Parameter: Treatment Value: Drought vs. No Drought
  misc_feature: MA Experiment ID: 20000439 Result: Down-regulated in Transcription
  misc_feature: MA Experiment 20000439 PARAMETER Experiment Name: At_Roots__P Parameter: Age (day) Value: 14 vs. 21
  misc_feature: MA Experiment 20000439 PARAMETER Experiment Name: At_Roots__P Parameter: Organism Value: A. thaliana
  misc_feature: MA Experiment 20000439 PARAMETER Experiment Name: At_Roots__P Parameter: Tissue Value: Roots vs. Whole Plant
  misc_feature: MA Experiment ID: 20001247 Result: Up-regulated in Transcription
  misc_feature: MA Experiment 20001247 PARAMETER Experiment Name: At_Far-red-induction_P Parameter: Age (day) Value: 7
  misc_feature: MA Experiment 20001247 PARAMETER Experiment Name: At_Far-red-induction_P Parameter: Light Value: Far-red vs. White
  misc_feature: MA Experiment 20001247 PARAMETER Experiment Name: At_Far-red-induction_P Parameter: Organism Value: A. thaliana
  misc_feature: MA Experiment 20001247 PARAMETER Experiment Name: At_Far-red-induction_P Parameter: Plant Line Value: Columbia
  misc_feature: MA Experiment 20001247 PARAMETER Experiment Name: At_Far-red-induction_P Parameter: Timepoint (hr) Value: 1
  misc_feature: MA Experiment 20001247 PARAMETER Experiment Name: At_Far-red-induction_P Parameter: Tissue Value: Whole Plant
  misc_feature: MA Experiment ID: 20001248 Result: Up-regulated in Transcription
  misc_feature: MA Experiment 20001248 PARAMETER Experiment Name: At_Far-red-induction_P Parameter: Age (day) Value: 7
  misc_feature: MA Experiment 20001248 PARAMETER Experiment Name: At_Far-red-induction_P Parameter: Light Value: Far-red vs. White
  misc_feature: MA Experiment 20001248 PARAMETER Experiment Name: At_Far-red-induction_P Parameter: Organism Value: A. thaliana
  misc_feature: MA Experiment 20001248 PARAMETER Experiment Name: At_Far-red-induction_P Parameter: Plant Line Value: Columbia
  misc_feature: MA Experiment 20001248 PARAMETER Experiment Name: At_Far-red-induction_P Parameter: Timepoint (hr) Value: 4
  misc_feature: MA Experiment 20001248 PARAMETER Experiment Name: At_Far-red-induction_P Parameter: Tissue Value: Whole Plant
  misc_feature: MA Experiment ID: 20001450 Result: Up-regulated in Transcription
  misc_feature: MA Experiment 20001450 PARAMETER Experiment Name: At_Far-red-induction_P Parameter: Age (day) Value: 7
  misc_feature: MA Experiment 20001450 PARAMETER Experiment Name: At_Far-red-induction_P Parameter: Light Value: Far-red vs. White
  misc_feature: MA Experiment 20001450 PARAMETER Experiment Name: At_Far-red-induction_P Parameter: Organism Value: A. thaliana
  misc_feature: MA Experiment 20001450 PARAMETER Experiment Name: At_Far-red-induction_P Parameter: Plant Line Value: Columbia
  misc_feature: MA Experiment 20001450 PARAMETER Experiment Name: At_Far-red-induction_P Parameter: Timepoint (hr) Value: 8
  misc_feature: MA Experiment 20001450 PARAMETER Experiment Name: At_Far-red-induction_P Parameter: Tissue Value: Whole Plant
  misc_feature: MA Experiment ID: 20001451 Result: Up-regulated in Transcription
  misc_feature: MA Experiment 20001451 PARAMETER Experiment Name: At_Far-red-induction_P Parameter: Age (day) Value: 7
  misc_feature: MA Experiment 20001451 PARAMETER Experiment Name: At_Far-red-induction_P Parameter: Light Value: Far-red vs. White
  misc_feature: MA Experiment 20001451 PARAMETER Experiment Name: At_Far-red-induction_P Parameter: Organism Value: A. thaliana
  misc_feature: MA Experiment 20001451 PARAMETER Experiment Name: At_Far-red-induction_P Parameter: Plant Line Value: Columbia
  misc_feature: MA Experiment 20001451 PARAMETER Experiment Name: At_Far-red-induction_P Parameter: Timepoint (hr) Value: 24
  misc_feature: MA Experiment 20001451 PARAMETER Experiment Name: At_Far-red-induction_P Parameter: Tissue Value: Whole Plant
  misc_feature: MA Experiment ID: 20001555 Result: Down-regulated in Transcription
  misc_feature: MA Experiment 20001555 PARAMETER Experiment Name: At_Drought_Soil_Dry_P Parameter: Age (day) Value: 24
  misc_feature: MA Experiment 20001555 PARAMETER Experiment Name: At_Drought_Soil_Dry_P Parameter: Organism Value: A. thaliana
  misc_feature: MA Experiment 20001555 PARAMETER Experiment Name: At_Drought_Soil_Dry_P Parameter: Plant Line Value: WS
  misc_feature: MA Experiment 20001555 PARAMETER Experiment Name: At_Drought_Soil_Dry_P Parameter: Post Timepoint (hr) Value: None
  misc_feature: MA Experiment 20001555 PARAMETER Experiment Name: At_Drought_Soil_Dry_P Parameter: Post-Treatment Value: None
  misc_feature: MA Experiment 20001555 PARAMETER Experiment Name: At_Drought_Soil_Dry_P Parameter: Timepoint (day) Value: 10
  misc_feature: MA Experiment 20001555 PARAMETER Experiment Name: At_Drought_Soil_Dry_P Parameter: Treatment Value: Drought vs. No Drought
  misc_feature: MA Experiment ID: 20001556 Result: Down-regulated in Transcription
  misc_feature: MA Experiment 20001556 PARAMETER Experiment Name: At_Drought_Soil_Dry_P Parameter: Age (day) Value: 26
  misc_feature: MA Experiment 20001556 PARAMETER Experiment Name: At_Drought_Soil_Dry_P Parameter: Organism Value: A. thaliana
  misc_feature: MA Experiment 20001556 PARAMETER Experiment Name: At_Drought_Soil_Dry_P Parameter: Plant Line Value: WS
  misc_feature: MA Experiment 20001556 PARAMETER Experiment Name: At_Drought_Soil_Dry_P Parameter: Post Timepoint (hr) Value: None
  misc_feature: MA Experiment 20001556 PARAMETER Experiment Name: At_Drought_Soil_Dry_P Parameter: Post-Treatment Value: None
  misc_feature: MA Experiment 20001556 PARAMETER Experiment Name: At_Drought_Soil_Dry_P Parameter: Timepoint (day) Value: 12
  misc_feature: MA Experiment 20001556 PARAMETER Experiment Name: At_Drought_Soil_Dry_P Parameter: Treatment Value: Drought vs. No Drought
  misc_feature: MA Experiment ID: 20001905 Result: Down-regulated in Transcription
  misc_feature: MA Experiment 20001905 PARAMETER Experiment Name: At_Drought_Reproduction_P Parameter: Age (day) Value: 40
  misc_feature: MA Experiment 20001905 PARAMETER Experiment Name: At_Drought_Reproduction_P Parameter: Organism Value: A. thaliana
  misc_feature: MA Experiment 20001905 PARAMETER Experiment Name: At_Drought_Reproduction_P Parameter: Plant Line Value: WS
  misc_feature: MA Experiment 20001905 PARAMETER Experiment Name: At_Drought_Reproduction_P Parameter: Timepoint (day) Value: 10
  misc_feature: MA Experiment 20001905 PARAMETER Experiment Name: At_Drought_Reproduction_P Parameter: Tissue Value: Rosettes
  misc_feature: MA Experiment 20001905 PARAMETER Experiment Name: At_Drought_Reproduction_P Parameter: Treatment Value: Drought vs. No Drought
tttctgttctgtcctaatttctctctggcgaaagctaagaggtttcggttacggtctccatctccgatcaaatcacgaagtttctatcggaaattttcagtgatacataccgtcagagattttctttacgagagaattgtcgccgacatactaaagcagagttttgggtgggaattagtaagatttcgactttggaattgggagatctttccattatgggttctgagcaaaacgacagcacaagcttctctccttcagagccaaagctctgcgtcaaaggatgtggcttcttcggatctccatcgaacatgaacctctgctctaaatgctacagagacatccgagccacggaggaacaaaccgcttccgctaaagccgccgtcgagaaatctctaaaccctaataaacccaaaactcaaccacaacagagccaagaaatcactcaaggcgtcctcggatctggatcgtcttcctcatcaacgagagggggtgattcggctgctgctccgttggatccaccgaaatcgacggctacgagatgcttgagctgtaacaagaaagttggcgtgacgggtttcaagtgtaggtgtggaagcactttctgtggaactcatagatatccagagagtcacgagtgccaattcgatttcaaaggagttgcgagagaagctattgctaaagctaatcctgtggtgaaggctgataaggttgataggatatgaattggtgaagaaactgttgtgttctcttttgtttttttattttcaagtctcgtgatgttggtggtttggctctctgttttctgctcttattatggttttatttgcttttagggtttcttaggaaaggccttagattctgctattatgtggtttcatgttttgcaacattggatttgttgttctgtaataaagtgttggttat

SEQ ID NO: 102089 - protein, 168 aa, Arabidopsis thaliana; identical to SEQ ID NO: 35636
  peptide (1)..(168): Ceres Seq. ID no. 13609413
  misc_feature (109)..(149): Pfam Name: AN1-like Zinc finger Pfam Description: AN1-like Zinc finger
  misc_feature (1)..(168): Homolog of NCBI NO: 8778645 NR Description: F5O11.17 [Arabidopsis thaliana]
  misc_feature (1)..(168): Homolog of NCBI NO: 15221329 NR Description: expressed protein [Arabidopsis thaliana]
  misc_feature (1)..(168): Homolog of NCBI NO: 15234402 NR Description: expressed protein [Arabidopsis thaliana]
  misc_feature (1)..(167): Homolog of NCBI NO: 15235819 NR Description: zinc finger -related protein [Arabidopsis
  misc_feature (15)..(168): Homolog of NCBI NO: 15225894 NR Description: zinc finger protein -related [Arabidopsis
  misc_feature (4)..(168): Homolog of NCBI NO: 28269431 NR Description: putative zinc finger protein [Oryza sativa
  misc_feature (6)..(168): Homolog of NCBI NO: 18403408 NR Description: expressed protein [Arabidopsis thaliana]
  misc_feature (5)..(168): Homolog of NCBI NO: 30908921 NR Description: putative zinc finger transcription factor ZFP33
  misc_feature (6)..(168): Homolog of NCBI NO: 25082726 NR Description: expressed protein [Arabidopsis thaliana]
  misc_feature (12)..(168): Homolog of NCBI NO: 18404102 NR Description: expressed protein [Arabidopsis thaliana]

SEQ ID NO: 102090 - protein, 137 aa, Arabidopsis thaliana; identical to SEQ ID NO: 35637
  peptide (1)..(137): Ceres Seq. ID no. 13609414
  misc_feature (78)..(118): Pfam Name: AN1-like Zinc finger Pfam Description: AN1-like Zinc finger
  misc_feature (1)..(137): Homolog of NCBI NO: 8778645 NR Description: F5O11.17 [Arabidopsis thaliana]
  misc_feature (1)..(137): Homolog of NCBI NO: 15221329 NR Description: expressed protein [Arabidopsis thaliana]
  misc_feature (1)..(137): Homolog of NCBI NO: 15234402 NR Description: expressed protein [Arabidopsis thaliana]
  misc_feature (1)..(136): Homolog of NCBI NO: 15235819 NR Description: zinc finger -related protein [Arabidopsis
  misc_feature (1)..(137): Homolog of NCBI NO: 15225894 NR Description: zinc finger protein -related [Arabidopsis
  misc_feature (1)..(137): Homolog of NCBI NO: 28269431 NR Description: putative zinc finger protein [Oryza sativa
  misc_feature (1)..(137): Homolog of NCBI NO: 18403408 NR Description: expressed protein [Arabidopsis thaliana]
  misc_feature (1)..(137): Homolog of NCBI NO: 30908921 NR Description: putative zinc finger transcription factor ZFP33
  misc_feature (1)..(137): Homolog of NCBI NO: 25082726 NR Description: expressed protein [Arabidopsis thaliana]
  misc_feature (1)..(137): Homolog of NCBI NO: 18404102 NR Description: expressed protein [Arabidopsis thaliana]

SEQ ID NO: 102091 - protein, 103 aa, Arabidopsis thaliana
  peptide (1)..(103): Ceres Seq. ID no. 13609415
  misc_feature (1)..(56): Homolog of NCBI NO: 8778645 NR Description: F5O11.17 [Arabidopsis thaliana]
FLFCPNFSLAKAKRFRLRSPSPIKSRSFYRKFSVIHTVRDFLYERIVADILKQSFGWELVRFRLWNWEIFPLWVLSKTTAQASLLQSQSSASKDVASSDLHRT

SEQ ID NO: 102092 - DNA, 1256 bp, Arabidopsis thaliana
  misc_feature (1)..(1256): Ceres Seq. ID no. 13609416
  misc_feature: MA Experiment ID: 108464 Result: Up-regulated in Transcription
  misc_feature: MA Experiment 108464 PARAMETER Experiment Name: At_Germinating_Seeds_cDNA_P Parameter: Age (day) Value: 4 vs. 0
  misc_feature: MA Experiment 108464 PARAMETER Experiment Name: At_Germinating_Seeds_cDNA_P Parameter: Tissue Value: Germinating Seeds
  misc_feature: MA Experiment ID: 20000113 Result: Down-regulated in Transcription
  misc_feature: MA Experiment 20000113 PARAMETER Experiment Name: At_42deg_Heat_cDNA_P Parameter: Temperature (deg C) Value: 42 vs. 22
  misc_feature: MA Experiment 20000113 PARAMETER Experiment Name: At_42deg_Heat_cDNA_P Parameter: Timepoint (hr) Value: 8
  misc_feature: MA Experiment 20000113 PARAMETER Experiment Name: At_42deg_Heat_cDNA_P Parameter: Tissue Value: Aerial
  misc_feature: MA Experiment ID: 20000173 Result: Down-regulated in Transcription
  misc_feature: MA Experiment 20000173 PARAMETER Experiment Name: At_42deg_Heat_P Parameter: Age (day) Value: 14
  misc_feature: MA Experiment 20000173 PARAMETER Experiment Name: At_42deg_Heat_P Parameter: Organism Value: A. thaliana
  misc_feature: MA Experiment 20000173 PARAMETER Experiment Name: At_42deg_Heat_P Parameter: Plant Line Value: WS
  misc_feature: MA Experiment 20000173 PARAMETER Experiment Name: At_42deg_Heat_P Parameter: Temperature (deg C) Value: 42 vs. 22
  misc_feature: MA Experiment 20000173 PARAMETER Experiment Name: At_42deg_Heat_P Parameter: Timepoint (hr) Value: 6
  misc_feature: MA Experiment 20000173 PARAMETER Experiment Name: At_42deg_Heat_P Parameter: Tissue Value: Aerial
  misc_feature: MA Experiment ID: 20000264 Result: Up-regulated in Transcription
  misc_feature: MA Experiment 20000264 PARAMETER Experiment Name: At_Open_Flower_P Parameter: Age (day) Value: 21
  misc_feature: MA Experiment 20000264 PARAMETER Experiment Name: At_Open_Flower_P Parameter: Plant Line Value: WS
  misc_feature: MA Experiment 20000264 PARAMETER Experiment Name: At_Open_Flower_P Parameter: Tissue Value: Open Flower vs. Whole Plant
  misc_feature: MA Experiment ID: 20000794 Result: Up-regulated in Transcription
  misc_feature: MA Experiment 20000794 PARAMETER Experiment Name: At_Petals_P Parameter: Age (day) Value: 23-25 days
  misc_feature: MA Experiment 20000794 PARAMETER Experiment Name: At_Petals_P Parameter: Plant Line Value: WS
  misc_feature: MA Experiment 20000794 PARAMETER Experiment Name: At_Petals_P Parameter: Tissue Value: Petals vs. Whole plant
  misc_feature: MA Experiment ID: 20001247 Result: Up-regulated in Transcription
  misc_feature: MA Experiment 20001247 PARAMETER Experiment Name: At_Far-red-induction_P Parameter: Age (day) Value: 7
  misc_feature: MA Experiment 20001247 PARAMETER Experiment Name: At_Far-red-induction_P Parameter: Light Value: Far-red vs. White
  misc_feature: MA Experiment 20001247 PARAMETER Experiment Name: At_Far-red-induction_P Parameter: Organism Value: A. thaliana
  misc_feature: MA Experiment 20001247 PARAMETER Experiment Name: At_Far-red-induction_P Parameter: Plant Line Value: Columbia
  misc_feature: MA Experiment 20001247 PARAMETER Experiment Name: At_Far-red-induction_P Parameter: Timepoint (hr) Value: 1
  misc_feature: MA Experiment 20001247 PARAMETER Experiment Name: At_Far-red-induction_P Parameter: Tissue Value: Whole Plant
aaagattctttcttctaaccccattcgctctctccgatcaacacaacatttgatctaacggtttaattttctcgagaaaccgaaggaaaacaaacagaggtgcataacgattctgacggaaacttttgagatattttttttagagccaaaaggattcactttttttggttttatcttcgcatcgatctatgacgtacagcaatggcgtcgatgggacggtgcctgagctgaaattgagagtcgaagaagattccgataatggtgattatctgaaattgagaggaggatcaaatgaagaagatgaaggatcatcggcggaatcatcgagatgtccgataggatcggttacttctgtctggttctgggtgaaattgatctccttggtcgtttgtttgggttcattggcctttgttatcatcaaatgggttggtccctttttgattgaaaaggagctgattccatttataaattgggtgagaaacacattcagcataccggttctcggtcttctactatttgcctcagtggcattgtttccaagcattcttcttccttcttccccttccatgtggatggctggtcttacatttggttatggaaaagggtttcttctgattttatcagctgcttccatcggtgttactcttcctttcttaattggacatctcttcctccacaagatgcaagaatggttgaagaaataccctaaaaaagcagccatacttagagctgctggtgaaggaacctggtttcatcagtttcaagcagtcacactaatccgtgtctctccatttccttacatcatttacaactactgcgctttagcgactggagttcattatggtccttatatcttaggctctcttgttggaatggttcctgagatctttgtctcaatttacacgggtataatgctaaggacactagcagttgcatcagacacgagacacacactttcggttgtggagatagtcgtgaatgttcttggcttctgtgtaactgcgagcgcgactatagtctgcacaatctatgcgaagaagaagctaagtgcgatgcaatcagaggacgtagagacattacaaaatccaatactttattaactcttttcaccatgaccacaacataccatcatctaacacgatcttgaaattgataatatataatgtttttttttttttttgttattcttattcatttgaaaatgaatatttatgtctttttctcttgtatatatgatatgtatcaattgaattttg

SEQ ID NO: 102093 - protein, 303 aa, Arabidopsis thaliana
  peptide (1)..(303): Ceres Seq. ID no. 13609417
  misc_feature (105)..(247): Pfam Name: DedA family Pfam Description: DedA family
  misc_feature (1)..(303): Homolog of NCBI NO: 15221330 NR Description: expressed protein [Arabidopsis thaliana]
  misc_feature (1)..(166): Homolog of NCBI NO: 8778630 NR Description: F5O11.19 [Arabidopsis thaliana]
  misc_feature (233)..(303): Homolog of NCBI NO: 8778630 NR Description: F5O11.19 [Arabidopsis thaliana]
  misc_feature (11)..(298): Homolog of NCBI NO: 30685958 NR Description: expressed protein [Arabidopsis thaliana] unknown protein [Arabidopsis thaliana]
  misc_feature (1)..(292): Homolog of NCBI NO: 15234386 NR Description: expressed protein [Arabidopsis thaliana]
  misc_feature (59)..(256): Homolog of NCBI NO: 8778630 NR Description: F5O11.19 [Arabidopsis thaliana]
  misc_feature (39)..(293): Homolog of NCBI NO: 18395356 NR Description: expressed protein [Arabidopsis thaliana] At2g02370/T16F16.16 [Arabidopsis thaliana]
  misc_feature (59)..(293): Homolog of NCBI NO: 34913316 NR Description: P0519E12.36 [Oryza sativa (japonica >gi|22093829|dbj|BAC07116.1| hypothetical protein [Oryza sativa
  misc_feature (141)..(298): Homolog of NCBI NO: 7486891 NR Description: hypothetical protein T12H17.240 - Arabidopsis >gi|2832606|emb|CAA16570.1| predicted protein [Arabidopsis >gi|3292810|emb|CAA19800.1| putative protein [Arabidopsis
  misc_feature (165)..(293): Homolog of NCBI NO: 25410981 NR Description: hypothetical protein At2g02370 [imported] -
MTYSNGVDGTVPELKLRVEEDSDNGDYLKLRGGSNEEDEGSSAESSRCPIGSVTSVWFWVKLISLVVCLGSLAFVIIKWVGPFLIEKELIPFINWVRNTFSIPVLGLLLFASVALFPSILLPSSPSMWMAGLTFGYGKGFLLILSAASIGVTLPFLIGHLFLHKMQEWLKKYPKKAAILRAAGEGTWFHQFQAVTLIRVSPFPYIIYNYCALATGVHYGPYILGSLVGMVPEIFVSIYTGIMLRTLAVASDTRHTLSVVEIVVNVLGFCVTASATIVCTIYAKKKLSAMQSEDVETLQNPILY

SEQ ID NO: 102094 - protein, 177 aa, Arabidopsis thaliana; identical to SEQ ID NO: 26159
  peptide (1)..(177): Ceres Seq. ID no. 13609418
  misc_feature (1)..(121): Pfam Name: DedA family Pfam Description: DedA family
  misc_feature (1)..(177): Homolog of NCBI NO: 15221330 NR Description: expressed protein [Arabidopsis thaliana]
  misc_feature (1)..(40): Homolog of NCBI NO: 8778630 NR Description: F5O11.19 [Arabidopsis thaliana]
  misc_feature (107)..(177): Homolog of NCBI NO: 8778630 NR Description: F5O11.19 [Arabidopsis thaliana]
  misc_feature (1)..(172): Homolog of NCBI NO: 30685958 NR Description: expressed protein [Arabidopsis thaliana] unknown protein [Arabidopsis thaliana]
  misc_feature (1)..(166): Homolog of NCBI NO: 15234386 NR Description: expressed protein [Arabidopsis thaliana]
  misc_feature (1)..(130): Homolog of NCBI NO: 8778630 NR Description: F5O11.19 [Arabidopsis thaliana]
  misc_feature (1)..(167): Homolog of NCBI NO: 18395356 NR Description: expressed protein [Arabidopsis thaliana] At2g02370/T16F16.16 [Arabidopsis thaliana]
  misc_feature (1)..(167): Homolog of NCBI NO: 34913316 NR Description: P0519E12.36 [Oryza sativa (japonica >gi|22093829|dbj|BAC07116.1| hypothetical protein [Oryza sativa
  misc_feature (15)..(172): Homolog of NCBI NO: 7486891 NR Description: hypothetical protein T12H17.240 - Arabidopsis >gi|2832606|emb|CAA16570.1| predicted protein [Arabidopsis >gi|3292810|emb|CAA19800.1| putative protein [Arabidopsis
  misc_feature (39)..(167): Homolog of NCBI NO: 25410981 NR Description: hypothetical protein At2g02370 [imported] -

SEQ ID NO: 102095 - protein, 175 aa, Arabidopsis thaliana; identical to SEQ ID NO: 26160
  peptide (1)..(175): Ceres Seq. ID no. 13609419
  misc_feature (1)..(119): Pfam Name: DedA family Pfam Description: DedA family
  misc_feature (1)..(175): Homolog of NCBI NO: 15221330 NR Description: expressed protein [Arabidopsis thaliana]
  misc_feature (1)..(38): Homolog of NCBI NO: 8778630 NR Description: F5O11.19 [Arabidopsis thaliana]
  misc_feature (105)..(175): Homolog of NCBI NO: 8778630 NR Description: F5O11.19 [Arabidopsis thaliana]
  misc_feature (1)..(170): Homolog of NCBI NO: 30685958 NR Description: expressed protein [Arabidopsis thaliana] unknown protein [Arabidopsis thaliana]
  misc_feature (1)..(164): Homolog of NCBI NO: 15234386 NR Description: expressed protein [Arabidopsis thaliana]
  misc_feature (1)..(128): Homolog of NCBI NO: 8778630 NR Description: F5O11.19 [Arabidopsis thaliana]
  misc_feature (1)..(165): Homolog of NCBI NO: 18395356 NR Description: expressed protein [Arabidopsis thaliana] At2g02370/T16F16.16 [Arabidopsis thaliana]
  misc_feature (1)..(165): Homolog of NCBI NO: 34913316 NR Description: P0519E12.36 [Oryza sativa (japonica >gi|22093829|dbj|BAC07116.1| hypothetical protein [Oryza sativa
  misc_feature (13)..(170): Homolog of NCBI NO: 7486891 NR Description: hypothetical protein T12H17.240 - Arabidopsis >gi|2832606|emb|CAA16570.1| predicted protein [Arabidopsis >gi|3292810|emb|CAA19800.1| putative protein [Arabidopsis
  misc_feature (37)..(165): Homolog of NCBI NO: 25410981 NR Description: hypothetical protein At2g02370 [imported] -

SEQ ID NO: 102096 - DNA, 1171 bp, Arabidopsis thaliana
  misc_feature (1)..(1171): Ceres Seq. ID no. 13609420
  misc_feature: MA Experiment ID: 20000117 Result: Down-regulated in Transcription
  misc_feature: MA Experiment 20000117 PARAMETER Experiment Name: At_100uM_ABA_Mutants_cDNA_P Parameter: Plant Line Value: Columbia
  misc_feature: MA Experiment 20000117 PARAMETER Experiment Name: At_100uM_ABA_Mutants_cDNA_P Parameter: Timepoint (hr) Value: 6
  misc_feature: MA Experiment 20000117 PARAMETER Experiment Name: At_100uM_ABA_Mutants_cDNA_P Parameter: Tissue Value: Aerial
  misc_feature: MA Experiment 20000117 PARAMETER Experiment Name: At_100uM_ABA_Mutants_cDNA_P Parameter: Treatment Value: 100uM ABA vs. No Treatment
  misc_feature: MA Experiment ID: 20000451 Result: Down-regulated in Transcription
  misc_feature: MA Experiment 20000451 PARAMETER Experiment Name: At_CS6879_Shoots-Roots_P Parameter: Age (day) Value: 14
  misc_feature: MA Experiment 20000451 PARAMETER Experiment Name: At_CS6879_Shoots-Roots_P Parameter: Organism Value: A. thaliana
  misc_feature: MA Experiment 20000451 PARAMETER Experiment Name: At_CS6879_Shoots-Roots_P Parameter: Plant Line Value: CS6879 vs. WS
  misc_feature: MA Experiment 20000451 PARAMETER Experiment Name: At_CS6879_Shoots-Roots_P Parameter: Tissue Value: Roots
aaacgaataaagaagtaactgtgaaagagcgaagaagagtcacacaaaaaaaacaatggcggaatcttcagagcctccggttgttctccttcaccgaccaccgtctctaactttcatggacgagattctgactcgtgaattccgtactctcatcaccgacacttcctcatcggaatcactcccgagcttcttcccccgtcacgcctcctccgccagagccttcgttatcagcggcagacttccggtaaccgatgaactcctttctcatctcccttctctccagattctcgtctgcactagcgtcggcatcgatcacatcgatctcgccgcatgcaagcgtcgcggcatcgttatcaccaacgctggcaacgcgttttccgatgacgttgctgattgtgccgtcggtttgcttattagcgttctccgtcgtattcctgccgccgatcgttacgtccggtctggtaattgggcgaaatttggggattttcaattagggtccaaggtaagtgggaagagagttgggatagttggattggggagcattggatcatttgttgctaaaagacttgaatcatttggctgtgttatctcttacaactcaaggagtcagaaacagagtagtccataccggtattactctgacattctctcgttagcagagaacaacgatgtacttgtcctctgctgctctttgacagacgaaacgcaccatattgtgaatagagaagtgatggagttgcttggtaaggatggggttgtgatcaatgtgggacgaggaaagttgattgatgagaaggagatggtcaagtgtttggttgacggtgtgattggtggtgctggtttagatgtgtttgagaatgaaccggcagttcctcaggagttgtttggtttggataatgtagtgttgtctcctcattttgctgtggctacaccagggtctttggacaatgttgcacagattgctttagctaacttgaaggcgtttttctcgaaccggcctttgctttctccggttcaattggattgagagagcgcccggtttgatcaggtagctaaattagttaagctattgtttattataatcaataattcaaaaagaaagtgtaatgaatatttgaatgtaccctgacattctctcccaaagaagaagaattaatgacgcatattattt

SEQ ID NO: 102097 - protein, 323 aa, Arabidopsis thaliana
  peptide (1)..(323): Ceres Seq. ID no. 13609421
  misc_feature (17)..(105): Pfam Name: D-isomer specific 2-hydroxyacid dehydrogenase, Pfam Description: D-isomer specific 2-hydroxyacid dehydrogenase,
  misc_feature (1)..(323): Homolog of NCBI NO: 15222015 NR Description: oxidoreductase family [Arabidopsis thaliana] F5O11.29 [Arabidopsis thaliana]
  misc_feature (8)..(322): Homolog of NCBI NO: 38345308 NR Description: OSJNBb0085F13.13 [Oryza sativa (japonica
  misc_feature (1)..(320): Homolog of NCBI NO: 7485630 NR Description: probable glycerate dehydrogenase [imported] -
  misc_feature (4)..(322): Homolog of NCBI NO: 38345306 NR Description: OSJNBb0085F13.6 [Oryza sativa (japonica
  misc_feature (10)..(320): Homolog of NCBI NO: 15220005 NR Description: oxidoreductase family [Arabidopsis thaliana]
  misc_feature (10)..(320): Homolog of NCBI NO: 34904262 NR Description: putative Caulobacter crescentus D-isomer specific
  misc_feature (1)..(320): Homolog of NCBI NO: 21636166 NR Description: unknown [Aegilops tauschii]
  misc_feature (16)..(320): Homolog of NCBI NO: 15890302 NR Description: AGR_L_379p [Agrobacterium tumefaciens]
  misc_feature (3)..(323): Homolog of NCBI NO: 23104708 NR Description: hypothetical protein [Azotobacter vinelandii]
  misc_feature (6)..(320): Homolog of NCBI NO: 23011804 NR Description: hypothetical protein [Magnetospirillum
MAESSEPPVVLLHRPPSLTFMDEILTREFRTLITDTSSSESLPSFFPRHASSARAFVISGRLPVTDELLSHLPSLQILVCTSVGIDHIDLAACKRRGIVITNAGNAFSDDVADCAVGLLISVLRRIPAADRYVRSGNWAKFGDFQLGSKVSGKRVGIVGLGSIGSFVAKRLESFGCVISYNSRSQKQSSPYRYYSDILSLAENNDVLVLCCSLTDETHHIVNREVMELLGKDGVVINVGRGKLIDEKEMVKCLVDGVIGGAGLDVFENEPAVPQELFGLDNVVLSPHFAVATPGSLDNVAQIALANLKAFFSNRPLLSPVQLD

SEQ ID NO: 102098 - protein, 303 aa, Arabidopsis thaliana
  peptide (1)..(303): Ceres Seq. ID no. 13609422
  misc_feature (1)..(85): Pfam Name: D-isomer specific 2-hydroxyacid dehydrogenase, Pfam Description: D-isomer specific 2-hydroxyacid dehydrogenase,
  misc_feature (1)..(303): Homolog of NCBI NO: 15222015 NR Description: oxidoreductase family [Arabidopsis thaliana] F5O11.29 [Arabidopsis thaliana]
  misc_feature (1)..(302): Homolog of NCBI NO: 38345308 NR Description: OSJNBb0085F13.13 [Oryza sativa (japonica
  misc_feature (1)..(300): Homolog of NCBI NO: 7485630 NR Description: probable glycerate dehydrogenase [imported] -
  misc_feature (1)..(302): Homolog of NCBI NO: 38345306 NR Description: OSJNBb0085F13.6 [Oryza sativa (japonica
  misc_feature (1)..(300): Homolog of NCBI NO: 15220005 NR Description: oxidoreductase family [Arabidopsis thaliana]
  misc_feature (1)..(300): Homolog of NCBI NO: 34904262 NR Description: putative Caulobacter crescentus D-isomer specific
  misc_feature (1)..(300): Homolog of NCBI NO: 21636166 NR Description: unknown [Aegilops tauschii]
  misc_feature (1)..(300): Homolog of NCBI NO: 15890302 NR Description: AGR_L_379p [Agrobacterium tumefaciens]
  misc_feature (1)..(303): Homolog of NCBI NO: 23104708 NR Description: hypothetical protein [Azotobacter vinelandii]
  misc_feature (1)..(300): Homolog of NCBI NO: 23011804 NR Description: hypothetical protein [Magnetospirillum
MDEILTREFRTLITDTSSSESLPSFFPRHASSARAFVISGRLPVTDELLSHLPSLQILVCTSVGIDHIDLAACKRRGIVITNAGNAFSDDVADCAVGLLISVLRRIPAADRYVRSGNWAKFGDFQLGSKVSGKRVGIVGLGSIGSFVAKRLESFGCVISYNSRSQKQSSPYRYYSDILSLAENNDVLVLCCSLTDETHHIVNREVMELLGKDGVVINVGRGKLIDEKEMVKCLVDGVIGGAGLDVFENEPAVPQELFGLDNVVLSPHFAVATPGSLDNVAQIALANLKAFFSNRPLLSPVQLD

SEQ ID NO: 102099 - DNA, 2014 bp, Arabidopsis thaliana
  misc_feature (1)..(2014): Ceres Seq. ID no. 13609423
  misc_feature: MA Experiment ID: 108501 Result: Down-regulated in Transcription
  misc_feature: MA Experiment 108501 PARAMETER Experiment Name: At_ap2_floral_buds_cDNA_P Parameter: Plant Line Value: ap2 (Ler.)
  misc_feature: MA Experiment 108501 PARAMETER Experiment Name: At_ap2_floral_buds_cDNA_P Parameter: Tissue Value: Closed Flower
  misc_feature: MA Experiment ID: 108595 Result: Up-regulated in Transcription
  misc_feature: MA Experiment 108595 PARAMETER Experiment Name: At_Ler-pi_Ovule_cDNA_P Parameter: Plant Line Value: null
  misc_feature: MA Experiment ID: 20000117 Result: Down-regulated in Transcription
  misc_feature: MA Experiment 20000117 PARAMETER Experiment Name: At_100uM_ABA_Mutants_cDNA_P Parameter: Plant Line Value: Columbia
  misc_feature: MA Experiment 20000117 PARAMETER Experiment Name: At_100uM_ABA_Mutants_cDNA_P Parameter: Timepoint (hr) Value: 6
  misc_feature: MA Experiment 20000117 PARAMETER Experiment Name: At_100uM_ABA_Mutants_cDNA_P Parameter: Tissue Value: Aerial
  misc_feature: MA Experiment 20000117 PARAMETER Experiment Name: At_100uM_ABA_Mutants_cDNA_P Parameter: Treatment Value: 100uM ABA vs. No Treatment
  misc_feature: MA Experiment ID: 20000184 Result: Down-regulated in Transcription
  misc_feature: MA Experiment 20000184 PARAMETER Experiment Name: At_Shoots__P Parameter: Age (day) Value: 7
  misc_feature: MA Experiment 20000184 PARAMETER Experiment Name: At_Shoots__P Parameter: Tissue Value: Shoots vs. Whole Plant
  misc_feature: MA Experiment ID: 20000185 Result: Down-regulated in Transcription
  misc_feature: MA Experiment 20000185 PARAMETER Experiment Name: At_Roots__P Parameter: Age (day) Value: 7 vs. 21
  misc_feature: MA Experiment 20000185 PARAMETER Experiment Name: At_Roots__P Parameter: Organism Value: A. thaliana
  misc_feature: MA Experiment 20000185 PARAMETER Experiment Name: At_Roots__P Parameter: Tissue Value: Roots vs. Whole Plant
  misc_feature: MA Experiment ID: 20000234 Result: Up-regulated in Transcription
  misc_feature: MA Experiment 20000234 PARAMETER Experiment Name: At_Siliques_P Parameter: Age (day) Value: 21
  misc_feature: MA Experiment 20000234 PARAMETER Experiment Name: At_Siliques_P Parameter: Organism Value: A. thaliana
  misc_feature: MA Experiment 20000234 PARAMETER Experiment Name: At_Siliques_P Parameter: Plant Line Value: WS
  misc_feature: MA Experiment 20000234 PARAMETER Experiment Name: At_Siliques_P Parameter: Tissue Value: Less Than 5mm Siliques vs. Whole Plant
  misc_feature: MA Experiment ID: 20000235 Result: Up-regulated in Transcription
  misc_feature: MA Experiment 20000235 PARAMETER Experiment Name: At_Siliques_P Parameter: Age (day) Value: 21
  misc_feature: MA Experiment 20000235 PARAMETER Experiment Name: At_Siliques_P Parameter: Organism Value: A. thaliana
  misc_feature: MA Experiment 20000235 PARAMETER Experiment Name: At_Siliques_P Parameter: Plant Line Value: WS
  misc_feature: MA Experiment 20000235 PARAMETER Experiment Name: At_Siliques_P Parameter: Tissue Value: 5-10mm Siliques vs. Whole Plant
  misc_feature: MA Experiment ID: 20000265 Result: Up-regulated in Transcription
  misc_feature: MA Experiment 20000265 PARAMETER Experiment Name: At_Open_Flower_P Parameter: Age (day) Value: 21
  misc_feature: MA Experiment 20000265 PARAMETER Experiment Name: At_Open_Flower_P Parameter: Plant Line Value: WS
  misc_feature: MA Experiment 20000265 PARAMETER Experiment Name: At_Open_Flower_P Parameter: Tissue Value: Closed Flower vs. Whole Plant
  misc_feature: MA Experiment ID: 20000286 Result: Up-regulated in Transcription
  misc_feature: MA Experiment 20000286 PARAMETER Experiment Name: At_Open_Flower_P Parameter: Age (day) Value: 21
  misc_feature: MA Experiment 20000286 PARAMETER Experiment Name: At_Open_Flower_P Parameter: Plant Line Value: WS
  misc_feature: MA Experiment 20000286 PARAMETER Experiment Name: At_Open_Flower_P Parameter: Tissue Value: Half Open vs. Whole Plant
  misc_feature: MA Experiment ID: 20000438 Result: Down-regulated in Transcription
  misc_feature: MA Experiment 20000438 PARAMETER Experiment Name: At_Shoots__P Parameter: Age (day) Value: 14
  misc_feature: MA Experiment 20000438 PARAMETER Experiment Name: At_Shoots__P Parameter: Tissue Value: Shoots vs. Whole Plant
  misc_feature: MA Experiment ID: 20000439 Result: Down-regulated in Transcription
  misc_feature: MA Experiment 20000439 PARAMETER Experiment Name: At_Roots__P Parameter: Age (day) Value: 14 vs. 21
  misc_feature: MA Experiment 20000439 PARAMETER Experiment Name: At_Roots__P Parameter: Organism Value: A. thaliana
  misc_feature: MA Experiment 20000439 PARAMETER Experiment Name: At_Roots__P Parameter: Tissue Value: Roots vs. Whole Plant
  misc_feature: MA Experiment ID: 20000453 Result: Up-regulated in Transcription
  misc_feature: MA Experiment 20000453 PARAMETER Experiment Name: At_100uM_ABA_P Parameter: Age (day) Value: 15
  misc_feature: MA Experiment 20000453 PARAMETER Experiment Name: At_100uM_ABA_P Parameter: Organism Value: A. thaliana
  misc_feature: MA Experiment 20000453 PARAMETER Experiment Name: At_100uM_ABA_P Parameter: Plant Line Value: WS
  misc_feature: MA Experiment 20000453 PARAMETER Experiment Name: At_100uM_ABA_P Parameter: Timepoint (hr) Value: 24
  misc_feature: MA Experiment 20000453 PARAMETER Experiment Name: At_100uM_ABA_P Parameter: Tissue Value: Aerial
  misc_feature: MA Experiment 20000453 PARAMETER Experiment Name: At_100uM_ABA_P Parameter: Treatment Value: 100uM ABA vs. No Treatment
  misc_feature: MA Experiment ID: 20000573 Result: Down-regulated in Transcription
  misc_feature: MA Experiment 20000573 PARAMETER Experiment Name: At_100uM_ABA_Mutants__P Parameter: Organism Value: A. thaliana
  misc_feature: MA Experiment 20000573 PARAMETER Experiment Name: At_100uM_ABA_Mutants__P Parameter: Plant Line Value: CS22 vs. Ler wt
  misc_feature: MA Experiment 20000573 PARAMETER Experiment Name: At_100uM_ABA_Mutants__P Parameter: Timepoint (hr) Value: N/A
  misc_feature: MA Experiment 20000573 PARAMETER Experiment Name: At_100uM_ABA_Mutants__P Parameter: Tissue Value: Whole Plant
  misc_feature: MA Experiment 20000573 PARAMETER Experiment Name: At_100uM_ABA_Mutants__P Parameter: Treatment Value: None
  misc_feature: MA Experiment ID: 20000794 Result: Down-regulated in Transcription
  misc_feature: MA Experiment 20000794 PARAMETER Experiment Name: At_Petals_P Parameter: Age (day) Value: 23-25 days
  misc_feature: MA Experiment 20000794 PARAMETER Experiment Name: At_Petals_P Parameter: Plant Line Value: WS
  misc_feature: MA Experiment 20000794 PARAMETER Experiment Name: At_Petals_P Parameter: Tissue Value: Petals vs. Whole plant
  misc_feature: MA Experiment ID: 20001248 Result: Down-regulated in Transcription
  misc_feature: MA Experiment 20001248 PARAMETER Experiment Name: At_Far-red-induction_P Parameter: Age (day) Value: 7
  misc_feature: MA Experiment 20001248 PARAMETER Experiment Name: At_Far-red-induction_P Parameter: Light Value: Far-red vs. White
  misc_feature: MA Experiment 20001248 PARAMETER Experiment Name: At_Far-red-induction_P Parameter: Organism Value: A. thaliana
  misc_feature: MA Experiment 20001248 PARAMETER Experiment Name: At_Far-red-induction_P Parameter: Plant Line Value: Columbia
  misc_feature: MA Experiment 20001248 PARAMETER Experiment Name: At_Far-red-induction_P Parameter: Timepoint (hr) Value: 4
  misc_feature: MA Experiment 20001248 PARAMETER Experiment Name: At_Far-red-induction_P Parameter: Tissue Value: Whole Plant
  misc_feature: MA Experiment ID: 20001450 Result: Down-regulated in Transcription
  misc_feature: MA Experiment 20001450 PARAMETER Experiment Name: At_Far-red-induction_P Parameter: Age (day) Value: 7
  misc_feature: MA Experiment 20001450 PARAMETER Experiment Name: At_Far-red-induction_P Parameter: Light Value: Far-red vs. White
  misc_feature: MA Experiment 20001450 PARAMETER Experiment Name: At_Far-red-induction_P Parameter: Organism Value: A. thaliana
  misc_feature: MA Experiment 20001450 PARAMETER Experiment Name: At_Far-red-induction_P Parameter: Plant Line Value: Columbia
  misc_feature: MA Experiment 20001450 PARAMETER Experiment Name: At_Far-red-induction_P Parameter: Timepoint (hr) Value: 8
  misc_feature: MA Experiment 20001450 PARAMETER Experiment Name: At_Far-red-induction_P Parameter: Tissue Value: Whole Plant
  misc_feature: MA Experiment ID: 20001457 Result: Up-regulated in Transcription
  misc_feature: MA Experiment 20001457 PARAMETER Experiment Name: At_50mM_NH4NO3_L-to-H_P Parameter: Age (day) Value: Undefined
  misc_feature: MA Experiment 20001457 PARAMETER Experiment Name: At_50mM_NH4NO3_L-to-H_P Parameter: Organism Value: Undefined
  misc_feature: MA Experiment 20001457 PARAMETER Experiment Name: At_50mM_NH4NO3_L-to-H_P Parameter: Plant Line Value: Undefined
  misc_feature: MA Experiment 20001457 PARAMETER Experiment Name: At_50mM_NH4NO3_L-to-H_P Parameter: Timepoint (hr) Value: 0.5
  misc_feature: MA Experiment 20001457 PARAMETER Experiment Name: At_50mM_NH4NO3_L-to-H_P Parameter: Tissue Value: Siliques
  misc_feature: MA Experiment 20001457 PARAMETER Experiment Name: At_50mM_NH4NO3_L-to-H_P Parameter: Treatment Value: 50mM NH4NO3 vs. 100mM Manitol
  misc_feature: MA Experiment ID: 20001557 Result: Up-regulated in Transcription
  misc_feature: MA Experiment 20001557 PARAMETER Experiment Name: At_Drought_Soil_Dry_P Parameter: Age (day) Value: 27
  misc_feature: MA Experiment 20001557 PARAMETER Experiment Name: At_Drought_Soil_Dry_P Parameter: Organism Value: A. thaliana
  misc_feature: MA Experiment 20001557 PARAMETER Experiment Name: At_Drought_Soil_Dry_P Parameter: Plant Line Value: WS
  misc_feature: MA Experiment 20001557 PARAMETER Experiment Name: At_Drought_Soil_Dry_P Parameter: Post Timepoint (hr) Value: 3
  misc_feature: MA Experiment 20001557 PARAMETER Experiment Name: At_Drought_Soil_Dry_P Parameter: Post-Treatment Value: Re-Water vs. No Drought
  misc_feature: MA Experiment 20001557 PARAMETER Experiment Name: At_Drought_Soil_Dry_P Parameter: Timepoint (day) Value: 13
  misc_feature: MA Experiment 20001557 PARAMETER Experiment Name: At_Drought_Soil_Dry_P Parameter: Treatment Value: Drought vs. No Drought
  misc_feature: MA Experiment ID: 20001558 Result: Up-regulated in Transcription
  misc_feature: MA Experiment 20001558 PARAMETER Experiment Name: At_Drought_Soil_Dry_P Parameter: Age (day) Value: 27
  misc_feature: MA Experiment 20001558 PARAMETER Experiment Name: At_Drought_Soil_Dry_P Parameter: Organism Value: A. thaliana
  misc_feature: MA Experiment 20001558 PARAMETER Experiment Name: At_Drought_Soil_Dry_P Parameter: Plant Line Value: WS
  misc_feature: MA Experiment 20001558 PARAMETER Experiment Name: At_Drought_Soil_Dry_P Parameter: Post Timepoint (hr) Value: 6
  misc_feature: MA Experiment 20001558 PARAMETER Experiment Name: At_Drought_Soil_Dry_P Parameter: Post-Treatment Value: Re-Water vs. No Drought
  misc_feature: MA Experiment 20001558 PARAMETER Experiment Name: At_Drought_Soil_Dry_P Parameter: Timepoint (day) Value: 13
  misc_feature: MA Experiment 20001558 PARAMETER Experiment Name: At_Drought_Soil_Dry_P Parameter: Treatment Value: Drought vs. No Drought
  misc_feature: MA Experiment ID: 20001560 Result: Up-regulated in Transcription
  misc_feature: MA Experiment 20001560 PARAMETER Experiment Name: At_Drought_Soil_Dry_P Parameter: Age (day) Value: 28
  misc_feature: MA Experiment 20001560 PARAMETER Experiment Name: At_Drought_Soil_Dry_P Parameter: Organism Value: A. thaliana
  misc_feature: MA Experiment 20001560 PARAMETER Experiment Name: At_Drought_Soil_Dry_P Parameter: Plant Line Value: WS
  misc_feature: MA Experiment 20001560 PARAMETER Experiment Name: At_Drought_Soil_Dry_P Parameter: Post Timepoint (hr) Value: None
  misc_feature: MA Experiment 20001560 PARAMETER Experiment Name: At_Drought_Soil_Dry_P Parameter: Post-Treatment Value: None
  misc_feature: MA Experiment 20001560 PARAMETER Experiment Name: At_Drought_Soil_Dry_P Parameter: Timepoint (day) Value: 14
  misc_feature: MA Experiment 20001560 PARAMETER Experiment Name: At_Drought_Soil_Dry_P Parameter: Treatment Value: Drought vs. No Drought
  misc_feature: MA Experiment ID: 20001771 Result: Up-regulated in Transcription
  misc_feature: MA Experiment 20001771 PARAMETER Experiment Name: At_Far-red-enriched-adult_P Parameter: Age (day) Value: 28
  misc_feature: MA Experiment 20001771 PARAMETER Experiment Name: At_Far-red-enriched-adult_P Parameter: Light Value: Far-red enriched vs. White
  misc_feature: MA Experiment 20001771 PARAMETER Experiment Name: At_Far-red-enriched-adult_P Parameter: Organism Value: A. thaliana
  misc_feature: MA Experiment 20001771 PARAMETER Experiment Name: At_Far-red-enriched-adult_P Parameter: Plant Line Value: Columbia
  misc_feature: MA Experiment 20001771 PARAMETER Experiment Name: At_Far-red-enriched-adult_P Parameter: Timepoint (hr) Value: 16
  misc_feature: MA Experiment 20001771 PARAMETER Experiment Name: At_Far-red-enriched-adult_P Parameter: Tissue Value: Aerial
  misc_feature: MA Experiment ID: 20001906 Result: Down-regulated in Transcription
  misc_feature: MA Experiment 20001906 PARAMETER Experiment Name: At_Drought_Reproduction_P Parameter: Age (day) Value: 35
  misc_feature: MA Experiment 20001906 PARAMETER Experiment Name: At_Drought_Reproduction_P Parameter: Organism Value: A. thaliana
  misc_feature: MA Experiment 20001906 PARAMETER Experiment Name: At_Drought_Reproduction_P Parameter: Plant Line Value: WS
  misc_feature: MA Experiment 20001906 PARAMETER Experiment Name: At_Drought_Reproduction_P Parameter: Timepoint (day) Value: 5
  misc_feature: MA Experiment 20001906 PARAMETER Experiment Name: At_Drought_Reproduction_P Parameter: Tissue Value: Siliques
  misc_feature: MA Experiment 20001906 PARAMETER Experiment Name: At_Drought_Reproduction_P Parameter: Treatment Value: Drought vs. No Drought
accataggtcaccaaagactttataaataacccatacattatcatatacatataggcatacaaagtgagagaactctactctagattgtgctaaactcaatttgtattaatgatggatagattttggtcatggagattgtttgttgctctctctctttttctccattctccaatttgttcttctgacaaagctccgaactactccttcatgcgggacgcgacaggaagtcctacaacgtcgtactacgactatatcatcatcggtggtgggactgccgggtgccctctagccgcaacgctgtctcaaaacgccagcgttttgctgctcgaacgcggtgactcaccgtacaataaccccaacatcacgaggctctcggctttcggagccgctctctctgacctgtctgagtcctcaccatctcagcgttttgtatcagaagatggtgtcattaatgcacgtgctcgggttctcggtggcggaagcgctctcaacgccggcttctatacacgtgcgggcactaaatacgttaggaacatgggttgggacggagcgctagcgaacgagtcgtaccagtgggttgaagctaaggtggcgtttcagcctccgatggggcggtggcaaacggccgtgagagacggcttattggaggctgggattgtccctaataatggtttcacctatgatcatatcaatggcaccaaatttggcggtactatttttgaccgcaacggcaatagacacaccgccgccgatttgttagagtatgccgatcctaagggtattaccgtccttttgcatgccaccgtccaccggatcttgtttcgtactcgaggtacgaccaagccaatagccaacggagttgtgtaccgagaccggaccggtcaggctcatagagcttacctaaaggaaggcgccttgagtgagatcatcctatcggccggaaccctagggagcccacaacttcttatgctaagtggtgttggcccatcggctcaattacaggcccaaaacatcacggtggtgatggaccagcctcatgtgggtcaaggcatgtatgacaaccctatgaatgccgtgttcgttccttctccagtccccgttgaggtctcactcattgaggttgttgggattaccggggaaggaacatatgtcgaagccgccggtggtgaaaattttggcggaggtggtggtggttctagtggatcgtcctccactagagactactatgcaatgttttcaccaagggcaacattattagagtcaaattcaatgaccaaattatcatcagcccaaccttttcaaggaggcttccttttagagaaagtaatgggcccattatcaacgggtcatttagagctcaagacccgaaacccaaaagataacccgattgtgactttcaactatttccaacatcctgacgacctaaaacgttgtgttcgaggaatccaaaccatagagagagtcgtgcaatctaaagctttttcgaggtataagtacgcagatgtgtcatttgagtatttacttaacctcacggcgagtactcctgtcaatctaaggccgcctcgcagtggtcctggagcctcgttgcctccatccgcagaggaattttgccaacatacagttacaaccatttggcattaccatggaggatgcgttgtgggcagagtggtcgatggggattataaagttattggtatcgaccggcttagagtcattgatatgtcgaccgttggttattgtcccgggacaaatcctcaagccacggttatgatgcttggcaggtatatgggtgtgaagatcttgagagagagactcaccaagaagtagggttttgaatcggatcaggggttttgggaaaacgttatattaaaaatgaaatgaatcaagatattactaatcgatgttattaatagctgaatatgtattgttcttggtaatttctgtttggtacttattattagaccaaactgagatgtatacggaaatatatgtatagactcattcccaattttc

SEQ ID NO: 102100 - protein, 572 aa, Arabidopsis thaliana
  peptide (1)..(572): Ceres Seq. ID no. 13609424
  misc_feature (46)..(312): Pfam Name: GMC oxidoreductase Pfam Description: GMC oxidoreductase
  misc_feature (1)..(572): Homolog of NCBI NO: 22329512 NR Description: glucose-methanol-choline (GMC) oxidoreductase
  misc_feature (1)..(572): Homolog of NCBI NO: 17978954 NR Description: At1g12570/T12C24_9 [Arabidopsis thaliana]
  misc_feature (28)..(572): Homolog of NCBI NO: 9502391 NR Description: T12C24.11 [Arabidopsis thaliana]
  misc_feature (34)..(572): Homolog of NCBI NO: 8778640 NR Description: F5O11.31 [Arabidopsis thaliana]
  misc_feature (6)..(568): Homolog of NCBI NO: 15242236 NR Description: glucose-methanol-choline (GMC) oxidoreductase [Arabidopsis thaliana] >gi|14194161|gb|AAK56275.1|AF367287_1 [Arabidopsis thaliana] >gi|30102488|gb|AAP21162.1|
  misc_feature (12)..(571): Homolog of NCBI NO: 11358959 NR Description: probable mandelonitrile lyase (EC 4.1.2.10) - rice >gi|7649261|gb|AAF65820.1|AF251031_1 putative
  misc_feature (11)..(569): Homolog of NCBI NO: 18410417 NR Description: glucose-methanol-choline (GMC) oxidoreductase [Arabidopsis thaliana] >gi|15982755|gb|AAL09718.1|
  misc_feature (6)..(558): Homolog of NCBI NO: 10177730 NR Description: mandelonitrile lyase-like protein [Arabidopsis
  misc_feature (12)..(571): Homolog of NCBI NO: 27452902 NR Description: Putative mandelonitrile lyase [Oryza sativa
  misc_feature (26)..(572): Homolog of NCBI NO: 11357159 NR Description: adhesion of calyx edges protein ACE [imported] -
MMDRFWSWRLFVALSLFLHSPICSSDKAPNYSFMRDATGSPTTSYYDYIIIGGGTAGCPLAATLSQNASVLLLERGDSPYNNPNITRLSAFGAALSDLSESSPSQRFVSEDGVINARARVLGGGSALNAGFYTRAGTKYVRNMGWDGALANESYQWVEAKVAFQPPMGRWQTAVRDGLLEAGIVPNNGFTYDHINGTKFGGTIFDRNGNRHTAADLLEYADPKGITVLLHATVHRILFRTRGTTKPIANGVVYRDRTGQAHRAYLKEGALSEIILSAGTLGSPQLLMLSGVGPSAQLQAQNITVVMDQPHVGQGMYDNPMNAVFVPSPVPVEVSLIEVVGITGEGTYVEAAGGENFGGGGGGSSGSSSTRDYYAMFSPRATLLESNSMTKLSSAQPFQGGFLLEKVMGPLSTGHLELKTRNPKDNPIVTFNYFQHPDDLKRCVRGIQTIERVVQSKAFSRYKYADVSFEYLLNLTASTPVNLRPPRSGPGASLPPSAEEFCQHTVTTIWHYHGGCVVGRVVDGDYKVIGIDRLRVIDMSTVGYCPGTNPQATVMMLGRYMGVKILRERLTKK

SEQ ID NO: 102101 - protein, 571 aa, Arabidopsis thaliana
  peptide (1)..(571): Ceres Seq. ID no. 13609425
  misc_feature (45)..(311): Pfam Name: GMC oxidoreductase Pfam Description: GMC oxidoreductase
  misc_feature (1)..(571): Homolog of NCBI NO: 22329512 NR Description: glucose-methanol-choline (GMC) oxidoreductase
  misc_feature (1)..(571): Homolog of NCBI NO: 17978954 NR Description: At1g12570/T12C24_9 [Arabidopsis thaliana]
  misc_feature (27)..(571): Homolog of NCBI NO: 9502391 NR Description: T12C24.11 [Arabidopsis thaliana]
  misc_feature (33)..(571): Homolog of NCBI NO: 8778640 NR Description: F5O11.31 [Arabidopsis thaliana]
  misc_feature (5)..(567): Homolog of NCBI NO: 15242236 NR Description: glucose-methanol-choline (GMC) oxidoreductase [Arabidopsis thaliana] >gi|14194161|gb|AAK56275.1|AF367287_1 [Arabidopsis thaliana] >gi|30102488|gb|AAP21162.1|
  misc_feature (11)..(570): Homolog of NCBI NO: 11358959 NR Description: probable mandelonitrile lyase (EC 4.1.2.10) - rice >gi|7649261|gb|AAF65820.1|AF251031_1 putative
  misc_feature (10)..(568): Homolog of NCBI NO: 18410417 NR Description: glucose-methanol-choline (GMC) oxidoreductase [Arabidopsis thaliana] >gi|15982755|gb|AAL09718.1|
  misc_feature (5)..(557): Homolog of NCBI NO: 10177730 NR Description: mandelonitrile lyase-like protein [Arabidopsis
  misc_feature (11)..(570): Homolog of NCBI NO: 27452902 NR Description: Putative mandelonitrile lyase [Oryza sativa
  misc_feature (25)..(571): Homolog of NCBI NO: 11357159 NR Description: adhesion of calyx edges protein ACE [imported] -
MDRFWSWRLFVALSLFLHSPICSSDKAPNYSFMRDATGSPTTSYYDYIIIGGGTAGCPLAATLSQNASVLLLERGDSPYNNPNITRLSAFGAALSDLSESSPSQRFVSEDGVINARARVLGGGSALNAGFYTRAGTKYVRNMGWDGALANESYQWVEAKVAFQPPMGRWQTAVRDGLLEAGIVPNNGFTYDHINGTKFGGTIFDRNGNRHTAADLLEYADPKGITVLLHATVHRILFRTRGTTKPIANGVVYRDRTGQAHRAYLKEGALSEIILSAGTLGSPQLLMLSGVGPSAQLQAQNITVVMDQPHVGQGMYDNPMNAVFVPSPVPVEVSLIEVVGITGEGTYVEAAGGENFGGGGGGSSGSSSTRDYYAMFSPRATLLESNSMTKLSSAQPFQGGFLLEKVMGPLSTGHLELKTRNPKDNPIVTFNYFQHPDDLKRCVRGIQTIERVVQSKAFSRYKYADVSFEYLLNLTASTPVNLRPPRSGPGASLPPSAEEFCQHTVTTIWHYHGGCVVGRVVDGDYKVIGIDRLRVIDMSTVGYCPGTNPQATVMMLGRYMGVKILRERLTKK

SEQ ID NO: 102102 - protein, 539 aa, Arabidopsis thaliana
  peptide (1)..(539): Ceres Seq. ID no. 13609426
  misc_feature (13)..(279): Pfam Name: GMC oxidoreductase Pfam Description: GMC oxidoreductase
  misc_feature (1)..(539): Homolog of NCBI NO: 22329512 NR Description: glucose-methanol-choline (GMC) oxidoreductase
  misc_feature (1)..(539): Homolog of NCBI NO: 17978954 NR Description: At1g12570/T12C24_9 [Arabidopsis thaliana]
  misc_feature (1)..(539): Homolog of NCBI NO: 9502391 NR Description: T12C24.11 [Arabidopsis thaliana]
  misc_feature (1)..(539): Homolog of NCBI NO: 8778640 NR Description: F5O11.31 [Arabidopsis thaliana]
  misc_feature (1)..(535): Homolog of NCBI NO: 15242236 NR Description: glucose-methanol-choline (GMC) oxidoreductase [Arabidopsis thaliana] >gi|14194161|gb|AAK56275.1|AF367287_1 [Arabidopsis thaliana] >gi|30102488|gb|AAP21162.1|
  misc_feature (1)..(538): Homolog of NCBI NO: 11358959 NR Description: probable mandelonitrile lyase (EC 4.1.2.10) - rice >gi|7649261|gb|AAF65820.1|AF251031_1 putative
  misc_feature (1)..(536): Homolog of NCBI NO: 18410417 NR Description: glucose-methanol-choline (GMC) oxidoreductase [Arabidopsis thaliana] >gi|15982755|gb|AAL09718.1|
  misc_feature (1)..(525): Homolog of NCBI NO: 10177730 NR Description: mandelonitrile lyase-like protein [Arabidopsis
  misc_feature (1)..(538): Homolog of NCBI NO: 27452902 NR Description: Putative mandelonitrile lyase [Oryza sativa
  misc_feature (1)..(539): Homolog of NCBI NO: 11357159 NR Description: adhesion of calyx edges protein ACE [imported] -
MRDATGSPTTSYYDYIIIGGGTAGCPLAATLSQNASVLLLERGDSPYNNPNITRLSAFGAALSDLSESSPSQRFVSEDGVINARARVLGGGSALNAGFYTRAGTKYVRNMGWDGALANESYQWVEAKVAFQPPMGRWQTAVRDGLLEAGIVPNNGFTYDHINGTKFGGTIFDRNGNRHTAADLLEYADPKGITVLLHATVHRILFRTRGTTKPIANGVVYRDRTGQAHRAYLKEGALSEIILSAGTLGSPQLLMLSGVGPSAQLQAQNITVVMDQPHVGQGMYDNPMNAVFVPSPVPVEVSLIEVVGITGEGTYVEAAGGENFGGGGGGSSGSSSTRDYYAMFSPRATLLESNSMTKLSSAQPFQGGFLLEKVMGPLSTGHLELKTRNPKDNPIVTFNYFQHPDDLKRCVRGIQTIERVVQSKAFSRYKYADVSFEYLLNLTASTPVNLRPPRSGPGASLPPSAEEFCQHTVTTIWHYHGGCVVGRVVDGDYKVIGIDRLRVIDMSTVGYCPGTNPQATVMMLGRYMGVKILRERLTKK

SEQ ID NO: 102103 - DNA, 1299 bp, Arabidopsis thaliana
  misc_feature (1)..(1299): Ceres Seq. ID no. 13609430
  misc_feature: MA Experiment ID: 108434 Result: Down-regulated in Transcription
  misc_feature: MA Experiment 108434 PARAMETER Experiment Name: At_Root_Tips_cDNA_P Parameter: Tissue Value: Root Tips
  misc_feature: MA Experiment ID: 108573 Result: Up-regulated in Transcription
  misc_feature: MA Experiment 108573 PARAMETER Experiment Name: At_Drought_cDNA_P Parameter: Timepoint (hr) Value: 6
  misc_feature: MA Experiment 108573 PARAMETER Experiment Name: At_Drought_cDNA_P Parameter: Tissue Value: Aerial
  misc_feature: MA Experiment 108573 PARAMETER Experiment Name: At_Drought_cDNA_P Parameter: Treatment Value: Drought vs. No Drought
  misc_feature: MA Experiment ID: 108576 Result: Up-regulated in Transcription
  misc_feature: MA Experiment 108576 PARAMETER Experiment Name: At_42deg_Heat_cDNA_P Parameter: Temperature (deg C) Value: 42 vs. 22
  misc_feature: MA Experiment 108576 PARAMETER Experiment Name: At_42deg_Heat_cDNA_P Parameter: Timepoint (hr) Value: 1
  misc_feature: MA Experiment 108576 PARAMETER Experiment Name: At_42deg_Heat_cDNA_P Parameter: Tissue Value: Aerial
  misc_feature: MA Experiment ID: 108579 Result: Up-regulated in Transcription
  misc_feature: MA Experiment 108579 PARAMETER Experiment Name: At_4deg_Cold_cDNA_P Parameter: Temperature (deg C) Value: 4 vs. 22
  misc_feature: MA Experiment 108579 PARAMETER Experiment Name: At_4deg_Cold_cDNA_P Parameter: Timepoint (hr) Value: 6
  misc_feature: MA Experiment 108579 PARAMETER Experiment Name: At_4deg_Cold_cDNA_P Parameter: Tissue Value: Aerial
  misc_feature: MA Experiment ID: 108595 Result: Down-regulated in Transcription
  misc_feature: MA Experiment 108595 PARAMETER Experiment Name: At_Ler-pi_Ovule_cDNA_P Parameter: Plant Line Value: null
  misc_feature: MA Experiment ID: 108668 Result: Down-regulated in Transcription
  misc_feature: MA Experiment 108668 PARAMETER Experiment Name: At_2mM_SA_cDNA_P Parameter: Plant Line Value: WS
  misc_feature: MA Experiment 108668 PARAMETER Experiment Name: At_2mM_SA_cDNA_P Parameter: Timepoint (hr) Value: 6
  misc_feature: MA Experiment 108668 PARAMETER Experiment Name: At_2mM_SA_cDNA_P Parameter: Treatment Value: 2mM SA vs. No Treatment
  misc_feature: MA Experiment ID: 20000069 Result: Up-regulated in Transcription
  misc_feature: MA Experiment 20000069 PARAMETER Experiment Name: At_100uM_ABA_Mutants_cDNA_P Parameter: Plant Line Value: CS23
  misc_feature: MA Experiment 20000069 PARAMETER Experiment Name: At_100uM_ABA_Mutants_cDNA_P Parameter: Timepoint (hr) Value: 6
  misc_feature: MA Experiment 20000069 PARAMETER Experiment Name: At_100uM_ABA_Mutants_cDNA_P Parameter: Tissue Value: Aerial
  misc_feature: MA Experiment 20000069 PARAMETER Experiment Name: At_100uM_ABA_Mutants_cDNA_P Parameter: Treatment Value: 100uM ABA vs. No Treatment
  misc_feature: MA Experiment ID: 20000086 Result: Up-regulated in Transcription
  misc_feature: MA Experiment 20000086 PARAMETER Experiment Name: At_100uM_ABA_Mutants_cDNA_P Parameter: Plant Line Value: CS22
  misc_feature: MA Experiment 20000086 PARAMETER Experiment Name: At_100uM_ABA_Mutants_cDNA_P Parameter: Timepoint (hr) Value: 6
  misc_feature: MA Experiment 20000086 PARAMETER Experiment Name: At_100uM_ABA_Mutants_cDNA_P Parameter: Tissue Value: Aerial
  misc_feature: MA Experiment 20000086 PARAMETER Experiment Name: At_100uM_ABA_Mutants_cDNA_P Parameter: Treatment Value: 100uM ABA vs. No Treatment
  misc_feature: MA Experiment ID: 20000088 Result: Up-regulated in Transcription
  misc_feature: MA Experiment 20000088 PARAMETER Experiment Name: At_100uM_ABA_Mutants_cDNA_P Parameter: Plant Line Value: Landsberg
  misc_feature: MA Experiment 20000088 PARAMETER Experiment Name: At_100uM_ABA_Mutants_cDNA_P Parameter: Timepoint (hr) Value: 6
  misc_feature: MA Experiment 20000088 PARAMETER Experiment Name: At_100uM_ABA_Mutants_cDNA_P Parameter: Tissue Value: Aerial
  misc_feature: MA Experiment 20000088 PARAMETER Experiment Name: At_100uM_ABA_Mutants_cDNA_P Parameter: Treatment Value: 100uM ABA vs. No Treatment
  misc_feature: MA Experiment ID: 20000089 Result: Up-regulated in Transcription
  misc_feature: MA Experiment ID: 20000117 Result: Up-regulated in Transcription
  misc_feature: MA Experiment 20000117 PARAMETER Experiment Name: At_100uM_ABA_Mutants_cDNA_P Parameter: Plant Line Value: Columbia
  misc_feature: MA Experiment 20000117 PARAMETER Experiment Name: At_100uM_ABA_Mutants_cDNA_P Parameter: Timepoint (hr) Value: 6
  misc_feature: MA Experiment 20000117 PARAMETER Experiment Name: At_100uM_ABA_Mutants_cDNA_P Parameter: Tissue Value: Aerial
  misc_feature: MA Experiment 20000117 PARAMETER Experiment Name: At_100uM_ABA_Mutants_cDNA_P Parameter: Treatment Value: 100uM ABA vs. No Treatment
  misc_feature: MA Experiment ID: 20000171 Result: Up-regulated in Transcription
  misc_feature: MA Experiment 20000171 PARAMETER Experiment Name: At_42deg_Heat_P Parameter: Age (day) Value: 14
  misc_feature: MA Experiment 20000171 PARAMETER Experiment Name: At_42deg_Heat_P Parameter: Organism Value: A. thaliana
  misc_feature: MA Experiment 20000171 PARAMETER Experiment Name: At_42deg_Heat_P Parameter: Plant Line Value: WS
  misc_feature: MA Experiment 20000171 PARAMETER Experiment Name: At_42deg_Heat_P Parameter: Temperature (deg C) Value: 42 vs. 22
  misc_feature: MA Experiment 20000171 PARAMETER Experiment Name: At_42deg_Heat_P Parameter: Timepoint (hr) Value: 1
  misc_feature: MA Experiment 20000171 PARAMETER Experiment Name: At_42deg_Heat_P Parameter: Tissue Value: Aerial
  misc_feature: MA Experiment ID: 20000182 Result: Down-regulated in Transcription
  misc_feature: MA Experiment 20000182 PARAMETER Experiment Name: At_2mM_SA_P Parameter: Age (day) Value: 14
  misc_feature: MA Experiment 20000182 PARAMETER Experiment Name: At_2mM_SA_P Parameter: Organism Value: A. thaliana
  misc_feature: MA Experiment 20000182 PARAMETER Experiment Name: At_2mM_SA_P Parameter: Plant Line Value: WS
  misc_feature: MA Experiment 20000182 PARAMETER Experiment Name: At_2mM_SA_P Parameter: Timepoint (hr) Value: 6
  misc_feature: MA Experiment 20000182 PARAMETER Experiment Name: At_2mM_SA_P Parameter: Tissue Value: Aerial
  misc_feature: MA Experiment 20000182 PARAMETER Experiment Name: At_2mM_SA_P Parameter: Treatment Value: 2mM SA vs. No Treatment
  misc_feature: MA Experiment ID: 20000184 Result: Down-regulated in Transcription
  misc_feature: MA Experiment 20000184 PARAMETER Experiment Name: At_Shoots__P Parameter: Age (day) Value: 7
  misc_feature: MA Experiment 20000184 PARAMETER Experiment Name: At_Shoots__P Parameter: Tissue Value: Shoots vs. Whole Plant
  misc_feature: MA Experiment ID: 20000185 Result: Down-regulated in Transcription
  misc_feature: MA Experiment 20000185 PARAMETER Experiment Name: At_Roots__P Parameter: Age (day) Value: 7 vs. 21
  misc_feature: MA Experiment 20000185 PARAMETER Experiment Name: At_Roots__P Parameter: Organism Value: A. thaliana
  misc_feature: MA Experiment 20000185 PARAMETER Experiment Name: At_Roots__P Parameter: Tissue Value: Roots vs. Whole Plant
  misc_feature: MA Experiment ID: 20000213 Result: Up-regulated in Transcription
  misc_feature: MA Experiment 20000213 PARAMETER Experiment Name: At_4deg_Cold_P Parameter: Timepoint (hr) Value: 2
  misc_feature: MA Experiment ID: 20000438 Result: Down-regulated in Transcription
  misc_feature: MA Experiment 20000438 PARAMETER Experiment Name: At_Shoots__P Parameter: Age (day) Value: 14
  misc_feature: MA Experiment 20000438 PARAMETER Experiment Name: At_Shoots__P Parameter: Tissue Value: Shoots vs. Whole Plant
  misc_feature: MA Experiment ID: 20000452 Result: Down-regulated in Transcription
  misc_feature: MA Experiment 20000452 PARAMETER Experiment Name: At_CS6879_Shoots-Roots_P Parameter: Age (day) Value: 14
  misc_feature: MA Experiment 20000452 PARAMETER Experiment Name: At_CS6879_Shoots-Roots_P Parameter: Organism Value: A. thaliana
  misc_feature: MA Experiment 20000452 PARAMETER Experiment Name: At_CS6879_Shoots-Roots_P Parameter: Plant Line Value: CS6879 vs. WS
  misc_feature: MA Experiment 20000452 PARAMETER Experiment Name: At_CS6879_Shoots-Roots_P Parameter: Tissue Value: Shoots
  misc_feature: MA Experiment ID: 20001248 Result: Up-regulated in Transcription
  misc_feature: MA Experiment 20001248 PARAMETER Experiment Name: At_Far-red-induction_P Parameter: Age (day) Value: 7
  misc_feature: MA Experiment 20001248 PARAMETER Experiment Name: At_Far-red-induction_P Parameter: Light Value: Far-red vs. White
  misc_feature: MA Experiment 20001248 PARAMETER Experiment Name: At_Far-red-induction_P Parameter: Organism Value: A. thaliana
  misc_feature: MA Experiment 20001248 PARAMETER Experiment Name: At_Far-red-induction_P Parameter: Plant Line Value: Columbia
  misc_feature: MA Experiment 20001248 PARAMETER Experiment Name: At_Far-red-induction_P Parameter: Timepoint (hr) Value: 4
  misc_feature: MA Experiment 20001248 PARAMETER Experiment Name: At_Far-red-induction_P Parameter: Tissue Value: Whole Plant
  misc_feature: MA Experiment ID: 20001459 Result: Down-regulated in Transcription
  misc_feature: MA Experiment 20001459 PARAMETER Experiment Name: At_50mM_NH4NO3_L-to-H_P Parameter: Age (day) Value: Undefined
  misc_feature: MA Experiment 20001459 PARAMETER Experiment Name: At_50mM_NH4NO3_L-to-H_P Parameter: Organism Value: Undefined
  misc_feature: MA Experiment 20001459 PARAMETER Experiment Name: At_50mM_NH4NO3_L-to-H_P Parameter: Plant Line Value: Undefined
  misc_feature: MA Experiment 20001459 PARAMETER Experiment Name: At_50mM_NH4NO3_L-to-H_P Parameter: Timepoint (hr) Value: 4
  misc_feature: MA Experiment 20001459 PARAMETER Experiment Name: At_50mM_NH4NO3_L-to-H_P Parameter: Tissue Value: Siliques
  misc_feature: MA Experiment 20001459 PARAMETER Experiment Name: At_50mM_NH4NO3_L-to-H_P Parameter: Treatment Value: 50mM NH4NO3 vs. 100mM Manitol
  misc_feature: MA Experiment ID: 20001904 Result: Down-regulated in Transcription
  misc_feature: MA Experiment 20001904 PARAMETER Experiment Name: At_Drought_Reproduction_P Parameter: Age (day) Value: 37
  misc_feature: MA Experiment 20001904 PARAMETER Experiment Name: At_Drought_Reproduction_P Parameter: Organism Value: A. thaliana
  misc_feature: MA Experiment 20001904 PARAMETER Experiment Name: At_Drought_Reproduction_P Parameter: Plant Line Value: WS
  misc_feature: MA Experiment 20001904 PARAMETER Experiment Name: At_Drought_Reproduction_P Parameter: Timepoint (day) Value: 7
  misc_feature: MA Experiment 20001904 PARAMETER Experiment Name: At_Drought_Reproduction_P Parameter: Tissue Value: Rosettes
  misc_feature: MA Experiment 20001904 PARAMETER Experiment Name: At_Drought_Reproduction_P Parameter: Treatment Value: Drought vs. No Drought
  misc_feature: MA Experiment ID: 20001905 Result: Down-regulated in Transcription
  misc_feature: MA Experiment 20001905 PARAMETER Experiment Name: At_Drought_Reproduction_P Parameter: Age (day) Value: 40
  misc_feature: MA Experiment 20001905 PARAMETER Experiment Name: At_Drought_Reproduction_P Parameter: Organism Value: A. thaliana
  misc_feature: MA Experiment 20001905 PARAMETER Experiment Name: At_Drought_Reproduction_P Parameter: Plant Line Value: WS
  misc_feature: MA Experiment 20001905 PARAMETER Experiment Name: At_Drought_Reproduction_P Parameter: Timepoint (day) Value: 10
  misc_feature: MA Experiment 20001905 PARAMETER Experiment Name: At_Drought_Reproduction_P Parameter: Tissue Value: Rosettes
  misc_feature: MA Experiment 20001905 PARAMETER Experiment Name: At_Drought_Reproduction_P Parameter: Treatment Value: Drought vs. No Drought
accccttctttattgctctgttctttgagcaaacaattttgatttcttcgcgagcgaagaaacctcaaagacgaaaagtctcgaaatttcataactttttcttgaagatctatctagatcacccattttcttaaaaacctcttgagatttttctatctcgtgaaaagaggttttaaggtttagatgggtgtggctcactctgatcttcacaatgatttgtcttcttcatcttgttttggggatcggaatatcttgaagcctggtttaggagatttaccagaggcgtgtgtggctataattgttgagaatttggatcctgttgagatctgtagattctcaaagctcaatagagcatttcgcggcgcttcttgggctgattgtgtttgggaatcgaaacttcctcagaattacagagatgttctcgagaaaatccttggtggcttccctgaaaatttgcaaaaaagacacctttatgcttttctctccaggattaactcattcgatgatgccaccaagaaggtatggatagataaacgaaccagtggtgtttgtctatccatttcagccaaaggattatccattacaggcattgatgatcgtagatattggagtcatatccccactgatgaatctcggttttcttctgtagcttatctccaacaaatctggtggtttgaagttgatggtgaaatcgatttcccattcccggttggaacctacagcattttcttcaggcttcaattaggccggtcgggcaagtggtttggtcgacgggtctgtaacacagaacaagtccatggttgggacattaaaccggttcgatttcaactctggactgaagatggtcaatattcctcatctcaatgtatgttaactgagcggggaaactggattcattaccacgccggagacgttgttgtccgggaatcgaataggtcatcgacaaagattaagttttcgatgactcagatcgattgtacacataccaaaggcgggttatctctagactctgtagtcgtgtacccgagctcgtgtaaagaccagttgaagcggttttaatgtttcaaccggatccggtttagtgagaggttaaagcagggttttttgttatgcaggtctttagccccttctatagatgtagttagagcttctatttagagagcttttgttttgtaacttcattgagttttgaggcaaactgtaataatatgttgtggttatgaaactaaaccatctgttataacttgttattagttacgttaagaatgattaatcgttacaaagtttaacttcagatcc

SEQ ID NO: 102104 - protein, 291 aa, Arabidopsis thaliana; identical to SEQ ID NO: 34881
  peptide (1)..(291): Ceres Seq. ID no. 13609431
  misc_feature (1)..(291): Homolog of NCBI NO: 15222051 NR Description: F-box protein (SKP1 interacting partner [Arabidopsis thaliana] >gi|9502385|gb|AAF88092.1|AC025417_20 [Arabidopsis thaliana] >gi|26450401|dbj|BAC42315.1| unknown
  misc_feature (1)..(288): Homolog of NCBI NO: 15221677 NR Description: F-box protein (SKP1 interacting partner 3-related)
  misc_feature (28)..(288): Homolog of NCBI NO: 30695337 NR Description: F-box protein (lectin-related) [Arabidopsis
  misc_feature (28)..(288): Homolog of NCBI NO: 23397334 NR Description: unknown protein [Arabidopsis thaliana]
  misc_feature (104)..(288): Homolog of NCBI NO: 27754673 NR Description: unknown protein [Arabidopsis thaliana]
  misc_feature (27)..(287): Homolog of NCBI NO: 37536186 NR Description: unknown protein [Oryza sativa (japonica
  misc_feature (93)..(281): Homolog of NCBI NO: 38567911 NR Description: OSJNBa0088I22.7 [Oryza sativa (japonica
  misc_feature (31)..(77): Homolog of NCBI NO: 38567911 NR Description: OSJNBa0088I22.7 [Oryza sativa (japonica
  misc_feature (1)..(290): Homolog of NCBI NO: 15231726 NR Description: F-box protein (SKP1 interacting partner 3-related)
  misc_feature (27)..(289): Homolog of NCBI NO: 15242282 NR Description: F-box protein (SKP1 interacting partner [Arabidopsis thaliana] >gi|18175688|gb|AAL59911.1| unknown [Arabidopsis thaliana] >gi|20465821|gb|AAM20015.1| unknown

SEQ ID NO: 102105 - DNA, 1486 bp, Arabidopsis thaliana
  misc_feature (1)..(1486): Ceres Seq. ID no. 13609442
  misc_feature: MA Experiment ID: 108434 Result: Down-regulated in Transcription
  misc_feature: MA Experiment 108434 PARAMETER Experiment Name: At_Root_Tips_cDNA_P Parameter: Tissue Value: Root Tips
  misc_feature: MA Experiment ID: 108435 Result: Down-regulated in Transcription
  misc_feature: MA Experiment 108435 PARAMETER Experiment Name: At_stm_Mutants_cDNA_P Parameter: Plant Line Value: wt Landsburg vs stm
  misc_feature: MA Experiment 108435 PARAMETER Experiment Name: At_stm_Mutants_cDNA_P Parameter: Tissue Value: Shoot Apical Meristem Region
  misc_feature: MA Experiment ID: 108461 Result: Up-regulated in Transcription
  misc_feature: MA Experiment 108461 PARAMETER Experiment Name: At_Germinating_Seeds_cDNA_P Parameter: Age (day) Value: 1 vs. 0
  misc_feature: MA Experiment 108461 PARAMETER Experiment Name: At_Germinating_Seeds_cDNA_P Parameter: Tissue Value: Germinating Seeds
  misc_feature: MA Experiment ID: 108462 Result: Up-regulated in Transcription
  misc_feature: MA Experiment 108462 PARAMETER Experiment Name: At_Germinating_Seeds_cDNA_P Parameter: Age (day) Value: 2 vs. 0
  misc_feature: MA Experiment 108462 PARAMETER Experiment Name: At_Germinating_Seeds_cDNA_P Parameter: Tissue Value: Germinating Seeds
  misc_feature: MA Experiment ID: 108463 Result: Up-regulated in Transcription
  misc_feature: MA Experiment 108463 PARAMETER Experiment Name: At_Germinating_Seeds_cDNA_P Parameter: Age (day) Value: 3 vs. 0
  misc_feature: MA Experiment 108463 PARAMETER Experiment Name: At_Germinating_Seeds_cDNA_P Parameter: Tissue Value: Germinating Seeds
  misc_feature: MA Experiment ID: 108464 Result: Up-regulated in Transcription
  misc_feature: MA Experiment 108464 PARAMETER Experiment Name: At_Germinating_Seeds_cDNA_P Parameter: Age (day) Value: 4 vs. 0
  misc_feature: MA Experiment 108464 PARAMETER Experiment Name: At_Germinating_Seeds_cDNA_P Parameter: Tissue Value: Germinating Seeds
  misc_feature: MA Experiment ID: 108488 Result: Up-regulated in Transcription
  misc_feature: MA Experiment ID: 108561 Result: Down-regulated in Transcription
  misc_feature: MA Experiment 108561 PARAMETER Experiment Name: At_100uM_ABA_cDNA_P Parameter: Timepoint (hr) Value: 6
  misc_feature: MA Experiment 108561 PARAMETER Experiment Name: At_100uM_ABA_cDNA_P Parameter: Tissue Value: Aerial
  misc_feature: MA Experiment 108561 PARAMETER Experiment Name: At_100uM_ABA_cDNA_P Parameter: Treatment Value: 100uM ABA vs. No Treatment
  misc_feature: MA Experiment ID: 108579 Result: Up-regulated in Transcription
  misc_feature: MA Experiment 108579 PARAMETER Experiment Name: At_4deg_Cold_cDNA_P Parameter: Temperature (deg C) Value: 4 vs. 22
  misc_feature: MA Experiment 108579 PARAMETER Experiment Name: At_4deg_Cold_cDNA_P Parameter: Timepoint (hr) Value: 6
  misc_feature: MA Experiment 108579 PARAMETER Experiment Name: At_4deg_Cold_cDNA_P Parameter: Tissue Value: Aerial
  misc_feature: MA Experiment ID: 108594 Result: Down-regulated in Transcription
  misc_feature: MA Experiment 108594 PARAMETER Experiment Name: At_Ler-rhl_Root_cDNA_P Parameter: Plant Line Value: null
  misc_feature: MA Experiment ID: 108595 Result: Down-regulated in Transcription
  misc_feature: MA Experiment 108595 PARAMETER Experiment Name: At_Ler-pi_Ovule_cDNA_P Parameter: Plant Line Value: null
  misc_feature: MA Experiment ID: 20000069 Result: Down-regulated in Transcription
  misc_feature: MA Experiment 20000069 PARAMETER Experiment Name: At_100uM_ABA_Mutants_cDNA_P Parameter: Plant Line Value: CS23
  misc_feature: MA Experiment 20000069 PARAMETER Experiment Name: At_100uM_ABA_Mutants_cDNA_P Parameter: Timepoint (hr) Value: 6
  misc_feature: MA Experiment 20000069 PARAMETER Experiment Name: At_100uM_ABA_Mutants_cDNA_P Parameter: Tissue Value: Aerial
  misc_feature: MA Experiment 20000069 PARAMETER Experiment Name: At_100uM_ABA_Mutants_cDNA_P Parameter: Treatment Value: 100uM ABA vs. No Treatment
  misc_feature: MA Experiment ID: 20000070 Result: Down-regulated in Transcription
  misc_feature: MA Experiment 20000070 PARAMETER Experiment Name: At_100uM_ABA_Mutants_cDNA_P Parameter: Plant Line Value: CS24
  misc_feature: MA Experiment 20000070 PARAMETER Experiment Name: At_100uM_ABA_Mutants_cDNA_P Parameter: Timepoint (hr) Value: 6
  misc_feature: MA Experiment 20000070 PARAMETER Experiment Name: At_100uM_ABA_Mutants_cDNA_P Parameter: Tissue Value: Aerial
  misc_feature: MA Experiment 20000070 PARAMETER Experiment Name: At_100uM_ABA_Mutants_cDNA_P Parameter: Treatment Value: 100uM ABA vs. No Treatment
  misc_feature: MA Experiment ID: 20000071 Result: Down-regulated in Transcription
  misc_feature: MA Experiment 20000071 PARAMETER Experiment Name: At_100uM_ABA_Mutants_cDNA_P Parameter: Plant Line Value: CS8104
  misc_feature: MA Experiment 20000071 PARAMETER Experiment Name: At_100uM_ABA_Mutants_cDNA_P Parameter: Timepoint (hr) Value: 6
  misc_feature: MA Experiment 20000071 PARAMETER Experiment Name: At_100uM_ABA_Mutants_cDNA_P Parameter: Tissue Value: Aerial
  misc_feature: MA Experiment 20000071 PARAMETER Experiment Name: At_100uM_ABA_Mutants_cDNA_P Parameter: Treatment Value: 100uM ABA vs. No Treatment
  misc_feature: MA Experiment ID: 20000086 Result: Down-regulated in Transcription
  misc_feature: MA Experiment 20000086 PARAMETER Experiment Name: At_100uM_ABA_Mutants_cDNA_P Parameter: Plant Line Value: CS22
  misc_feature: MA Experiment 20000086 PARAMETER Experiment Name: At_100uM_ABA_Mutants_cDNA_P Parameter: Timepoint (hr) Value: 6
  misc_feature: MA Experiment 20000086 PARAMETER Experiment Name: At_100uM_ABA_Mutants_cDNA_P Parameter: Tissue Value: Aerial
  misc_feature: MA Experiment 20000086 PARAMETER Experiment Name: At_100uM_ABA_Mutants_cDNA_P Parameter: Treatment Value: 100uM ABA vs. No Treatment
  misc_feature: MA Experiment ID: 20000087 Result: Down-regulated in Transcription
  misc_feature: MA Experiment 20000087 PARAMETER Experiment Name: At_100uM_ABA_Mutants_cDNA_P Parameter: Plant Line Value: WS
  misc_feature: MA Experiment 20000087 PARAMETER Experiment Name: At_100uM_ABA_Mutants_cDNA_P Parameter: Timepoint (hr) Value: 6
  misc_feature: MA Experiment 20000087 PARAMETER Experiment Name: At_100uM_ABA_Mutants_cDNA_P Parameter: Tissue Value: Aerial
  misc_feature: MA Experiment 20000087 PARAMETER Experiment Name: At_100uM_ABA_Mutants_cDNA_P Parameter: Treatment Value: 100uM ABA vs. No Treatment
  misc_feature: MA Experiment ID: 20000088 Result: Down-regulated in Transcription
  misc_feature: MA Experiment 20000088 PARAMETER Experiment Name: At_100uM_ABA_Mutants_cDNA_P Parameter: Plant Line Value: Landsberg
  misc_feature: MA Experiment 20000088 PARAMETER Experiment Name: At_100uM_ABA_Mutants_cDNA_P Parameter: Timepoint (hr) Value: 6
  misc_feature: MA Experiment 20000088 PARAMETER Experiment Name: At_100uM_ABA_Mutants_cDNA_P Parameter: Tissue Value: Aerial
  misc_feature: MA Experiment 20000088 PARAMETER Experiment Name: At_100uM_ABA_Mutants_cDNA_P Parameter: Treatment Value: 100uM ABA vs. No Treatment
  misc_feature: MA Experiment ID: 20000090 Result: Down-regulated in Transcription
  misc_feature: MA Experiment ID: 20000117 Result: Down-regulated in Transcription
  misc_feature: MA Experiment 20000117 PARAMETER Experiment Name: At_100uM_ABA_Mutants_cDNA_P Parameter: Plant Line Value: Columbia
  misc_feature: MA Experiment 20000117 PARAMETER Experiment Name: At_100uM_ABA_Mutants_cDNA_P Parameter: Timepoint (hr) Value: 6
  misc_feature: MA Experiment 20000117 PARAMETER Experiment Name: At_100uM_ABA_Mutants_cDNA_P Parameter: Tissue Value: Aerial
  misc_feature: MA Experiment 20000117 PARAMETER Experiment Name: At_100uM_ABA_Mutants_cDNA_P Parameter: Treatment Value: 100uM ABA vs. No Treatment
  misc_feature: MA Experiment ID: 20000180 Result: Up-regulated in Transcription
  misc_feature: MA Experiment 20000180 PARAMETER Experiment Name: At_Germinating_Seeds_P Parameter: Age (hr) Value: 24 vs. 0
  misc_feature: MA Experiment 20000180 PARAMETER Experiment Name: At_Germinating_Seeds_P Parameter: Tissue Value: Germinating Seeds
  misc_feature: MA Experiment ID: 20000184 Result: Up-regulated in Transcription
  misc_feature: MA Experiment 20000184 PARAMETER Experiment Name: At_Shoots__P Parameter: Age (day) Value: 7
  misc_feature: MA Experiment 20000184 PARAMETER Experiment Name: At_Shoots__P Parameter: Tissue Value: Shoots vs. Whole Plant
  misc_feature: MA Experiment ID: 20000185 Result: Down-regulated in Transcription
  misc_feature: MA Experiment 20000185 PARAMETER Experiment Name: At_Roots__P Parameter: Age (day) Value: 7 vs. 21
  misc_feature: MA Experiment 20000185 PARAMETER Experiment Name: At_Roots__P Parameter: Organism Value: A. thaliana
  misc_feature: MA Experiment 20000185 PARAMETER Experiment Name: At_Roots__P Parameter: Tissue Value: Roots vs. Whole Plant
  misc_feature: MA Experiment ID: 20000437 Result: Down-regulated in Transcription
  misc_feature: MA Experiment 20000437 PARAMETER Experiment Name: At_Drought_P Parameter: Age (day) Value: 8
  misc_feature: MA Experiment 20000437 PARAMETER Experiment Name: At_Drought_P Parameter: Organism Value: A. thaliana
  misc_feature: MA Experiment 20000437 PARAMETER Experiment Name: At_Drought_P Parameter: Plant Line Value: WS
  misc_feature: MA Experiment 20000437 PARAMETER Experiment Name: At_Drought_P Parameter: Timepoint (hr) Value: 24
  misc_feature: MA Experiment 20000437 PARAMETER Experiment Name: At_Drought_P Parameter: Tissue Value: Whole Plant
  misc_feature: MA Experiment 20000437 PARAMETER Experiment Name: At_Drought_P Parameter: Treatment Value: Drought vs. No Drought
  misc_feature: MA Experiment ID: 20000438 Result: Up-regulated in Transcription
  misc_feature: MA Experiment 20000438 PARAMETER Experiment Name: At_Shoots__P Parameter: Age (day) Value: 14
  misc_feature: MA Experiment 20000438 PARAMETER Experiment Name: At_Shoots__P Parameter: Tissue Value: Shoots vs. Whole Plant
  misc_feature: MA Experiment ID: 20000439 Result: Down-regulated in Transcription
  misc_feature: MA Experiment 20000439 PARAMETER Experiment Name: At_Roots__P Parameter: Age (day) Value: 14 vs. 21
  misc_feature: MA Experiment 20000439 PARAMETER Experiment Name: At_Roots__P Parameter: Organism Value: A. thaliana
  misc_feature: MA Experiment 20000439 PARAMETER Experiment Name: At_Roots__P Parameter: Tissue Value: Roots vs. Whole Plant
  misc_feature: MA Experiment ID: 20000495 Result: Down-regulated in Transcription
  misc_feature: MA Experiment 20000495 PARAMETER Experiment Name: At_Guard_Cells_P Parameter: Harvest Date Value: 8/2/2002
  misc_feature: MA Experiment 20000495 PARAMETER Experiment Name: At_Guard_Cells_P Parameter: Organism Value: A. thaliana
  misc_feature: MA Experiment 20000495 PARAMETER Experiment Name: At_Guard_Cells_P Parameter: Tissue Value: Guard Cells vs. Leaves
  misc_feature: MA Experiment ID: 20000794 Result: Down-regulated in Transcription
  misc_feature: MA Experiment 20000794 PARAMETER Experiment Name: At_Petals_P Parameter: Age (day) Value: 23-25 days
  misc_feature: MA Experiment 20000794 PARAMETER Experiment Name: At_Petals_P Parameter: Plant Line Value: WS
  misc_feature: MA Experiment 20000794 PARAMETER Experiment Name: At_Petals_P Parameter: Tissue Value: Petals vs. Whole plant
  misc_feature: MA Experiment ID: 20001248 Result: Down-regulated in Transcription
  misc_feature: MA Experiment 20001248 PARAMETER Experiment Name: At_Far-red-induction_P Parameter: Age (day) Value: 7
  misc_feature: MA Experiment 20001248 PARAMETER Experiment Name: At_Far-red-induction_P Parameter: Light Value: Far-red vs. White
  misc_feature: MA Experiment 20001248 PARAMETER Experiment Name: At_Far-red-induction_P Parameter: Organism Value: A. thaliana
  misc_feature: MA Experiment 20001248 PARAMETER Experiment Name: At_Far-red-induction_P Parameter: Plant Line Value: Columbia
  misc_feature: MA Experiment 20001248 PARAMETER Experiment Name: At_Far-red-induction_P Parameter: Timepoint (hr) Value: 4
  misc_feature: MA Experiment 20001248 PARAMETER Experiment Name: At_Far-red-induction_P Parameter: Tissue Value: Whole Plant
  misc_feature: MA Experiment ID: 20001450 Result: Down-regulated in Transcription
  misc_feature: MA Experiment 20001450 PARAMETER Experiment Name: At_Far-red-induction_P Parameter: Age (day) Value: 7
  misc_feature: MA Experiment 20001450 PARAMETER Experiment Name: At_Far-red-induction_P Parameter: Light Value: Far-red vs. White
  misc_feature: MA Experiment 20001450 PARAMETER Experiment Name: At_Far-red-induction_P Parameter: Organism Value: A. thaliana
  misc_feature: MA Experiment 20001450 PARAMETER Experiment Name: At_Far-red-induction_P Parameter: Plant Line Value: Columbia
  misc_feature: MA Experiment 20001450 PARAMETER Experiment Name: At_Far-red-induction_P Parameter: Timepoint (hr) Value: 8
  misc_feature: MA Experiment 20001450 PARAMETER Experiment Name: At_Far-red-induction_P Parameter: Tissue Value: Whole Plant
  misc_feature: MA Experiment ID: 20001557 Result: Down-regulated in Transcription
  misc_feature: MA Experiment 20001557 PARAMETER Experiment Name: At_Drought_Soil_Dry_P Parameter: Age (day) Value: 27
  misc_feature: MA Experiment 20001557 PARAMETER Experiment Name: At_Drought_Soil_Dry_P Parameter: Organism Value: A. thaliana
  misc_feature: MA Experiment 20001557 PARAMETER Experiment Name: At_Drought_Soil_Dry_P Parameter: Plant Line Value: WS
  misc_feature: MA Experiment 20001557 PARAMETER Experiment Name: At_Drought_Soil_Dry_P Parameter: Post Timepoint (hr) Value: 3
  misc_feature: MA Experiment 20001557 PARAMETER Experiment Name: At_Drought_Soil_Dry_P Parameter: Post-Treatment Value: Re-Water vs. No Drought
  misc_feature: MA Experiment 20001557 PARAMETER Experiment Name: At_Drought_Soil_Dry_P Parameter: Timepoint (day) Value: 13
  misc_feature: MA Experiment 20001557 PARAMETER Experiment Name: At_Drought_Soil_Dry_P Parameter: Treatment Value: Drought vs. No Drought
  misc_feature: MA Experiment ID: 20001904 Result: Down-regulated in Transcription
  misc_feature: MA Experiment 20001904 PARAMETER Experiment Name: At_Drought_Reproduction_P Parameter: Age (day) Value: 37
  misc_feature: MA Experiment 20001904 PARAMETER Experiment Name: At_Drought_Reproduction_P Parameter: Organism Value: A. thaliana
  misc_feature: MA Experiment 20001904 PARAMETER Experiment Name: At_Drought_Reproduction_P Parameter: Plant Line Value: WS
  misc_feature: MA Experiment 20001904 PARAMETER Experiment Name: At_Drought_Reproduction_P Parameter: Timepoint (day) Value: 7
  misc_feature: MA Experiment 20001904 PARAMETER Experiment Name: At_Drought_Reproduction_P Parameter: Tissue Value: Rosettes
  misc_feature: MA Experiment 20001904 PARAMETER Experiment Name: At_Drought_Reproduction_P Parameter: Treatment Value: Drought vs. No Drought
  misc_feature: MA Experiment ID: 20001905 Result: Down-regulated in Transcription
  misc_feature: MA Experiment 20001905 PARAMETER Experiment Name: At_Drought_Reproduction_P Parameter: Age (day) Value: 40
  misc_feature: MA Experiment 20001905 PARAMETER Experiment Name: At_Drought_Reproduction_P Parameter: Organism Value: A. thaliana
  misc_feature: MA Experiment 20001905 PARAMETER Experiment Name: At_Drought_Reproduction_P Parameter: Plant Line Value: WS
  misc_feature: MA Experiment 20001905 PARAMETER Experiment Name: At_Drought_Reproduction_P Parameter: Timepoint (day) Value: 10
  misc_feature: MA Experiment 20001905 PARAMETER Experiment Name: At_Drought_Reproduction_P Parameter: Tissue Value: Rosettes
  misc_feature: MA Experiment 20001905 PARAMETER Experiment Name: At_Drought_Reproduction_P Parameter: Treatment Value: Drought vs. No Drought
gatccagaatctcatcttctttgcctccaactcagcaattcatattttcctatattacaactctctgcctcttctgcttacatcatacaacaagcttctctctctggtagccatggcttcggctactttctctgtggccaaaccatctcttcagggtttttctgagttctcaggacttcgaaactcctctgctcttccctttgccaagagatcttcttccgatgagtttgtttccttcgtcagtttccaaacttctgcaatgagaagcaatggtggatacaggaaaggggtgaccgaggccaagataaaggtagccatcaatgggttcggtaggattggtaggaacttcttgaggtgttggcatggtcgtaaggactctcctcttgatgtcgttgtcattaacgacactggtggtgttaaacaagcatcacatctcctcaaatacgactcaactcttggaatctttgacgctgatgtcaaaccttcaggagactcagctctctctgttgatggaaagatcatcaagattgtatctgatcgtaacccatctaatctcccctggggggaactaggcattgacttagttatcgaaggaaccggagtgtttgttgacagagacggtgctgggaagcaccttcaggctggagccaagaaggttcttatcactgcacctggaaaaggtgacatcccaacttatgtcgttggtgtcaatgctgaactttacagccatgaagatacgatcatcagcaatgcgtcttgtactactaactgtctcgctccattcgtcaaggttcttgaccagaaatttgggatcataaagggtacaatgacaactactcactcatacactggtgaccaaaggttgttagatgcgagccaccgtgatctaaggagagcaagagcagcagctttgaacattgttccaacatctacaggagcagccaaagctgtggctcttgtgcttcctaacctcaaaggaaaacttaacggaattgcattgcgtgtgccaactccaaacgtttcagtggttgacttagtcgtgcaagtctccaagaaaacttttgctgaagaagtcaatgctgctttcagagatgcagctgagaaagagcttaaaggtatccttgacgtctgtgatgagcctcttgtctctgttgacttcaggtgctctgatgtatcctccactattgattcttccctcacaatggttatgggagatgatatggttaaagtgattgcttggtatgacaatgaatggggttactcacagagagtcgttgatttggctgacattgttgccaataactggaagtgaagactcaacaacctcttgatgtctgctccattattttttactgttacatgattcggaatgtataattgtagttcctgagtttattatgtatttgtgctctataatttatagtaataaacttgattcaaacatattacatcctctgcttaatacacaactctggtttgggaatgc

SEQ ID NO: 102106 - protein, 436 aa, Arabidopsis thaliana; identical to SEQ ID NO: 46225
  peptide (1)..(436): Ceres Seq. ID no. 13609443
  misc_feature (254)..(414): Pfam Name: Glyceraldehyde 3-phosphate dehydrogenase, Pfam Description: Glyceraldehyde 3-phosphate dehydrogenase,
  misc_feature (38)..(436): Homolog of NCBI NO: 15222111 NR Description: calcium-binding protein, calreticulin -related
  misc_feature (38)..(436): Homolog of NCBI NO: 2117520 NR Description: glyceraldehyde-3-phosphate dehydrogenase (NADP)
  misc_feature (38)..(436): Homolog of NCBI NO: 30688425 NR Description: glyceraldehyde 3-phosphate dehydrogenase A
  misc_feature (38)..(436): Homolog of NCBI NO: 120658 NR Description: Glyceraldehyde 3-phosphate dehydrogenase A,
  misc_feature (38)..(436): Homolog of NCBI NO: 20729 NR Description: precursor (AA -68 to 337) [Pisum sativum]
  misc_feature (38)..(436): Homolog of NCBI NO: 20455487 NR Description: Glyceraldehyde 3-phosphate dehydrogenase A,
  misc_feature (38)..(436): Homolog of NCBI NO: 120657 NR Description: Glyceraldehyde 3-phosphate dehydrogenase A,
  misc_feature (55)..(436): Homolog of NCBI NO: 22240 NR Description: GADPH (383 AA) [Zea mays]
  misc_feature (87)..(436): Homolog of NCBI NO: 166702 NR Description: glyceraldehyde 3-phosphate dehydrogenase A
  misc_feature (49)..(436): Homolog of NCBI NO: 120661 NR Description: Glyceraldehyde 3-phosphate dehydrogenase A,

SEQ ID NO: 102107 - protein, 399 aa, Arabidopsis thaliana; identical to SEQ ID NO: 46226
  peptide (1)..(399): Ceres Seq. ID no. 13609444
  misc_feature (217)..(377): Pfam Name: Glyceraldehyde 3-phosphate dehydrogenase, Pfam Description: Glyceraldehyde 3-phosphate dehydrogenase,
  misc_feature (1)..(399): Homolog of NCBI NO: 15222111 NR Description: calcium-binding protein, calreticulin -related
  misc_feature (1)..(399): Homolog of NCBI NO: 2117520 NR Description: glyceraldehyde-3-phosphate dehydrogenase (NADP)
  misc_feature (1)..(399): Homolog of NCBI NO: 30688425 NR Description: glyceraldehyde 3-phosphate dehydrogenase A
  misc_feature (1)..(399): Homolog of NCBI NO: 120658 NR Description: Glyceraldehyde 3-phosphate dehydrogenase A,
  misc_feature (1)..(399): Homolog of NCBI NO: 20729 NR Description: precursor (AA -68 to 337) [Pisum sativum]
  misc_feature (1)..(399): Homolog of NCBI NO: 20455487 NR Description: Glyceraldehyde 3-phosphate dehydrogenase A,
  misc_feature (1)..(399): Homolog of NCBI NO: 120657 NR Description: Glyceraldehyde 3-phosphate dehydrogenase A,
  misc_feature (18)..(399): Homolog of NCBI NO: 22240 NR Description: GADPH (383 AA) [Zea mays]
  misc_feature (50)..(399): Homolog of NCBI NO: 166702 NR Description: glyceraldehyde 3-phosphate dehydrogenase A
  misc_feature (12)..(399): Homolog of NCBI NO: 120661 NR Description: Glyceraldehyde 3-phosphate dehydrogenase A,

SEQ ID NO: 102108 - protein, 350 aa, Arabidopsis thaliana; identical to SEQ ID NO: 46227
  peptide (1)..(350): Ceres Seq. ID no. 13609445
  misc_feature (168)..(328): Pfam Name: Glyceraldehyde 3-phosphate dehydrogenase, Pfam Description: Glyceraldehyde 3-phosphate dehydrogenase,
  misc_feature (1)..(350): Homolog of NCBI NO: 15222111 NR Description: calcium-binding protein, calreticulin -related
  misc_feature (1)..(350): Homolog of NCBI NO: 2117520 NR Description: glyceraldehyde-3-phosphate dehydrogenase (NADP)
  misc_feature (1)..(350): Homolog of NCBI NO: 30688425 NR Description: glyceraldehyde 3-phosphate dehydrogenase A
  misc_feature (1)..(350): Homolog of NCBI NO: 120658 NR Description: Glyceraldehyde 3-phosphate dehydrogenase A,
  misc_feature (1)..(350): Homolog of NCBI NO: 20729 NR Description: precursor (AA -68 to 337) [Pisum sativum]
  misc_feature (1)..(350): Homolog of NCBI NO: 20455487 NR Description: Glyceraldehyde 3-phosphate dehydrogenase A,
  misc_feature (1)..(350): Homolog of NCBI NO: 120657 NR Description: Glyceraldehyde 3-phosphate dehydrogenase A,
  misc_feature (1)..(350): Homolog of NCBI NO: 22240 NR Description: GADPH (383 AA) [Zea mays]
  misc_feature (1)..(350): Homolog of NCBI NO: 166702 NR Description: glyceraldehyde 3-phosphate dehydrogenase A
  misc_feature (1)..(350): Homolog of NCBI NO: 120661 NR Description: Glyceraldehyde 3-phosphate dehydrogenase A,

SEQ ID NO: 102109 - DNA, 1345 bp, Arabidopsis thaliana
  misc_feature (1)..(1345): Ceres Seq. ID no. 13609446
  misc_feature: MA Experiment ID: 108434 Result: Up-regulated in Transcription
  misc_feature: MA Experiment 108434 PARAMETER Experiment Name: At_Root_Tips_cDNA_P Parameter: Tissue Value: Root Tips
  misc_feature: MA Experiment ID: 108573 Result: Up-regulated in Transcription
  misc_feature: MA Experiment 108573 PARAMETER Experiment Name: At_Drought_cDNA_P Parameter: Timepoint (hr) Value: 6
  misc_feature: MA Experiment 108573 PARAMETER Experiment Name: At_Drought_cDNA_P Parameter: Tissue Value: Aerial
  misc_feature: MA Experiment 108573 PARAMETER Experiment Name: At_Drought_cDNA_P Parameter: Treatment Value: Drought vs. No Drought
  misc_feature: MA Experiment ID: 108579 Result: Down-regulated in Transcription
  misc_feature: MA Experiment 108579 PARAMETER Experiment Name: At_4deg_Cold_cDNA_P Parameter: Temperature (deg C) Value: 4 vs. 22
  misc_feature: MA Experiment 108579 PARAMETER Experiment Name: At_4deg_Cold_cDNA_P Parameter: Timepoint (hr) Value: 6
  misc_feature: MA Experiment 108579 PARAMETER Experiment Name: At_4deg_Cold_cDNA_P Parameter: Tissue Value: Aerial
  misc_feature: MA Experiment ID: 108585 Result: Up-regulated in Transcription
  misc_feature: MA Experiment 108585 PARAMETER Experiment Name: At_5mM_NaNP_cDNA_P Parameter: Timepoint (hr) Value: 6
  misc_feature: MA Experiment 108585 PARAMETER Experiment Name: At_5mM_NaNP_cDNA_P Parameter: Tissue Value: Aerial
  misc_feature: MA Experiment 108585 PARAMETER Experiment Name: At_5mM_NaNP_cDNA_P Parameter: Treatment Value: null
  misc_feature: MA Experiment ID: 20000111 Result: Up-regulated in Transcription
  misc_feature: MA Experiment 20000111 PARAMETER Experiment Name: At_42deg_Heat_cDNA_P Parameter: Temperature (deg C) Value: 42 vs. 22
  misc_feature: MA Experiment 20000111 PARAMETER Experiment Name: At_42deg_Heat_cDNA_P Parameter: Timepoint (hr) Value: 6
  misc_feature: MA Experiment 20000111 PARAMETER Experiment Name: At_42deg_Heat_cDNA_P Parameter: Tissue Value: Aerial
  misc_feature: MA Experiment ID: 20000173 Result: Up-regulated in Transcription
  misc_feature: MA Experiment 20000173 PARAMETER Experiment Name: At_42deg_Heat_P Parameter: Age (day) Value: 14
  misc_feature: MA Experiment 20000173 PARAMETER Experiment Name: At_42deg_Heat_P Parameter: Organism Value: A. thaliana
  misc_feature: MA Experiment 20000173 PARAMETER Experiment Name: At_42deg_Heat_P Parameter: Plant Line Value: WS
  misc_feature: MA Experiment 20000173 PARAMETER Experiment Name: At_42deg_Heat_P Parameter: Temperature (deg C) Value: 42 vs. 22
  misc_feature: MA Experiment 20000173 PARAMETER Experiment Name: At_42deg_Heat_P Parameter: Timepoint (hr) Value: 6
  misc_feature: MA Experiment 20000173 PARAMETER Experiment Name: At_42deg_Heat_P Parameter: Tissue Value: Aerial
  misc_feature: MA Experiment ID: 20000224 Result: Down-regulated in Transcription
  misc_feature: MA Experiment ID: 20001450 Result: Up-regulated in Transcription
  misc_feature: MA Experiment 20001450 PARAMETER Experiment Name: At_Far-red-induction_P Parameter: Age (day) Value: 7
  misc_feature: MA Experiment 20001450 PARAMETER Experiment Name: At_Far-red-induction_P Parameter: Light Value: Far-red vs. White
  misc_feature: MA Experiment 20001450 PARAMETER Experiment Name: At_Far-red-induction_P Parameter: Organism Value: A. thaliana
  misc_feature: MA Experiment 20001450 PARAMETER Experiment Name: At_Far-red-induction_P Parameter: Plant Line Value: Columbia
  misc_feature: MA Experiment 20001450 PARAMETER Experiment Name: At_Far-red-induction_P Parameter: Timepoint (hr) Value: 8
  misc_feature: MA Experiment 20001450 PARAMETER Experiment Name: At_Far-red-induction_P Parameter: Tissue Value: Whole Plant
aaactggatgactggaatatccatttgcttttgagcgagtgatagaagcggaggcgattttctagggtttttgctcggaatcgatttcacgatgggaacgagcagcgatccgattcaagatggttccgatgagcagcagaagcgatcagagatctatacatacgaagcgccatggcacatctacgcaatgaattggagcgttcgtcgcgataagaagtatcgtctcgccatcactagcctcctcgagcaatacccgaaccgtgtcgagattgtgcagctcgatgaatccaatggtgagatccgttccgatcctaacctctcctttgagcatccttatccaccaacgaagaccattttcatacctgacaaggaatgccaaagacctgatcttctcgctacttcaagtgatttccttcgtttatggagaatcgctgatgatcattcccgtgttgagctcaaatcttgtctcaatagcaataagaacagtgagttttgtggtcctcttacttcttttgattggaatgaagctgagccacgtcgaattggaacatctagtactgatacgacttgtactatctgggacattgagcgtgaagctgttgatactcagcttattgctcatgataaggaagtttttgatattgcttggggtggtgttggtgtttttgcatctgtttcagctgatggctccgttagggtgtttgatcttcgtgataaggaacattcgacgattatctatgagagctccgagcctgatactcctttagtgcgtcttggttggaacaaacaggatcctaggtacatggctactattatcatggacagtgctaaagttgtggtgcttgacattcgttttccggctcttcctgtggttgagcttcaacgacatcaagctagtgtcaatgccattgcttgggctcctcatagctcttgtcacatttgtactgctggagatgattctcaagctttgatttgggatatttcatccatgggacagcatgttgaaggtggtcttgaccctattctagcttacactgctggtgctgagattgagcagcttcagtggtcctcttctcagcctgattgggtcgcaattgctttctctactaagctgcaaattctcagggtttgatcttttcaaagaatttctcatctcttgtcagattagattttactcattttctatcgtattaggggtctcgttacccttgttactatcctcaagatgtaaagactgttctcaatcgaattaatgaatctgtttgatcttgttgctatactcaagatgcaaagcttagcactgactcttattgatgtatgattgataagaaaggataatcctttg

SEQ ID NO: 102110 - protein, 346 aa, Arabidopsis thaliana; identical to SEQ ID NO: 24066
  peptide (1)..(346): Ceres Seq. ID no. 13609447
  misc_feature (1)..(346): Homolog of NCBI NO: 15222113 NR Description: flower pigmentation protein ATAN11 [Arabidopsis
  misc_feature (1)..(346): Homolog of NCBI NO: 2290528 NR Description: ATAN11 [Arabidopsis thaliana]
  misc_feature (1)..(346): Homolog of NCBI NO: 21593264 NR Description: flower pigmentation protein ATAN11 [Arabidopsis
  misc_feature (1)..(346): Homolog of NCBI NO: 22324803 NR Description: WD-repeat protein GhTTG2 [Gossypium hirsutum]
  misc_feature (1)..(346): Homolog of NCBI NO: 15231593 NR Description: transducin / WD-40 repeat protein family thaliana] >gi|1402884|emb|CAA66815.1| unknown [Arabidopsis
  misc_feature (1)..(346): Homolog of NCBI NO: 28393624 NR Description: putative transcriptional regulator protein
  misc_feature (1)..(346): Homolog of NCBI NO: 22324809 NR Description: WD-repeat protein GhTTG4 [Gossypium hirsutum]
  misc_feature (33)..(346): Homolog of NCBI NO: 13346196 NR Description: WD1521 [Gossypium hirsutum]
  misc_feature (223)..(346): Homolog of NCBI NO: 37719680 NR Description: WD40 repeat protein [Zea mays]
  misc_feature (11)..(135): Homolog of NCBI NO: 37719680 NR Description: WD40 repeat protein [Zea mays]

SEQ ID NO: 102111 - protein, 314 aa, Arabidopsis thaliana; identical to SEQ ID NO: 24067
  peptide (1)..(314): Ceres Seq. ID no. 13609448
  misc_feature (1)..(314): Homolog of NCBI NO: 15222113 NR Description: flower pigmentation protein ATAN11 [Arabidopsis
  misc_feature (1)..(314): Homolog of NCBI NO: 2290528 NR Description: ATAN11 [Arabidopsis thaliana]
  misc_feature (1)..(314): Homolog of NCBI NO: 21593264 NR Description: flower pigmentation protein ATAN11 [Arabidopsis
  misc_feature (1)..(314): Homolog of NCBI NO: 22324803 NR Description: WD-repeat protein GhTTG2 [Gossypium hirsutum]
  misc_feature (1)..(314): Homolog of NCBI NO: 15231593 NR Description: transducin / WD-40 repeat protein family thaliana] >gi|1402884|emb|CAA66815.1| unknown [Arabidopsis
  misc_feature (1)..(314): Homolog of NCBI NO: 28393624 NR Description: putative transcriptional regulator protein
  misc_feature (1)..(314): Homolog of NCBI NO: 22324809 NR Description: WD-repeat protein GhTTG4 [Gossypium hirsutum]
  misc_feature (1)..(314): Homolog of NCBI NO: 13346196 NR Description: WD1521 [Gossypium hirsutum]
  misc_feature (191)..(314): Homolog of NCBI NO: 37719680 NR Description: WD40 repeat protein [Zea mays]
  misc_feature (1)..(103): Homolog of NCBI NO: 37719680 NR Description: WD40 repeat protein [Zea mays]

SEQ ID NO: 102112 - DNA, 1093 bp, Arabidopsis thaliana
  misc_feature (1)..(1093): Ceres Seq. ID no. 13609449
  misc_feature: MA Experiment ID: 108434 Result: Up-regulated in Transcription
  misc_feature: MA Experiment 108434 PARAMETER Experiment Name: At_Root_Tips_cDNA_P Parameter: Tissue Value: Root Tips
  misc_feature: MA Experiment ID: 108461 Result: Down-regulated in Transcription
  misc_feature: MA Experiment 108461 PARAMETER Experiment Name: At_Germinating_Seeds_cDNA_P Parameter: Age (day) Value: 1 vs. 0
  misc_feature: MA Experiment 108461 PARAMETER Experiment Name: At_Germinating_Seeds_cDNA_P Parameter: Tissue Value: Germinating Seeds
  misc_feature: MA Experiment ID: 108462 Result: Down-regulated in Transcription
  misc_feature: MA Experiment 108462 PARAMETER Experiment Name: At_Germinating_Seeds_cDNA_P Parameter: Age (day) Value: 2 vs. 0
  misc_feature: MA Experiment 108462 PARAMETER Experiment Name: At_Germinating_Seeds_cDNA_P Parameter: Tissue Value: Germinating Seeds
  misc_feature: MA Experiment ID: 108463 Result: Down-regulated in Transcription
  misc_feature: MA Experiment 108463 PARAMETER Experiment Name: At_Germinating_Seeds_cDNA_P Parameter: Age (day) Value: 3 vs. 0
  misc_feature: MA Experiment 108463 PARAMETER Experiment Name: At_Germinating_Seeds_cDNA_P Parameter: Tissue Value: Germinating Seeds
  misc_feature: MA Experiment ID: 108464 Result: Down-regulated in Transcription
  misc_feature: MA Experiment 108464 PARAMETER Experiment Name: At_Germinating_Seeds_cDNA_P Parameter: Age (day) Value: 4 vs. 0
  misc_feature: MA Experiment 108464 PARAMETER Experiment Name: At_Germinating_Seeds_cDNA_P Parameter: Tissue Value: Germinating Seeds
  misc_feature: MA Experiment ID: 108569 Result: Up-regulated in Transcription
  misc_feature: MA Experiment 108569 PARAMETER Experiment Name: At_0.001%_MeJA__cDNA_P Parameter: Timepoint (hr) Value: 6
  misc_feature: MA Experiment 108569 PARAMETER Experiment Name: At_0.001%_MeJA__cDNA_P Parameter: Tissue Value: Aerial
  misc_feature: MA Experiment 108569 PARAMETER Experiment Name: At_0.001%_MeJA__cDNA_P Parameter: Treatment Value: 0.001% MeJA vs. No Treatment
  misc_feature: MA Experiment ID: 108573 Result: Up-regulated in Transcription
  misc_feature: MA Experiment 108573 PARAMETER Experiment Name: At_Drought_cDNA_P Parameter: Timepoint (hr) Value: 6
  misc_feature: MA Experiment 108573 PARAMETER Experiment Name: At_Drought_cDNA_P Parameter: Tissue Value: Aerial
  misc_feature: MA Experiment 108573 PARAMETER Experiment Name: At_Drought_cDNA_P Parameter: Treatment Value: Drought vs. No Drought
  misc_feature: MA Experiment ID: 108585 Result: Up-regulated in Transcription
  misc_feature: MA Experiment 108585 PARAMETER Experiment Name: At_5mM_NaNP_cDNA_P Parameter: Timepoint (hr) Value: 6
  misc_feature: MA Experiment 108585 PARAMETER Experiment Name: At_5mM_NaNP_cDNA_P Parameter: Tissue Value: Aerial
  misc_feature: MA Experiment 108585 PARAMETER Experiment Name: At_5mM_NaNP_cDNA_P Parameter: Treatment Value: null
  misc_feature: MA Experiment ID: 20000179 Result: Down-regulated in Transcription
  misc_feature: MA Experiment 20000179 PARAMETER Experiment Name: At_Germinating_Seeds_P Parameter: Age (hr) Value: 6 vs. 0
  misc_feature: MA Experiment 20000179 PARAMETER Experiment Name: At_Germinating_Seeds_P Parameter: Tissue Value: Germinating Seeds
  misc_feature: MA Experiment ID: 20000224 Result: Down-regulated in Transcription
ctctttcttcttcttctcgtcgtcgtttgtcactttagagctacttcttcttcttctctgctaagcctttcctctcgacttgatacttttctccagtaagggtttgcaaagatgaagcttgatactagtgggttcgagacttccatgcctatgattggatttggctcgagcagtgatatgcttgatgagctttcttctgtaccctcgtttgatctaccccgtactaaagagtttgatggatttcagaaaaaagctaaagacatgttgaagcatgcaaaaggaacaaccactctcgcttttatcttcaaaggtggtgttatggtcgctgctgattctcgggctagcatgggaggatatatctcctcacaatctgtgaagaagattattgaaatcaatccttatatgctcggtacaatggctggaggagctgctgattgccaattctggcacagaaatcttggaattaagtgccgtctacatgagctggcaaacaagaggagaatctctgtttccggagcttcgaaacttcttgccaacatgctctattcataccgtggaatgggactttctgttggtacaatgattgctggatgggacgaaactggtcccggactatactatgtcgacaacgaaggaggacggctcaagggagacaggttttcagtcggttctggttcaccatatgcttacggtgtgctggacagcgggtacaaatatgatatgtcagttgaagaagcttccgagttagcaaggagatcaatctaccatgcgacattccgtgatggagccagtggtggagttgctagcgtgtaccacgttggtcccgaaggatggacgaaactatcaggagatgatgttggggagctacactaccattactaccccgtggcaccagctaccgcagaacaagtcatggaggaagcaacagccgaataaaaatcctgtttagttttctaatcgttcactccctttcttgttgttgcattttgtggtagtatatactgagttgtctctagctgaagctttggtattctattttactgatctgaaatgttgctcgcggattattctctataagattctctttttctgc

SEQ ID NO: 102113 - protein, 274 aa, Arabidopsis thaliana; identical to SEQ ID NO: 22484
  peptide (1)..(274): Ceres Seq. ID no. 13609450
  misc_feature (54)..(236): Pfam Name: Proteasome A-type and B-type Pfam Description: Proteasome A-type and B-type
  misc_feature (1)..(274): Homolog of NCBI NO: 15222152 NR Description: 20S proteasome beta subunit E1 (PBE1) thaliana] >gi|3914425|sp|O23717|PSB5_ARATH Proteasome subunit type 5 precursor (20S proteasome subunit E) (Proteasome epsilon
  misc_feature (1)..(274): Homolog of NCBI NO: 15292875 NR Description: putative proteasome epsilon chain precursor
  misc_feature (1)..(271): Homolog of NCBI NO: 15231544 NR Description: 20S proteasome beta subunit E, putative thaliana] >gi|9294292|dbj|BAB02194.1| proteasome epsilon chain [Arabidopsis thaliana] >gi|16612308|gb|AAL27514.1|AF439846_1
  misc_feature (1)..(270): Homolog of NCBI NO: 3914430 NR Description: Proteasome subunit beta type 5 precursor (20S subunit E) (Proteasome epsilon chain) >gi|7435872|pir||T09132 26S
  misc_feature (1)..(273): Homolog of NCBI NO: 8671510 NR Description: beta 5 subunit of 20S proteasome [Oryza sativa
  misc_feature (106)..(272): Homolog of NCBI NO: 3980264 NR Description: 20S proteasome beta subunit [Cicer arietinum]
  misc_feature (1)..(74): Homolog of NCBI NO: 3980264 NR Description: 20S proteasome beta subunit [Cicer arietinum]
  misc_feature (74)..(273): Homolog of NCBI NO: 16588840 NR Description: putative 20S proteasome beta subunit 5 [Prunus
  misc_feature (77)..(250): Homolog of NCBI NO: 14594931 NR Description: putative beta5 proteasome subunit [Nicotiana
  misc_feature (16)..(260): Homolog of NCBI NO: 6755204 NR Description: proteasome (prosome, macropain) subunit, beta PSMB5 [Mus musculus] >gi|2897809|dbj|BAA24917.1| PSMB5 [Mus [Mus

SEQ ID NO: 102114 - protein, 263 aa, Arabidopsis thaliana; identical to SEQ ID NO: 22485
  peptide (1)..(263): Ceres Seq. ID no. 13609451
  misc_feature (43)..(225): Pfam Name: Proteasome A-type and B-type Pfam Description: Proteasome A-type and B-type
  misc_feature (1)..(263): Homolog of NCBI NO: 15222152 NR Description: 20S proteasome beta subunit E1 (PBE1) thaliana] >gi|3914425|sp|O23717|PSB5_ARATH Proteasome subunit type 5 precursor (20S proteasome subunit E) (Proteasome epsilon
  misc_feature (1)..(263): Homolog of NCBI NO: 15292875 NR Description: putative proteasome epsilon chain precursor
  misc_feature (1)..(260): Homolog of NCBI NO: 15231544 NR Description: 20S proteasome beta subunit E, putative thaliana] >gi|9294292|dbj|BAB02194.1| proteasome epsilon chain [Arabidopsis thaliana] >gi|16612308|gb|AAL27514.1|AF439846_1
  misc_feature (1)..(259): Homolog of NCBI NO: 3914430 NR Description: Proteasome subunit beta type 5 precursor (20S subunit E) (Proteasome epsilon chain) >gi|7435872|pir||T09132 26S
  misc_feature (1)..(262): Homolog of NCBI NO: 8671510 NR Description: beta 5 subunit of 20S proteasome [Oryza sativa
  misc_feature (95)..(261): Homolog of NCBI NO: 3980264 NR Description: 20S proteasome beta subunit [Cicer arietinum]
  misc_feature (1)..(63): Homolog of NCBI NO: 3980264 NR Description: 20S proteasome beta subunit [Cicer arietinum]
  misc_feature (63)..(262): Homolog of NCBI NO: 16588840 NR Description: putative 20S proteasome beta subunit 5 [Prunus
  misc_feature (66)..(239): Homolog of NCBI NO: 14594931 NR Description: putative beta5 proteasome subunit [Nicotiana
  misc_feature (5)..(249): Homolog of NCBI NO: 6755204 NR Description: proteasome (prosome, macropain) subunit, beta PSMB5 [Mus musculus] >gi|2897809|dbj|BAA24917.1| PSMB5 [Mus [Mus

SEQ ID NO: 102115 - protein, 261 aa, Arabidopsis thaliana; identical to SEQ ID NO: 22486
  peptide (1)..(261): Ceres Seq. ID no. 13609452
  misc_feature (41)..(223): Pfam Name: Proteasome A-type and B-type Pfam Description: Proteasome A-type and B-type
  misc_feature (1)..(261): Homolog of NCBI NO: 15222152 NR Description: 20S proteasome beta subunit E1 (PBE1) thaliana] >gi|3914425|sp|O23717|PSB5_ARATH Proteasome subunit type 5 precursor (20S proteasome subunit E) (Proteasome epsilon
  misc_feature (1)..(261): Homolog of NCBI NO: 15292875 NR Description: putative proteasome epsilon chain precursor
  misc_feature (1)..(258): Homolog of NCBI NO: 15231544 NR Description: 20S proteasome beta subunit E, putative thaliana] >gi|9294292|dbj|BAB02194.1| proteasome epsilon chain [Arabidopsis thaliana] >gi|16612308|gb|AAL27514.1|AF439846_1
  misc_feature (1)..(257): Homolog of NCBI NO: 3914430 NR Description: Proteasome subunit beta type 5 precursor (20S subunit E) (Proteasome epsilon chain) >gi|7435872|pir||T09132 26S
  misc_feature (1)..(260): Homolog of NCBI NO: 8671510 NR Description: beta 5 subunit of 20S proteasome [Oryza sativa
  misc_feature (93)..(259): Homolog of NCBI NO: 3980264 NR Description: 20S proteasome beta subunit [Cicer arietinum]
  misc_feature (1)..(61): Homolog of NCBI NO: 3980264 NR Description: 20S proteasome beta subunit [Cicer arietinum]
  misc_feature (61)..(260): Homolog of NCBI NO: 16588840 NR Description: putative 20S proteasome beta subunit 5 [Prunus
  misc_feature (64)..(237): Homolog of NCBI NO: 14594931 NR Description: putative beta5 proteasome subunit [Nicotiana
  misc_feature (3)..(247): Homolog of NCBI NO: 6755204 NR Description: proteasome (prosome, macropain) subunit, beta PSMB5 [Mus musculus] >gi|2897809|dbj|BAA24917.1| PSMB5 [Mus [Mus

SEQ ID NO: 102116 - DNA, 1583 bp, Arabidopsis thaliana
  misc_feature (1)..(1583): Ceres Seq. ID no. 13609453
  misc_feature: MA Experiment ID: 108434 Result: Down-regulated in Transcription
  misc_feature: MA Experiment 108434 PARAMETER Experiment Name: At_Root_Tips_cDNA_P Parameter: Tissue Value: Root Tips
  misc_feature: MA Experiment ID: 108462 Result: Up-regulated in Transcription
  misc_feature: MA Experiment 108462 PARAMETER Experiment Name: At_Germinating_Seeds_cDNA_P Parameter: Age (day) Value: 2 vs. 0
  misc_feature: MA Experiment 108462 PARAMETER Experiment Name: At_Germinating_Seeds_cDNA_P Parameter: Tissue Value: Germinating Seeds
  misc_feature: MA Experiment ID: 108464 Result: Up-regulated in Transcription
  misc_feature: MA Experiment 108464 PARAMETER Experiment Name: At_Germinating_Seeds_cDNA_P Parameter: Age (day) Value: 4 vs. 0
  misc_feature: MA Experiment 108464 PARAMETER Experiment Name: At_Germinating_Seeds_cDNA_P Parameter: Tissue Value: Germinating Seeds
  misc_feature: MA Experiment ID: 108594 Result: Down-regulated in Transcription
  misc_feature: MA Experiment 108594 PARAMETER Experiment Name: At_Ler-rhl_Root_cDNA_P Parameter: Plant Line Value: null
  misc_feature: MA Experiment ID: 108595 Result: Down-regulated in Transcription
  misc_feature: MA Experiment 108595 PARAMETER Experiment Name: At_Ler-pi_Ovule_cDNA_P Parameter: Plant Line Value: null
  misc_feature: MA Experiment ID: 20000185 Result: Down-regulated in Transcription
  misc_feature: MA Experiment 20000185 PARAMETER Experiment Name: At_Roots__P Parameter: Age (day) Value: 7 vs. 21
  misc_feature: MA Experiment 20000185 PARAMETER Experiment Name: At_Roots__P Parameter: Organism Value: A. thaliana
  misc_feature: MA Experiment 20000185 PARAMETER Experiment Name: At_Roots__P Parameter: Tissue Value: Roots vs. Whole Plant
  misc_feature: MA Experiment ID: 20001248 Result: Down-regulated in Transcription
  misc_feature: MA Experiment 20001248 PARAMETER Experiment Name: At_Far-red-induction_P Parameter: Age (day) Value: 7
  misc_feature: MA Experiment 20001248 PARAMETER Experiment Name: At_Far-red-induction_P Parameter: Light Value: Far-red vs. White
  misc_feature: MA Experiment 20001248 PARAMETER Experiment Name: At_Far-red-induction_P Parameter: Organism Value: A. thaliana
  misc_feature: MA Experiment 20001248 PARAMETER Experiment Name: At_Far-red-induction_P Parameter: Plant Line Value: Columbia
  misc_feature: MA Experiment 20001248 PARAMETER Experiment Name: At_Far-red-induction_P Parameter: Timepoint (hr) Value: 4
  misc_feature: MA Experiment 20001248 PARAMETER Experiment Name: At_Far-red-induction_P Parameter: Tissue Value: Whole Plant
aaagaagacggaacaaaaaacaaaaacagagccaggaataatgtcagtcttcctctgtttcctctgcctcttaccccttatcttaatcttcttgaaaaatctcaaaccatcgaaatggaagcttcctccaggcccaaagaagcttccgatcatcgggaacttacaccaacgccgggaattacatcccaggaacagtcggaatctttccgaaaagtacggaccaatcgtgtttctccgatacggattcgtccccgtggtcgtgatctcgtcaaaagaagcagcagaggaagttctcaagacccacgatcttgagtgttgtagccgaccagagacggttgggaccagagcaatctcttacaactttaaagacatcggattcgcaccgtacggtgaagattggagaacgatgcggaagctctcggtggtcgagctcttcagctcgaaaaagcttcaatctttcaggtatatcagagaggaagagaacgacttgtgtgtcaagaaactctctgatttagcttcgagacgatctttggtgaatcttgagaaaaccctttttactttagtcggaagtatagtgtgtaggatagggtttgggataaatctccgtgagtgtgagttcgttgatgaagatagcatcgatgatcttgtgcacaagtctgaagatgtcataaggaattctatcttctctgatttctttcccggattaatgggtaggctcatcgagtggatcttcagtgagaggaagagattgaatagactttactcggaagtagacactttctttcagaatattcttgatgatcatctcaagcctggaagagagagctctgatatcatcgatgtgatgattgatatgatgaagaagcaagagaaagagggagactctttcaagttcaccactgatcatctcaaagggatgatctcggacatatttctagcaggagttggaacaagctccactacattgatatgggcgatgaccgagctgatcagaaacccgagagtgatgaagaaagttcaagacgagattcggacaacacttggggacaagaaggagagaatcacagaagaagatttaaaccagcttcactacttcaagctcatggtcaaagagatattcaggttacatccagcagctccacttttgctcccaagagagacattgtctcatgtcaagatccaaggctacgatattcctgctaaaacacagatcatgatcaacgcttacgcgattgcacgtgatccaaaactatggacaaaccctgatgagtttaaccctgataggttccttgacagctccatagattacagaggactgaactttgagctattaccgtttggatctggtaggaggatatgtccagggatgacaatggggatcgccattgttgaattgggactattgaatttgctttacttcttcgactgggggctaccagagaaggaagaagccaaggagatcatcaccgggaatgaagttgctcttgaccttgttcaagtttttctccactgaatgtgttttggttatggaatgtttgtactacactaagcttgattctaaattaataacatcttacaagtac

SEQ ID NO: 102117 - protein, 503 aa, Arabidopsis thaliana
  peptide (1)..(503): Ceres Seq. ID no. 13609454
  misc_feature (42)..(471): Pfam Name: Cytochrome P450 Pfam Description: Cytochrome P450
  misc_feature (14)..(503): Homolog of NCBI NO: 15222177 NR Description: cytochrome P450 71B28 [Arabidopsis thaliana]
  misc_feature (14)..(503): Homolog of NCBI NO: 21618278 NR Description: putative cytochrome P450 monooxygenase
  misc_feature (14)..(503): Homolog of NCBI NO: 15222180 NR Description: cytochrome P450 71B29 [Arabidopsis thaliana]
  misc_feature (14)..(503): Homolog of NCBI NO: 15231632 NR Description: cytochrome P450 71B15 [Arabidopsis thaliana] Cytochrome P450 71B15 >gi|9279673|dbj|BAB01230.1| cytochrome p450 thaliana] >gi|26450995|dbj|BAC42604.1| putative cytochrome P450
  misc_feature (14)..(503): Homolog of NCBI NO: 15222182 NR Description: cytochrome P450 71B7 [Arabidopsis thaliana]
  misc_feature (14)..(498): Homolog of NCBI NO: 15231526 NR Description: cytochrome P450 71B23 [Arabidopsis thaliana] Cytochrome P450 71B23 >gi|11994440|dbj|BAB02442.1| cytochrome
  misc_feature (14)..(503): Homolog of NCBI NO: 15231524 NR Description: cytochrome P450 71B21 [Arabidopsis thaliana] Cytochrome P450 71B21 >gi|11994438|dbj|BAB02440.1| cytochrome
  misc_feature (14)..(498): Homolog of NCBI NO: 15231525 NR Description: cytochrome P450 71B22 [Arabidopsis thaliana] Cytochrome P450 71B22 >gi|11994439|dbj|BAB02441.1| cytochrome [Arabidopsis thaliana] >gi|13430718|gb|AAK25981.1|AF360271_1
  misc_feature (14)..(487): Homolog of NCBI NO: 15222174 NR Description: cytochrome P450 family [Arabidopsis thaliana]
  misc_feature (13)..(500): Homolog of NCBI NO: 15231536 NR Description: cytochrome P450 family [Arabidopsis thaliana] cytochrome P450 [Arabidopsis thaliana] AT3g26280/MTC11_19 [Arabidopsis thaliana]
KKTEQKTKTEPGIMSVFLCFLCLLPLILIFLKNLKPSKWKLPPGPKKLPIIGNLHQRRELHPRNSRNLSEKYGPIVFLRYGFVPVVVISSKEAAEEVLKTHDLECCSRPETVGTRAISYNFKDIGFAPYGEDWRTMRKLSVVELFSSKKLQSFRYIREEENDLCVKKLSDLASRRSLVNLEKTLFTLVGSIVCRIGFGINLRECEFVDEDSIDDLVHKSEDVIRNSIFSDFFPGLMGRLIEWIFSERKRLNRLYSEVDTFFQNILDDHLKPGRESSDIIDVMIDMMKKQEKEGDSFKFTTDHLKGMISDIFLAGVGTSSTTLIWAMTELIRNPRVMKKVQDEIRTTLGDKKERITEEDLNQLHYFKLMVKEIFRLHPAAPLLLPRETLSHVKIQGYDIPAKTQIMINAYAIARDPKLWTNPDEFNPDRFLDSSIDYRGLNFELLPFGSGRRICPGMTMGIAIVELGLLNLLYFFDWGLPEKEEAKEIITGNEVALDLVQVFLH

SEQ ID NO: 102118 - protein, 490 aa, Arabidopsis thaliana; identical to SEQ ID NO: 23084
  peptide (1)..(490): Ceres Seq. ID no. 13609455
  misc_feature (29)..(458): Pfam Name: Cytochrome P450 Pfam Description: Cytochrome P450
  misc_feature (1)..(490): Homolog of NCBI NO: 15222177 NR Description: cytochrome P450 71B28 [Arabidopsis thaliana]
  misc_feature (1)..(490): Homolog of NCBI NO: 21618278 NR Description: putative cytochrome P450 monooxygenase
  misc_feature (1)..(490): Homolog of NCBI NO: 15222180 NR Description: cytochrome P450 71B29 [Arabidopsis thaliana]
  misc_feature (1)..(490): Homolog of NCBI NO: 15231632 NR Description: cytochrome P450 71B15 [Arabidopsis thaliana] Cytochrome P450 71B15 >gi|9279673|dbj|BAB01230.1| cytochrome p450 thaliana] >gi|26450995|dbj|BAC42604.1| putative cytochrome P450
  misc_feature (1)..(490): Homolog of NCBI NO: 15222182 NR Description: cytochrome P450 71B7 [Arabidopsis thaliana]
  misc_feature (1)..(485): Homolog of NCBI NO: 15231526 NR Description: cytochrome P450 71B23 [Arabidopsis thaliana] Cytochrome P450 71B23 >gi|11994440|dbj|BAB02442.1| cytochrome
  misc_feature (1)..(490): Homolog of NCBI NO: 15231524 NR Description: cytochrome P450 71B21 [Arabidopsis thaliana] Cytochrome P450 71B21 >gi|11994438|dbj|BAB02440.1| cytochrome
  misc_feature (1)..(485): Homolog of NCBI NO: 15231525 NR Description: cytochrome P450 71B22 [Arabidopsis thaliana] Cytochrome P450 71B22 >gi|11994439|dbj|BAB02441.1| cytochrome [Arabidopsis thaliana] >gi|13430718|gb|AAK25981.1|AF360271_1
  misc_feature (1)..(474): Homolog of NCBI NO: 15222174 NR Description: cytochrome P450 family [Arabidopsis thaliana]
  misc_feature (1)..(487): Homolog of NCBI NO: 15231536 NR Description: cytochrome P450 family [Arabidopsis thaliana] cytochrome P450 [Arabidopsis thaliana] AT3g26280/MTC11_19 [Arabidopsis thaliana]

SEQ ID NO: 102119 - protein, 368 aa, Arabidopsis thaliana; identical to SEQ ID NO: 23085
  peptide (1)..(368): Ceres Seq. ID no. 13609456
  misc_feature (1)..(336): Pfam Name: Cytochrome P450 Pfam Description: Cytochrome P450
  misc_feature (1)..(368): Homolog of NCBI NO: 15222177 NR Description: cytochrome P450 71B28 [Arabidopsis thaliana]
  misc_feature (1)..(368): Homolog of NCBI NO: 21618278 NR Description: putative cytochrome P450 monooxygenase
  misc_feature (1)..(368): Homolog of NCBI NO: 15222180 NR Description: cytochrome P450 71B29 [Arabidopsis thaliana]
  misc_feature (1)..(368): Homolog of NCBI NO: 15231632 NR Description: cytochrome P450 71B15 [Arabidopsis thaliana] Cytochrome P450 71B15 >gi|9279673|dbj|BAB01230.1| cytochrome p450 thaliana] >gi|26450995|dbj|BAC42604.1| putative cytochrome P450
  misc_feature (1)..(368): Homolog of NCBI NO: 15222182 NR Description: cytochrome P450 71B7 [Arabidopsis thaliana]
  misc_feature (1)..(363): Homolog of NCBI NO: 15231526 NR Description: cytochrome P450 71B23 [Arabidopsis thaliana] Cytochrome P450 71B23 >gi|11994440|dbj|BAB02442.1| cytochrome
  misc_feature (1)..(368): Homolog of NCBI NO: 15231524 NR Description: cytochrome P450 71B21 [Arabidopsis thaliana] Cytochrome P450 71B21 >gi|11994438|dbj|BAB02440.1| cytochrome
  misc_feature (1)..(363): Homolog of NCBI NO: 15231525 NR Description: cytochrome P450 71B22 [Arabidopsis thaliana] Cytochrome P450 71B22 >gi|11994439|dbj|BAB02441.1| cytochrome [Arabidopsis thaliana] >gi|13430718|gb|AAK25981.1|AF360271_1
  misc_feature (1)..(352): Homolog of NCBI NO: 15222174 NR Description: cytochrome P450 family [Arabidopsis thaliana]
  misc_feature (1)..(365): Homolog of NCBI NO: 15231536 NR Description: cytochrome P450 family [Arabidopsis thaliana] cytochrome P450 [Arabidopsis thaliana] AT3g26280/MTC11_19 [Arabidopsis thaliana]

SEQ ID NO: 102120 - DNA, 1311 bp, Arabidopsis thaliana
  misc_feature (1)..(1311): Ceres Seq. ID no. 13609465
  misc_feature: MA Experiment ID: 108462 Result: Down-regulated in Transcription
  misc_feature: MA Experiment 108462 PARAMETER Experiment Name: At_Germinating_Seeds_cDNA_P Parameter: Age (day) Value: 2 vs. 0
  misc_feature: MA Experiment 108462 PARAMETER Experiment Name: At_Germinating_Seeds_cDNA_P Parameter: Tissue Value: Germinating Seeds
  misc_feature: MA Experiment ID: 108463 Result: Down-regulated in Transcription
  misc_feature: MA Experiment 108463 PARAMETER Experiment Name: At_Germinating_Seeds_cDNA_P Parameter: Age (day) Value: 3 vs. 0
  misc_feature: MA Experiment 108463 PARAMETER Experiment Name: At_Germinating_Seeds_cDNA_P Parameter: Tissue Value: Germinating Seeds
  misc_feature: MA Experiment ID: 108464 Result: Down-regulated in Transcription
  misc_feature: MA Experiment 108464 PARAMETER Experiment Name: At_Germinating_Seeds_cDNA_P Parameter: Age (day) Value: 4 vs. 0
  misc_feature: MA Experiment 108464 PARAMETER Experiment Name: At_Germinating_Seeds_cDNA_P Parameter: Tissue Value: Germinating Seeds
  misc_feature: MA Experiment ID: 108573 Result: Up-regulated in Transcription
  misc_feature: MA Experiment 108573 PARAMETER Experiment Name: At_Drought_cDNA_P Parameter: Timepoint (hr) Value: 6
  misc_feature: MA Experiment 108573 PARAMETER Experiment Name: At_Drought_cDNA_P Parameter: Tissue Value: Aerial
  misc_feature: MA Experiment 108573 PARAMETER Experiment Name: At_Drought_cDNA_P Parameter: Treatment Value: Drought vs. No Drought
  misc_feature: MA Experiment ID: 108585 Result: Down-regulated in Transcription
  misc_feature: MA Experiment 108585 PARAMETER Experiment Name: At_5mM_NaNP_cDNA_P Parameter: Timepoint (hr) Value: 6
  misc_feature: MA Experiment 108585 PARAMETER Experiment Name: At_5mM_NaNP_cDNA_P Parameter: Tissue Value: Aerial
  misc_feature: MA Experiment 108585 PARAMETER Experiment Name: At_5mM_NaNP_cDNA_P Parameter: Treatment Value: null
  misc_feature: MA Experiment ID: 108595 Result: Down-regulated in Transcription
  misc_feature: MA Experiment 108595 PARAMETER Experiment Name: At_Ler-pi_Ovule_cDNA_P Parameter: Plant Line Value: null
  misc_feature: MA Experiment ID: 108607 Result: Down-regulated in Transcription
  misc_feature: MA Experiment 108607 PARAMETER Experiment Name: At_100uM_ABA_cDNA_P Parameter: Timepoint (hr) Value: 4
  misc_feature: MA Experiment 108607 PARAMETER Experiment Name: At_100uM_ABA_cDNA_P Parameter: Tissue Value: Aerial
  misc_feature: MA Experiment 108607 PARAMETER Experiment Name: At_100uM_ABA_cDNA_P Parameter: Treatment Value: 100uM ABA vs. No Treatment
  misc_feature: MA Experiment ID: 108668 Result: Down-regulated in Transcription
  misc_feature: MA Experiment 108668 PARAMETER Experiment Name: At_2mM_SA_cDNA_P Parameter: Plant Line Value: WS
  misc_feature: MA Experiment 108668 PARAMETER Experiment Name: At_2mM_SA_cDNA_P Parameter: Timepoint (hr) Value: 6
  misc_feature: MA Experiment 108668 PARAMETER Experiment Name: At_2mM_SA_cDNA_P Parameter: Treatment Value: 2mM SA vs. No Treatment
  misc_feature: MA Experiment ID: 20000069 Result: Up-regulated in Transcription
  misc_feature: MA Experiment 20000069 PARAMETER Experiment Name: At_100uM_ABA_Mutants_cDNA_P Parameter: Plant Line Value: CS23
  misc_feature: MA Experiment 20000069 PARAMETER Experiment Name: At_100uM_ABA_Mutants_cDNA_P Parameter: Timepoint (hr) Value: 6
  misc_feature: MA Experiment 20000069 PARAMETER Experiment Name: At_100uM_ABA_Mutants_cDNA_P Parameter: Tissue Value: Aerial
  misc_feature: MA Experiment 20000069 PARAMETER Experiment Name: At_100uM_ABA_Mutants_cDNA_P Parameter: Treatment Value: 100uM ABA vs. No Treatment
  misc_feature: MA Experiment ID: 20000070 Result: Up-regulated in Transcription
  misc_feature: MA Experiment 20000070 PARAMETER Experiment Name: At_100uM_ABA_Mutants_cDNA_P Parameter: Plant Line Value: CS24
  misc_feature: MA Experiment 20000070 PARAMETER Experiment Name: At_100uM_ABA_Mutants_cDNA_P Parameter: Timepoint (hr) Value: 6
  misc_feature: MA Experiment 20000070 PARAMETER Experiment Name: At_100uM_ABA_Mutants_cDNA_P Parameter: Tissue Value: Aerial
  misc_feature: MA Experiment 20000070 PARAMETER Experiment Name: At_100uM_ABA_Mutants_cDNA_P Parameter: Treatment Value: 100uM ABA vs. No Treatment
  misc_feature: MA Experiment ID: 20000071 Result: Up-regulated in Transcription
  misc_feature: MA Experiment 20000071 PARAMETER Experiment Name: At_100uM_ABA_Mutants_cDNA_P Parameter: Plant Line Value: CS8104
  misc_feature: MA Experiment 20000071 PARAMETER Experiment Name: At_100uM_ABA_Mutants_cDNA_P Parameter: Timepoint (hr) Value: 6
  misc_feature: MA Experiment 20000071 PARAMETER Experiment Name: At_100uM_ABA_Mutants_cDNA_P Parameter: Tissue Value: Aerial
  misc_feature: MA Experiment 20000071 PARAMETER Experiment Name: At_100uM_ABA_Mutants_cDNA_P Parameter: Treatment Value: 100uM ABA vs. No Treatment
  misc_feature: MA Experiment ID: 20000072 Result: Up-regulated in Transcription
  misc_feature: MA Experiment 20000072 PARAMETER Experiment Name: At_100uM_ABA_Mutants_cDNA_P Parameter: Plant Line Value: CS8105
  misc_feature: MA Experiment 20000072 PARAMETER Experiment Name: At_100uM_ABA_Mutants_cDNA_P Parameter: Timepoint (hr) Value: 6
  misc_feature: MA Experiment 20000072 PARAMETER Experiment Name: At_100uM_ABA_Mutants_cDNA_P Parameter: Tissue Value: Aerial
  misc_feature: MA Experiment 20000072 PARAMETER Experiment Name: At_100uM_ABA_Mutants_cDNA_P Parameter: Treatment Value: 100uM ABA vs. No Treatment
  misc_feature: MA Experiment ID: 20000086 Result: Up-regulated in Transcription
  misc_feature: MA Experiment 20000086 PARAMETER Experiment Name: At_100uM_ABA_Mutants_cDNA_P Parameter: Plant Line Value: CS22
  misc_feature: MA Experiment 20000086 PARAMETER Experiment Name: At_100uM_ABA_Mutants_cDNA_P Parameter: Timepoint (hr) Value: 6
  misc_feature: MA Experiment 20000086 PARAMETER Experiment Name: At_100uM_ABA_Mutants_cDNA_P Parameter: Tissue Value: Aerial
  misc_feature: MA Experiment 20000086 PARAMETER Experiment Name: At_100uM_ABA_Mutants_cDNA_P Parameter: Treatment Value: 100uM ABA vs. No Treatment
  misc_feature: MA Experiment ID: 20000088 Result: Up-regulated in Transcription
  misc_feature: MA Experiment 20000088 PARAMETER Experiment Name: At_100uM_ABA_Mutants_cDNA_P Parameter: Plant Line Value: Landsberg
  misc_feature: MA Experiment 20000088 PARAMETER Experiment Name: At_100uM_ABA_Mutants_cDNA_P Parameter: Timepoint (hr) Value: 6
  misc_feature: MA Experiment 20000088 PARAMETER Experiment Name: At_100uM_ABA_Mutants_cDNA_P Parameter: Tissue Value: Aerial
  misc_feature: MA Experiment 20000088 PARAMETER Experiment Name: At_100uM_ABA_Mutants_cDNA_P Parameter: Treatment Value: 100uM ABA vs. No Treatment
  misc_feature: MA Experiment ID: 20000089 Result: Up-regulated in Transcription
  misc_feature: MA Experiment ID: 20000090 Result: Up-regulated in Transcription
  misc_feature: MA Experiment ID: 20000111 Result: Down-regulated in Transcription
  misc_feature: MA Experiment 20000111 PARAMETER Experiment Name: At_42deg_Heat_cDNA_P Parameter: Temperature (deg C) Value: 42 vs. 22
  misc_feature: MA Experiment 20000111 PARAMETER Experiment Name: At_42deg_Heat_cDNA_P Parameter: Timepoint (hr) Value: 6
  misc_feature: MA Experiment 20000111 PARAMETER Experiment Name: At_42deg_Heat_cDNA_P Parameter: Tissue Value: Aerial
  misc_feature: MA Experiment ID: 20000117 Result: Up-regulated in Transcription
  misc_feature: MA Experiment 20000117 PARAMETER Experiment Name: At_100uM_ABA_Mutants_cDNA_P Parameter: Plant Line Value: Columbia
  misc_feature: MA Experiment 20000117 PARAMETER Experiment Name: At_100uM_ABA_Mutants_cDNA_P Parameter: Timepoint (hr) Value: 6
  misc_feature: MA Experiment 20000117 PARAMETER Experiment Name: At_100uM_ABA_Mutants_cDNA_P Parameter: Tissue Value: Aerial
  misc_feature: MA Experiment 20000117 PARAMETER Experiment Name: At_100uM_ABA_Mutants_cDNA_P Parameter: Treatment Value: 100uM ABA vs. No Treatment
  misc_feature: MA Experiment ID: 20000314 Result: Down-regulated in Transcription
  misc_feature: MA Experiment 20000314 PARAMETER Experiment Name: At_14day_Shoots-Roots_Sub_P Parameter: Age (day) Value: 14
  misc_feature: MA Experiment 20000314 PARAMETER Experiment Name: At_14day_Shoots-Roots_Sub_P Parameter: Organism Value: A. thaliana
  misc_feature: MA Experiment 20000314 PARAMETER Experiment Name: At_14day_Shoots-Roots_Sub_P Parameter: Plant Line Value: WS
  misc_feature: MA Experiment 20000314 PARAMETER Experiment Name: At_14day_Shoots-Roots_Sub_P Parameter: Tissue Value: Roots vs. Whole Plant
  misc_feature: MA Experiment ID: 20000315 Result: Down-regulated in Transcription
  misc_feature: MA Experiment 20000315 PARAMETER Experiment Name: At_14day_Shoots-Roots_Sub_P Parameter: Age (day) Value: 14
  misc_feature: MA Experiment 20000315 PARAMETER Experiment Name: At_14day_Shoots-Roots_Sub_P Parameter: Organism Value: A. thaliana
  misc_feature: MA Experiment 20000315 PARAMETER Experiment Name: At_14day_Shoots-Roots_Sub_P Parameter: Plant Line Value: WS
  misc_feature: MA Experiment 20000315 PARAMETER Experiment Name: At_14day_Shoots-Roots_Sub_P Parameter: Tissue Value: Shoots vs. Whole Plant
  misc_feature: MA Experiment ID: 20000328 Result: Down-regulated in Transcription
  misc_feature: MA Experiment 20000328 PARAMETER Experiment Name: At_42deg_Heat_Sub_P Parameter: Age (day) Value: 14
  misc_feature: MA Experiment 20000328 PARAMETER Experiment Name: At_42deg_Heat_Sub_P Parameter: Organism Value: A. thaliana
  misc_feature: MA Experiment 20000328 PARAMETER Experiment Name: At_42deg_Heat_Sub_P Parameter: Plant Line Value: WS
  misc_feature: MA Experiment 20000328 PARAMETER Experiment Name: At_42deg_Heat_Sub_P Parameter: Temperature (deg C) Value: 42 vs. 22
  misc_feature: MA Experiment 20000328 PARAMETER Experiment Name: At_42deg_Heat_Sub_P Parameter: Timepoint (hr) Value: 6
  misc_feature: MA Experiment 20000328 PARAMETER Experiment Name: At_42deg_Heat_Sub_P Parameter: Tissue Value: Aerial
actgcaaattttgatattttgggttttagcagtgaagtttgcgaaaatggcgtcttcggtttttctatccagtttctcgtcatcgtcttctttgcaactctgctcttcctttcacggcgagtacttagctccgtcgagatgctttctcggagctccggtcacttcctcttctttatcactctccggtaagaagaactcatattctccgagacagttccatgtttctgccaagaaagtttctgggttagaggaagccattagaatcagaaaaatgagagagcttgaaactaaatcaaaagttaggagaaatccaccattaagacgtggaagagtatcgcctcgtcttcttgtacctgatcacattccaaggcctccttatgttgagtctggtgtattaccggatatatcaagtgagttccagattcctggtcctgaaggcattgcgaaaatgagagctgcttgcgagcttgctgctcgggttttaaactatgctggaactttggttaagccatctgttacgactaatgaaatcgataaagctgtgcatgatatgattattgaagctggtgcttatccttcacctcttggatatggtggatttcctaaaagtgtgtgtacttcagttaatgagtgtatgtgtcacggaataccagattctcgccagctacagagcggggatataatcaacatcgatgtcacggtttacttggatggttaccatggagatacgtcgagaactttcttctgtggagaagttgacgaaggtttcaaacgacttgtgaaggttacggaagaatgtttggagagaggtattgcagtttgtaaagacggagcaagcttcaagaaaatcgggaaaagaatcagtgagcatgcggaaaagttcggctacaacgttgtggagcggtttgttgggcatggtgttggaccagtattccactccgaacctcttatatatcattaccgaaatgatgagcctggactaatggttgagggacagacattcacaattgaaccgattctcacgattggaaccacagaatgtgtaacatggccagacaactggactactctgacagcagatggtggcgtcgctgctcagtttgagcataccattctgattactagaactggttcagagattcttaccaaatgctaaaactattcacattgatcatttccatttcaccttttatttgctgatcatttaaggtccatagtataaattcattatctttgagaccatagtctaacaatttgtgttagtgccatcttttaagatctcaagattagtttgctattagaaattttccc

SEQ ID NO: 102121 - protein, 384 aa, Arabidopsis thaliana; identical to SEQ ID NO: 21333
  peptide (1)..(384): Ceres Seq. ID no. 13609466
  misc_feature (16)..(384): Homolog of NCBI NO: 15222218 NR Description: methionine aminopeptidase I (MAP1) -related thaliana] >gi|25402759|pir||C86267 probable methionine
  misc_feature (16)..(384): Homolog of NCBI NO: 11320956 NR Description: methionine aminopeptidase-like protein
  misc_feature (74)..(382): Homolog of NCBI NO: 7939560 NR Description: methionine aminopeptidase-like protein
  misc_feature (74)..(382): Homolog of NCBI NO: 15230872 NR Description: methionine aminopeptidase -related [Arabidopsis
  misc_feature (74)..(382): Homolog of NCBI NO: 11320958 NR Description: methionine aminopeptidase-like protein
  misc_feature (59)..(384): Homolog of NCBI NO: 38345794 NR Description: OSJNBa0085I10.11 [Oryza sativa (japonica
  misc_feature (48)..(383): Homolog of NCBI NO: 34394646 NR Description: putative methionine aminopeptidase I (MAP1)
  misc_feature (73)..(384): Homolog of NCBI NO: 18419957 NR Description: methionyl aminopeptidase-related protein
  misc_feature (106)..(384): Homolog of NCBI NO: 25289731 NR Description: methionyl aminopeptidase-like protein [imported] -
  misc_feature (105)..(382): Homolog of NCBI NO: 23018702 NR Description: hypothetical protein [Thermobifida fusca]

SEQ ID NO: 102122 - protein, 369 aa, Arabidopsis thaliana; identical to SEQ ID NO: 21334
  peptide (1)..(369): Ceres Seq. ID no. 13609467
  misc_feature (1)..(369): Homolog of NCBI NO: 15222218 NR Description: methionine aminopeptidase I (MAP1) -related thaliana] >gi|25402759|pir||C86267 probable methionine
  misc_feature (1)..(369): Homolog of NCBI NO: 11320956 NR Description: methionine aminopeptidase-like protein
  misc_feature (59)..(367): Homolog of NCBI NO: 7939560 NR Description: methionine aminopeptidase-like protein
  misc_feature (59)..(367): Homolog of NCBI NO: 15230872 NR Description: methionine aminopeptidase -related [Arabidopsis
  misc_feature (59)..(367): Homolog of NCBI NO: 11320958 NR Description: methionine aminopeptidase-like protein
  misc_feature (44)..(369): Homolog of NCBI NO: 38345794 NR Description: OSJNBa0085I10.11 [Oryza sativa (japonica
  misc_feature (33)..(368): Homolog of NCBI NO: 34394646 NR Description: putative methionine aminopeptidase I (MAP1)
  misc_feature (58)..(369): Homolog of NCBI NO: 18419957 NR Description: methionyl aminopeptidase-related protein
  misc_feature (91)..(369): Homolog of NCBI NO: 25289731 NR Description: methionyl aminopeptidase-like protein [imported] -
  misc_feature (90)..(367): Homolog of NCBI NO: 23018702 NR Description: hypothetical protein [Thermobifida fusca]

SEQ ID NO: 102123 - protein, 294 aa, Arabidopsis thaliana; identical to SEQ ID NO: 21335
  peptide (1)..(294): Ceres Seq. ID no. 13609468
  misc_feature (1)..(294): Homolog of NCBI NO: 15222218 NR Description: methionine aminopeptidase I (MAP1) -related thaliana] >gi|25402759|pir||C86267 probable methionine
  misc_feature (1)..(294): Homolog of NCBI NO: 11320956 NR Description: methionine aminopeptidase-like protein
  misc_feature (1)..(292): Homolog of NCBI NO: 7939560 NR Description: methionine aminopeptidase-like protein
  misc_feature (1)..(292): Homolog of NCBI NO: 15230872 NR Description: methionine aminopeptidase -related [Arabidopsis
  misc_feature (1)..(292): Homolog of NCBI NO: 11320958 NR Description: methionine aminopeptidase-like protein
  misc_feature (1)..(294): Homolog of NCBI NO: 38345794 NR Description: OSJNBa0085I10.11 [Oryza sativa (japonica
  misc_feature (1)..(293): Homolog of NCBI NO: 34394646 NR Description: putative methionine aminopeptidase I (MAP1)
  misc_feature (1)..(294): Homolog of NCBI NO: 18419957 NR Description: methionyl aminopeptidase-related protein
  misc_feature (16)..(294): Homolog of NCBI NO: 25289731 NR Description: methionyl aminopeptidase-like protein [imported] -
  misc_feature (15)..(292): Homolog of NCBI NO: 23018702 NR Description: hypothetical protein [Thermobifida fusca]

SEQ ID NO: 102124 - DNA, 1102 bp, Arabidopsis thaliana
  misc_feature (1)..(1102): Ceres Seq. ID no. 13609469
  misc_feature: MA Experiment ID: 108435 Result: Up-regulated in Transcription
  misc_feature: MA Experiment 108435 PARAMETER Experiment Name: At_stm_Mutants_cDNA_P Parameter: Plant Line Value: wt Landsburg vs stm
  misc_feature: MA Experiment 108435 PARAMETER Experiment Name: At_stm_Mutants_cDNA_P Parameter: Tissue Value: Shoot Apical Meristem Region
  misc_feature: MA Experiment ID: 108461 Result: Up-regulated in Transcription
  misc_feature: MA Experiment 108461 PARAMETER Experiment Name: At_Germinating_Seeds_cDNA_P Parameter: Age (day) Value: 1 vs. 0
  misc_feature: MA Experiment 108461 PARAMETER Experiment Name: At_Germinating_Seeds_cDNA_P Parameter: Tissue Value: Germinating Seeds
  misc_feature: MA Experiment ID: 108462 Result: Up-regulated in Transcription
  misc_feature: MA Experiment 108462 PARAMETER Experiment Name: At_Germinating_Seeds_cDNA_P Parameter: Age (day) Value: 2 vs. 0
  misc_feature: MA Experiment 108462 PARAMETER Experiment Name: At_Germinating_Seeds_cDNA_P Parameter: Tissue Value: Germinating Seeds
  misc_feature: MA Experiment ID: 108463 Result: Up-regulated in Transcription
  misc_feature: MA Experiment 108463 PARAMETER Experiment Name: At_Germinating_Seeds_cDNA_P Parameter: Age (day) Value: 3 vs. 0
  misc_feature: MA Experiment 108463 PARAMETER Experiment Name: At_Germinating_Seeds_cDNA_P Parameter: Tissue Value: Germinating Seeds
  misc_feature: MA Experiment ID: 108488 Result: Up-regulated in Transcription
  misc_feature: MA Experiment ID: 108595 Result: Up-regulated in Transcription
  misc_feature: MA Experiment 108595 PARAMETER Experiment Name: At_Ler-pi_Ovule_cDNA_P Parameter: Plant Line Value: null
  misc_feature: MA Experiment ID: 20000111 Result: Down-regulated in Transcription
  misc_feature: MA Experiment 20000111 PARAMETER Experiment Name: At_42deg_Heat_cDNA_P Parameter: Temperature (deg C) Value: 42 vs. 22
  misc_feature: MA Experiment 20000111 PARAMETER Experiment Name: At_42deg_Heat_cDNA_P Parameter: Timepoint (hr) Value: 6
  misc_feature: MA Experiment 20000111 PARAMETER Experiment Name: At_42deg_Heat_cDNA_P Parameter: Tissue Value: Aerial
  misc_feature: MA Experiment ID: 20000113 Result: Down-regulated in Transcription
  misc_feature: MA Experiment 20000113 PARAMETER Experiment Name: At_42deg_Heat_cDNA_P Parameter: Temperature (deg C) Value: 42 vs. 22
  misc_feature: MA Experiment 20000113 PARAMETER Experiment Name: At_42deg_Heat_cDNA_P Parameter: Timepoint (hr) Value: 8
  misc_feature: MA Experiment 20000113 PARAMETER Experiment Name: At_42deg_Heat_cDNA_P Parameter: Tissue Value: Aerial
  misc_feature: MA Experiment ID: 20000180 Result: Up-regulated in Transcription
  misc_feature: MA Experiment 20000180 PARAMETER Experiment Name: At_Germinating_Seeds_P Parameter: Age (hr) Value: 24 vs. 0
  misc_feature: MA Experiment 20000180 PARAMETER Experiment Name: At_Germinating_Seeds_P Parameter: Tissue Value: Germinating Seeds
  misc_feature: MA Experiment ID: 20000234 Result: Up-regulated in Transcription
  misc_feature: MA Experiment 20000234 PARAMETER Experiment Name: At_Siliques_P Parameter: Age (day) Value: 21
  misc_feature: MA Experiment 20000234 PARAMETER Experiment Name: At_Siliques_P Parameter: Organism Value: A. thaliana
  misc_feature: MA Experiment 20000234 PARAMETER Experiment Name: At_Siliques_P Parameter: Plant Line Value: WS
  misc_feature: MA Experiment 20000234 PARAMETER Experiment Name: At_Siliques_P Parameter: Tissue Value: Less Than 5mm Siliques vs. Whole Plant
  misc_feature: MA Experiment ID: 20000264 Result: Up-regulated in Transcription
  misc_feature: MA Experiment 20000264 PARAMETER Experiment Name: At_Open_Flower_P Parameter: Age (day) Value: 21
  misc_feature: MA Experiment 20000264 PARAMETER Experiment Name: At_Open_Flower_P Parameter: Plant Line Value: WS
  misc_feature: MA Experiment 20000264 PARAMETER Experiment Name: At_Open_Flower_P Parameter: Tissue Value: Open Flower vs. Whole Plant
  misc_feature: MA Experiment ID: 20000265 Result: Up-regulated in Transcription
  misc_feature: MA Experiment 20000265 PARAMETER Experiment Name: At_Open_Flower_P Parameter: Age (day) Value: 21
  misc_feature: MA Experiment 20000265 PARAMETER Experiment Name: At_Open_Flower_P Parameter: Plant Line Value: WS
  misc_feature: MA Experiment 20000265 PARAMETER Experiment Name: At_Open_Flower_P Parameter: Tissue Value: Closed Flower vs. Whole Plant
  misc_feature: MA Experiment ID: 20001557 Result: Down-regulated in Transcription
  misc_feature: MA Experiment 20001557 PARAMETER Experiment Name: At_Drought_Soil_Dry_P Parameter: Age (day) Value: 27
  misc_feature: MA Experiment 20001557 PARAMETER Experiment Name: At_Drought_Soil_Dry_P Parameter: Organism Value: A. thaliana
  misc_feature: MA Experiment 20001557 PARAMETER Experiment Name: At_Drought_Soil_Dry_P Parameter: Plant Line Value: WS
  misc_feature: MA Experiment 20001557 PARAMETER Experiment Name: At_Drought_Soil_Dry_P Parameter: Post Timepoint (hr) Value: 3
  misc_feature: MA Experiment 20001557 PARAMETER Experiment Name: At_Drought_Soil_Dry_P Parameter: Post-Treatment Value: Re-Water vs. No Drought
  misc_feature: MA Experiment 20001557 PARAMETER Experiment Name: At_Drought_Soil_Dry_P Parameter: Timepoint (day) Value: 13
  misc_feature: MA Experiment 20001557 PARAMETER Experiment Name: At_Drought_Soil_Dry_P Parameter: Treatment Value: Drought vs. No Drought
  misc_feature: MA Experiment ID: 20001558 Result: Down-regulated in Transcription
  misc_feature: MA Experiment 20001558 PARAMETER Experiment Name: At_Drought_Soil_Dry_P Parameter: Age (day) Value: 27
  misc_feature: MA Experiment 20001558 PARAMETER Experiment Name: At_Drought_Soil_Dry_P Parameter: Organism Value: A. thaliana
  misc_feature: MA Experiment 20001558 PARAMETER Experiment Name: At_Drought_Soil_Dry_P Parameter: Plant Line Value: WS
  misc_feature: MA Experiment 20001558 PARAMETER Experiment Name: At_Drought_Soil_Dry_P Parameter: Post Timepoint (hr) Value: 6
  misc_feature: MA Experiment 20001558 PARAMETER Experiment Name: At_Drought_Soil_Dry_P Parameter: Post-Treatment Value: Re-Water vs. No Drought
  misc_feature: MA Experiment 20001558 PARAMETER Experiment Name: At_Drought_Soil_Dry_P Parameter: Timepoint (day) Value: 13
  misc_feature: MA Experiment 20001558 PARAMETER Experiment Name: At_Drought_Soil_Dry_P Parameter: Treatment Value: Drought vs. No Drought
agttcaactaataacgcaaaaatcagtttctctttgagtaagtgtttattacaattaaactaactcaggcaagtctatgatcatggcttcttctgctgctgcatcgatctctatgataactctaaggaacctctctcgcaatcatcaatctcaccaaagcacttttctcggtttctctagatccttccataaccaaaggatctcatctaacagtccaggtctctccacacgagcaagatccaccacttcctccactggaggtttcttcagaaccatttgcagcagcagtagcaatgactactccagaccaactaagatccaagagcttaacgtctacgagttcaacgaaggtgatcgaaacagtccagcggttttaaaactagggaaaaaaccagatcagctttgtctcggagatcttgtccccttcacaaacaaactctacacaggagatctcacaaaacgcataggaatcaccgcaggtctctgcgttttgatccaacatgttccagagaagaaaggtgatcgctttgaagcttcttacagtttctacttcggagattatggtcacatatcagttcaaggaccttatctcacttacgaggacacgtttcttgctatcaccggtggctccggcgtgtttgaaggagcttatggacaggtcaagcttcgtcagcttgtgtatcctacgaagctgttttacactttctacttgaaaggtgttgctgctgatttacctgtggagcttaccggaaaacatgttgagccgtcgaaggaagtgaaaccggcggctgaagctcaggcgactcagcccggcgctacgatcgctaactttactaattgaaatctaaatctttgtgggtgtctttgtcatggatcttattgggctgttgttcattgtgtttacattttaataatgggcctaaataatgagcctttgtattgggccgttctcgtaagcgtaatgtgtcccgtccctataagctggatttaagcgcgtgaactccaccttccgatatttttttttgatagattatatcaaatccatggatactttctatatttggaaagtttggcttagtaggctcgtggccatgtttgagct

SEQ ID NO: 102125 - protein, 254 aa, Arabidopsis thaliana; identical to SEQ ID NO: 35412
  peptide (1)..(254): Ceres Seq. ID no. 13609470
  misc_feature (74)..(254): Pfam Name: Allene oxide cyclase Pfam Description: Allene oxide cyclase
  misc_feature (1)..(254): Homolog of NCBI NO: 15222241 NR Description: allene oxide cyclase family [Arabidopsis >gi|16323065|gb|AAL15267.1| At1g13280/T6J4_23 [Arabidopsis >gi|22655330|gb|AAM98257.1| At1g13280/T6J4_23 [Arabidopsis
  misc_feature (3)..(254): Homolog of NCBI NO: 18404658 NR Description: allene oxide cyclase family [Arabidopsis >gi|7939564|dbj|BAA95765.1| gene_id:K13N2.12~pir||S57813~similar unknown protein [Arabidopsis thaliana]
  misc_feature (78)..(254): Homolog of NCBI NO: 25518012 NR Description: T6J4.4 protein - Arabidopsis thaliana
  misc_feature (3)..(254): Homolog of NCBI NO: 18404656 NR Description: allene oxide cyclase family [Arabidopsis >gi|7939563|dbj|BAA95764.1| gene_id:K13N2.11~pir||S57813~similar unknown protein [Arabidopsis thaliana]
  misc_feature (3)..(254): Homolog of NCBI NO: 15230874 NR Description: allene oxide cyclase family [Arabidopsis >gi|7939562|dbj|BAA95763.1| gene_id:K13N2.10~pir||S57813~similar
  misc_feature (10)..(254): Homolog of NCBI NO: 15320414 NR Description: ERD12 protein [Arabidopsis thaliana]
  misc_feature (6)..(254): Homolog of NCBI NO: 40644132 NR Description: allene oxide cyclase [Medicago truncatula]
  misc_feature (1)..(254): Homolog of NCBI NO: 16416376 NR Description: mangrin [Bruguiera sexangula]
  misc_feature (3)..(254): Homolog of NCBI NO: 40644130 NR Description: allene oxide cyclase [Nicotiana tabacum]
  misc_feature (43)..(254): Homolog of NCBI NO: 21727906 NR Description: allene oxide cyclase [Oryza sativa (japonica

SEQ ID NO: 102126 - protein, 252 aa, Arabidopsis thaliana; identical to SEQ ID NO: 35413
  peptide (1)..(252): Ceres Seq. ID no. 13609471
  misc_feature (72)..(252): Pfam Name: Allene oxide cyclase Pfam Description: Allene oxide cyclase
  misc_feature (1)..(252): Homolog of NCBI NO: 15222241 NR Description: allene oxide cyclase family [Arabidopsis >gi|16323065|gb|AAL15267.1| At1g13280/T6J4_23 [Arabidopsis >gi|22655330|gb|AAM98257.1| At1g13280/T6J4_23 [Arabidopsis
  misc_feature (1)..(252): Homolog of NCBI NO: 18404658 NR Description: allene oxide cyclase family [Arabidopsis >gi|7939564|dbj|BAA95765.1| gene_id:K13N2.12~pir||S57813~similar unknown protein [Arabidopsis thaliana]
  misc_feature (76)..(252): Homolog of NCBI NO: 25518012 NR Description: T6J4.4 protein - Arabidopsis thaliana
  misc_feature (1)..(252): Homolog of NCBI NO: 18404656 NR Description: allene oxide cyclase family [Arabidopsis >gi|7939563|dbj|BAA95764.1| gene_id:K13N2.11~pir||S57813~similar unknown protein [Arabidopsis thaliana]
  misc_feature (1)..(252): Homolog of NCBI NO: 15230874 NR Description: allene oxide cyclase family [Arabidopsis >gi|7939562|dbj|BAA95763.1| gene_id:K13N2.10~pir||S57813~similar
  misc_feature (8)..(252): Homolog of NCBI NO: 15320414 NR Description: ERD12 protein [Arabidopsis thaliana]
  misc_feature (4)..(252): Homolog of NCBI NO: 40644132 NR Description: allene oxide cyclase [Medicago truncatula]
  misc_feature (1)..(252): Homolog of NCBI NO: 16416376 NR Description: mangrin [Bruguiera sexangula]
  misc_feature (1)..(252): Homolog of NCBI NO: 40644130 NR Description: allene oxide cyclase [Nicotiana tabacum]
  misc_feature (41)..(252): Homolog of NCBI NO: 21727906 NR Description: allene oxide cyclase [Oryza sativa (japonica

SEQ ID NO: 102127 - protein, 242 aa, Arabidopsis thaliana; identical to SEQ ID NO: 35414
  peptide (1)..(242): Ceres Seq. ID no. 13609472
  misc_feature (62)..(242): Pfam Name: Allene oxide cyclase Pfam Description: Allene oxide cyclase
  misc_feature (1)..(242): Homolog of NCBI NO: 15222241 NR Description: allene oxide cyclase family [Arabidopsis >gi|16323065|gb|AAL15267.1| At1g13280/T6J4_23 [Arabidopsis >gi|22655330|gb|AAM98257.1| At1g13280/T6J4_23 [Arabidopsis
  misc_feature (1)..(242): Homolog of NCBI NO: 18404658 NR Description: allene oxide cyclase family [Arabidopsis >gi|7939564|dbj|BAA95765.1| gene_id:K13N2.12~pir||S57813~similar unknown protein [Arabidopsis thaliana]
  misc_feature (66)..(242): Homolog of NCBI NO: 25518012 NR Description: T6J4.4 protein - Arabidopsis thaliana
  misc_feature (1)..(242): Homolog of NCBI NO: 18404656 NR Description: allene oxide cyclase family [Arabidopsis >gi|7939563|dbj|BAA95764.1| gene_id:K13N2.11~pir||S57813~similar unknown protein [Arabidopsis thaliana]
  misc_feature (1)..(242): Homolog of NCBI NO: 15230874 NR Description: allene oxide cyclase family [Arabidopsis >gi|7939562|dbj|BAA95763.1| gene_id:K13N2.10~pir||S57813~similar
  misc_feature (1)..(242): Homolog of NCBI NO: 15320414 NR Description: ERD12 protein [Arabidopsis thaliana]
  misc_feature (1)..(242): Homolog of NCBI NO: 40644132 NR Description: allene oxide cyclase [Medicago truncatula]
  misc_feature (1)..(242): Homolog of NCBI NO: 16416376 NR Description: mangrin [Bruguiera sexangula]
  misc_feature (1)..(242): Homolog of NCBI NO: 40644130 NR Description: allene oxide cyclase [Nicotiana tabacum]
  misc_feature (31)..(242): Homolog of NCBI NO: 21727906 NR Description: allene oxide cyclase [Oryza sativa (japonica

SEQ ID NO: 102128 - DNA, 1306 bp, Arabidopsis thaliana
  misc_feature (1)..(1306): Ceres Seq. ID no. 13609477
  misc_feature: MA Experiment ID: 20000087 Result: Down-regulated in Transcription
  misc_feature: MA Experiment 20000087 PARAMETER Experiment Name: At_100uM_ABA_Mutants_cDNA_P Parameter: Plant Line Value: WS
  misc_feature: MA Experiment 20000087 PARAMETER Experiment Name: At_100uM_ABA_Mutants_cDNA_P Parameter: Timepoint (hr) Value: 6
  misc_feature: MA Experiment 20000087 PARAMETER Experiment Name: At_100uM_ABA_Mutants_cDNA_P Parameter: Tissue Value: Aerial
  misc_feature: MA Experiment 20000087 PARAMETER Experiment Name: At_100uM_ABA_Mutants_cDNA_P Parameter: Treatment Value: 100uM ABA vs. No Treatment
  misc_feature: MA Experiment ID: 20000179 Result: Up-regulated in Transcription
  misc_feature: MA Experiment 20000179 PARAMETER Experiment Name: At_Germinating_Seeds_P Parameter: Age (hr) Value: 6 vs. 0
  misc_feature: MA Experiment 20000179 PARAMETER Experiment Name: At_Germinating_Seeds_P Parameter: Tissue Value: Germinating Seeds
  misc_feature: MA Experiment ID: 20000185 Result: Up-regulated in Transcription
  misc_feature: MA Experiment 20000185 PARAMETER Experiment Name: At_Roots__P Parameter: Age (day) Value: 7 vs. 21
  misc_feature: MA Experiment 20000185 PARAMETER Experiment Name: At_Roots__P Parameter: Organism Value: A. thaliana
  misc_feature: MA Experiment 20000185 PARAMETER Experiment Name: At_Roots__P Parameter: Tissue Value: Roots vs. Whole Plant
  misc_feature: MA Experiment ID: 20000437 Result: Down-regulated in Transcription
  misc_feature: MA Experiment 20000437 PARAMETER Experiment Name: At_Drought_P Parameter: Age (day) Value: 8
  misc_feature: MA Experiment 20000437 PARAMETER Experiment Name: At_Drought_P Parameter: Organism Value: A. thaliana
  misc_feature: MA Experiment 20000437 PARAMETER Experiment Name: At_Drought_P Parameter: Plant Line Value: WS
  misc_feature: MA Experiment 20000437 PARAMETER Experiment Name: At_Drought_P Parameter: Timepoint (hr) Value: 24
  misc_feature: MA Experiment 20000437 PARAMETER Experiment Name: At_Drought_P Parameter: Tissue Value: Whole Plant
  misc_feature: MA Experiment 20000437 PARAMETER Experiment Name: At_Drought_P Parameter: Treatment Value: Drought vs. No Drought
  misc_feature: MA Experiment ID: 20000794 Result: Down-regulated in Transcription
  misc_feature: MA Experiment 20000794 PARAMETER Experiment Name: At_Petals_P Parameter: Age (day) Value: 23-25 days
  misc_feature: MA Experiment 20000794 PARAMETER Experiment Name: At_Petals_P Parameter: Plant Line Value: WS
  misc_feature: MA Experiment 20000794 PARAMETER Experiment Name: At_Petals_P Parameter: Tissue Value: Petals vs. Whole plant
  misc_feature: MA Experiment ID: 20001459 Result: Up-regulated in Transcription
  misc_feature: MA Experiment 20001459 PARAMETER Experiment Name: At_50mM_NH4NO3_L-to-H_P Parameter: Age (day) Value: Undefined
  misc_feature: MA Experiment 20001459 PARAMETER Experiment Name: At_50mM_NH4NO3_L-to-H_P Parameter: Organism Value: Undefined
  misc_feature: MA Experiment 20001459 PARAMETER Experiment Name: At_50mM_NH4NO3_L-to-H_P Parameter: Plant Line Value: Undefined
  misc_feature: MA Experiment 20001459 PARAMETER Experiment Name: At_50mM_NH4NO3_L-to-H_P Parameter: Timepoint (hr) Value: 4
  misc_feature: MA Experiment 20001459 PARAMETER Experiment Name: At_50mM_NH4NO3_L-to-H_P Parameter: Tissue Value: Siliques
  misc_feature: MA Experiment 20001459 PARAMETER Experiment Name: At_50mM_NH4NO3_L-to-H_P Parameter: Treatment Value: 50mM NH4NO3 vs. 100mM Manitol
  misc_feature: MA Experiment ID: 20001905 Result: Down-regulated in Transcription
  misc_feature: MA Experiment 20001905 PARAMETER Experiment Name: At_Drought_Reproduction_P Parameter: Age (day) Value: 40
  misc_feature: MA Experiment 20001905 PARAMETER Experiment Name: At_Drought_Reproduction_P Parameter: Organism Value: A. thaliana
  misc_feature: MA Experiment 20001905 PARAMETER Experiment Name: At_Drought_Reproduction_P Parameter: Plant Line Value: WS
  misc_feature: MA Experiment 20001905 PARAMETER Experiment Name: At_Drought_Reproduction_P Parameter: Timepoint (day) Value: 10
  misc_feature: MA Experiment 20001905 PARAMETER Experiment Name: At_Drought_Reproduction_P Parameter: Tissue Value: Rosettes
  misc_feature: MA Experiment 20001905 PARAMETER Experiment Name: At_Drought_Reproduction_P Parameter: Treatment Value: Drought vs. No Drought
ctcactcactattttcacattctcttctctctcgatatcatctaaatctctctcgatctcaatttcgcaaaatggctgacaagaagatcagaatcggaatcaacggtttcggaagaatcggtcgtttggttgctagagttgttcttcagagggatgatgttgagctcgtcgctgttaacgatcctttcatcaccaccgagtacatgacatacatgtttaagtatgacagtgttcacggtcagtggaagcaccatgagcttaaggtgaaggatgacaaaactcttctcttcggtgagaagccagtcactgttttcggcatcaggaaccctgaggacatcccatggggtgaggctggagctgactttgttgttgagtctactggtgtcttcactgacaaagacaaggctgctgctcacttgaagggtggtgctaaaaaggttgtcatctctgccccaagcaaagatgcgcccatgttcgttgttggtgtcaacgagcacgagtacaagtctgaccttgacattgtttccaacgctagttgcaccactaactgccttgctcctcttgccaaggttattaatgacaggtttggcattgttgagggactcatgaccactgtccactctatcactgctactcagaagacagttgatggtccatcaatgaaggactggagaggtggaagagctgcttccttcaacattattcctagcagcactggtgccgccaaggctgttgggaaagtgttgccatccctcaatggaaaattgaccggaatgtctttccgtgttccaaccgttgatgtctcagttgttgatctcaccgttagacttgagaaagctgcaacatacgacgaaatcaagaaggccatcaaggaggaatctgaaggcaaaatgaagggaattttgggatacactgaggatgatgttgtgtctaccgactttgttggtgacaacaggtcaagcattttcgatgccaaggctgggattgcattgagcgacaagtttgtgaagttggtgtcatggtacgacaacgaatggggttacagttctcgtgtcgttgaccttatcgttcacatgtcaaaggcctaagcttacaccggcgagagtttgtgtgtggttgagttcgtactgttctgaataaaaaaaaggagaaaagaaaactcgagttgttatgttttttcactgattccatgcgcagtcatgagagtttgtagcttttgtctttttgctttctcttaatgtttccctgctttatttactgaaaccattggtttggttttttatgttaattaagtttttagttcatt

SEQ ID NO: 102129 - protein, 361 aa, Arabidopsis thaliana
  peptide (1)..(361): Ceres Seq. ID no. 13609478
  misc_feature (180)..(341): Pfam Name: Glyceraldehyde 3-phosphate dehydrogenase, Pfam Description: Glyceraldehyde 3-phosphate dehydrogenase,
  misc_feature (24)..(361): Homolog of NCBI NO: 15222848 NR Description: glyceraldehyde-3-phosphate dehydrogenase -related
  misc_feature (24)..(361): Homolog of NCBI NO: 15229231 NR Description: glyceraldehyde-3-phosphate dehydrogenase C
  misc_feature (24)..(361): Homolog of NCBI NO: 21593240 NR Description: glyceraldehyde-3-phosphate dehydrogenase C
  misc_feature (24)..(361): Homolog of NCBI NO: 81622 NR Description: glyceraldehyde-3-phosphate dehydrogenase
  misc_feature (24)..(361): Homolog of NCBI NO: 120675 NR Description: Glyceraldehyde 3-phosphate dehydrogenase,
  misc_feature (24)..(361): Homolog of NCBI NO: 22094840 NR Description: glyceraldehyde 3-phosphate dehydrogenase [Solanum
  misc_feature (24)..(359): Homolog of NCBI NO: 120669 NR Description: Glyceraldehyde 3-phosphate dehydrogenase,
  misc_feature (28)..(360): Homolog of NCBI NO: 462141 NR Description: Glyceraldehyde 3-phosphate dehydrogenase (GAPDH)
  misc_feature (29)..(360): Homolog of NCBI NO: 462137 NR Description: GLYCERALDEHYDE 3-PHOSPHATE DEHYDROGENASE,
  misc_feature (28)..(359): Homolog of NCBI NO: 4539543 NR Description: glyceraldehyde-3-phosphate dehydrogenase
HSLFSHSLLSRYHLNLSRSQFRKMADKKIRIGINGFGRIGRLVARVVLQRDDVELVAVNDPFITTEYMTYMFKYDSVHGQWKHHELKVKDDKTLLFGEKPVTVFGIRNPEDIPWGEAGADFVVESTGVFTDKDKAAAHLKGGAKKVVISAPSKDAPMFVVGVNEHEYKSDLDIVSNASCTTNCLAPLAKVINDRFGIVEGLMTTVHSITATQKTVDGPSMKDWRGGRAASFNIIPSSTGAAKAVGKVLPSLNGKLTGMSFRVPTVDVSVVDLTVRLEKAATYDEIKKAIKEESEGKMKGILGYTEDDVVSTDFVGDNRSSIFDAKAGIALSDKFVKLVSWYDNEWGYSSRVVDLIVHMSKA

SEQ ID NO: 102130 - protein, 338 aa, Arabidopsis thaliana; identical to SEQ ID NO: 22717
  peptide (1)..(338): Ceres Seq. ID no. 13609479
  misc_feature (157)..(318): Pfam Name: Glyceraldehyde 3-phosphate dehydrogenase, Pfam Description: Glyceraldehyde 3-phosphate dehydrogenase,
  misc_feature (1)..(338): Homolog of NCBI NO: 15222848 NR Description: glyceraldehyde-3-phosphate dehydrogenase -related
  misc_feature (1)..(338): Homolog of NCBI NO: 15229231 NR Description: glyceraldehyde-3-phosphate dehydrogenase C
  misc_feature (1)..(338): Homolog of NCBI NO: 21593240 NR Description: glyceraldehyde-3-phosphate dehydrogenase C
  misc_feature (1)..(338): Homolog of NCBI NO: 81622 NR Description: glyceraldehyde-3-phosphate dehydrogenase
  misc_feature (1)..(338): Homolog of NCBI NO: 120675 NR Description: Glyceraldehyde 3-phosphate dehydrogenase,
  misc_feature (1)..(338): Homolog of NCBI NO: 22094840 NR Description: glyceraldehyde 3-phosphate dehydrogenase [Solanum
  misc_feature (1)..(336): Homolog of NCBI NO: 120669 NR Description: Glyceraldehyde 3-phosphate dehydrogenase,
  misc_feature (5)..(337): Homolog of NCBI NO: 462141 NR Description: Glyceraldehyde 3-phosphate dehydrogenase (GAPDH)
  misc_feature (6)..(337): Homolog of NCBI NO: 462137 NR Description: GLYCERALDEHYDE 3-PHOSPHATE DEHYDROGENASE,
  misc_feature (5)..(336): Homolog of NCBI NO: 4539543 NR Description: glyceraldehyde-3-phosphate dehydrogenase

SEQ ID NO: 102131 - protein, 294 aa, Arabidopsis thaliana; identical to SEQ ID NO: 22718
  peptide (1)..(294): Ceres Seq. ID no. 13609480
  misc_feature (113)..(274): Pfam Name: Glyceraldehyde 3-phosphate dehydrogenase, Pfam Description: Glyceraldehyde 3-phosphate dehydrogenase,
  misc_feature (1)..(294): Homolog of NCBI NO: 15222848 NR Description: glyceraldehyde-3-phosphate dehydrogenase -related
  misc_feature (1)..(294): Homolog of NCBI NO: 15229231 NR Description: glyceraldehyde-3-phosphate dehydrogenase C
  misc_feature (1)..(294): Homolog of NCBI NO: 21593240 NR Description: glyceraldehyde-3-phosphate dehydrogenase C
  misc_feature (1)..(294): Homolog of NCBI NO: 81622 NR Description: glyceraldehyde-3-phosphate dehydrogenase
  misc_feature (1)..(294): Homolog of NCBI NO: 120675 NR Description: Glyceraldehyde 3-phosphate dehydrogenase,
  misc_feature (1)..(294): Homolog of NCBI NO: 22094840 NR Description: glyceraldehyde 3-phosphate dehydrogenase [Solanum
  misc_feature (1)..(292): Homolog of NCBI NO: 120669 NR Description: Glyceraldehyde 3-phosphate dehydrogenase,
  misc_feature (1)..(293): Homolog of NCBI NO: 462141 NR Description: Glyceraldehyde 3-phosphate dehydrogenase (GAPDH)
  misc_feature (1)..(293): Homolog of NCBI NO: 462137 NR Description: GLYCERALDEHYDE 3-PHOSPHATE DEHYDROGENASE,
  misc_feature (1)..(292): Homolog of NCBI NO: 4539543 NR Description: glyceraldehyde-3-phosphate dehydrogenase

SEQ ID NO: 102132 - DNA, 1870 bp, Arabidopsis thaliana
  misc_feature (1)..(1870): Ceres Seq. ID no. 13609481
  misc_feature: MA Experiment ID: 108595 Result: Down-regulated in Transcription
  misc_feature: MA Experiment 108595 PARAMETER Experiment Name: At_Ler-pi_Ovule_cDNA_P Parameter: Plant Line Value: null
  misc_feature: MA Experiment ID: 20000224 Result: Up-regulated in Transcription
  misc_feature: MA Experiment ID: 20000306 Result: Up-regulated in Transcription
  misc_feature: MA Experiment 20000306 PARAMETER Experiment Name: At_Germinating_Seeds_Sub_P Parameter: Age (hr) Value: 6 vs. 0
  misc_feature: MA Experiment 20000306 PARAMETER Experiment Name: At_Germinating_Seeds_Sub_P Parameter: Organism Value: A. thaliana
  misc_feature: MA Experiment 20000306 PARAMETER Experiment Name: At_Germinating_Seeds_Sub_P Parameter: Plant Line Value: WS
  misc_feature: MA Experiment 20000306 PARAMETER Experiment Name: At_Germinating_Seeds_Sub_P Parameter: Tissue Value: Germinating Seeds
  misc_feature: MA Experiment ID: 20000307 Result: Up-regulated in Transcription
  misc_feature: MA Experiment 20000307 PARAMETER Experiment Name: At_Germinating_Seeds_Sub_P Parameter: Age (hr) Value: 24 vs. 0
  misc_feature: MA Experiment 20000307 PARAMETER Experiment Name: At_Germinating_Seeds_Sub_P Parameter: Organism Value: A. thaliana
  misc_feature: MA Experiment 20000307 PARAMETER Experiment Name: At_Germinating_Seeds_Sub_P Parameter: Plant Line Value: WS
  misc_feature: MA Experiment 20000307 PARAMETER Experiment Name: At_Germinating_Seeds_Sub_P Parameter: Tissue Value: Germinating Seeds
  misc_feature: MA Experiment ID: 20000315 Result: Down-regulated in Transcription
  misc_feature: MA Experiment 20000315 PARAMETER Experiment Name: At_14day_Shoots-Roots_Sub_P Parameter: Age (day) Value: 14
  misc_feature: MA Experiment 20000315 PARAMETER Experiment Name: At_14day_Shoots-Roots_Sub_P Parameter: Organism Value: A. thaliana
  misc_feature: MA Experiment 20000315 PARAMETER Experiment Name: At_14day_Shoots-Roots_Sub_P Parameter: Plant Line Value: WS
  misc_feature: MA Experiment 20000315 PARAMETER Experiment Name: At_14day_Shoots-Roots_Sub_P Parameter: Tissue Value: Shoots vs. Whole Plant
  misc_feature: MA Experiment ID: 20000327 Result: Down-regulated in Transcription
  misc_feature: MA Experiment 20000327 PARAMETER Experiment Name: At_42deg_Heat_Sub_P Parameter: Age (day) Value: 14
  misc_feature: MA Experiment 20000327 PARAMETER Experiment Name: At_42deg_Heat_Sub_P Parameter: Organism Value: A. thaliana
  misc_feature: MA Experiment 20000327 PARAMETER Experiment Name: At_42deg_Heat_Sub_P Parameter: Plant Line Value: WS
  misc_feature: MA Experiment 20000327 PARAMETER Experiment Name: At_42deg_Heat_Sub_P Parameter: Temperature (deg C) Value: 42 vs. 22
  misc_feature: MA Experiment 20000327 PARAMETER Experiment Name: At_42deg_Heat_Sub_P Parameter: Timepoint (hr) Value: 1
  misc_feature: MA Experiment 20000327 PARAMETER Experiment Name: At_42deg_Heat_Sub_P Parameter: Tissue Value: Aerial
  misc_feature: MA Experiment ID: 20000328 Result: Down-regulated in Transcription
  misc_feature: MA Experiment 20000328 PARAMETER Experiment Name: At_42deg_Heat_Sub_P Parameter: Age (day) Value: 14
  misc_feature: MA Experiment 20000328 PARAMETER Experiment Name: At_42deg_Heat_Sub_P Parameter: Organism Value: A. thaliana
  misc_feature: MA Experiment 20000328 PARAMETER Experiment Name: At_42deg_Heat_Sub_P Parameter: Plant Line Value: WS
  misc_feature: MA Experiment 20000328 PARAMETER Experiment Name: At_42deg_Heat_Sub_P Parameter: Temperature (deg C) Value: 42 vs. 22
  misc_feature: MA Experiment 20000328 PARAMETER Experiment Name: At_42deg_Heat_Sub_P Parameter: Timepoint (hr) Value: 6
  misc_feature: MA Experiment 20000328 PARAMETER Experiment Name: At_42deg_Heat_Sub_P Parameter: Tissue Value: Aerial
aaattaaaatagaattgagaaaaaaaagtttgatcagccatcggaggagaagagagaatgatagataactggatcacgagaagtcacaaatctcaaagaagaagaaagaaaaccaaaatcaagaacaataacaacaattcgcaatgatttgagccaaatctaaaggatggagttgatgaaattgttcttctagatgtttgttttggggatatgaacaaagaagaatctgagtttaatacactatgtggaaacagattctgagtaagcttcctaagaagtcttcttctaagaaccattcttcttcatctagttccacttcaaaaagtagtgataatggcgccagtaaatcgggtaattctcaaacccagaacgctcctcctgtaaaaccttctgctgattcagggtttaaagaagggaatttgaaaggaaatggtaacggtttcactccatatgaagcattgccaggtttcaaagatgttcctaatgcagagaaacagaacttgtttgtgagaaaactcagcttgtgctgtgttgttttcgatttctcggatccaacgaagaacgttaaggaaaaggatattaagcggcagacattgcttgagcttgtggattatgtagcttctcctaatggaaagtttagtgaaactgtgattcaagaagtggttagaatggtttctgttaacatattcagaaccttgaatcctcaaccgcgcgagaataaagttattgatgcgttagacttggaggaagaagagccttctatggatcctacttggcctcacttgcagcttgtctatgaaattctcctgcggcttattgcttcaccagagacagacaccaagctggctaagaaatacattgaccaatcttttgtctcaaggttacttgatttatttgattcagaggatcctagagaaagagattgtcttaagaccgttctacatcgcatctacggtaaatttatggttcatcgtcctttcataaggaaatccattaataacattttctatcggtttgttttcgagactgagaaacacaatgggattgctgagtttctagagattttgggaagtatcatcaatggatttgctctgccgcttaaagacgagcataaagtgtttttggttagagctttggtacctcttcacaaaccgaaaagcttgcaaatgtatcatcagcaattgtcttattgtatcacacagtttgtggaaaaagattgcaaactcgctgatacggttataaggggactactcaagtcttggcctgtcacaaatagttccaaagaagtcatgtttctaaacgagctagaggaagtattagaagcaactcaaccacctgaattccaacggtgtatggtcccattgtttcgccaagttgctcggtgtttgaacagtctccattttcaggttgcagaaagagctttgttcttatggaacaacgatcatatcgagaatctaataatgcagaaccggaaagttattcttccaatcatattccctgcattggagagaaacactcagaagcattggaaccaagctgttcatagcttgacgttgaatgtgcagaagatctttaatgacattgatgcagagttgtttaaggattgtcttgctaagtttagagaagatgaatcaaaagaagctgaaattggcgcaaaacgtgaggcaacgtggaaacggttggaagaaattggtaatcaaaagcaaaagagttcattgtaagatgttttagttgtagagacagaggttttgttctgtattttctcgttttttactacattggaaaattgggtttgtttttcttactctccagaaaaacttagtgagaaaaaagtttcagattcgttttctttgaagagattgcaaatatt

SEQ ID NO: 102133 - protein, 492 aa, Arabidopsis thaliana
  peptide (1)..(492): Ceres Seq. ID no. 13609482
  misc_feature (72)..(485): Pfam Name: Protein phosphatase 2A regulatory B subunit (B56 Pfam Description: Protein phosphatase 2A regulatory B subunit
  misc_feature (1)..(492): Homolog of NCBI NO: 15222851 NR Description: B regulatory subunit of protein phosphatase 2A [Arabidopsis thaliana] >gi|9958073|gb|AAG09562.1|AC011810_21 protein phosphatase 2A regulatory subunit B [Arabidopsis
  misc_feature (1)..(492): Homolog of NCBI NO: 21537284 NR Description: B regulatory subunit of protein phosphatase 2A,
  misc_feature (13)..(487): Homolog of NCBI NO: 15230961 NR Description: B regulatory subunit of protein phosphatase 2A [Arabidopsis thaliana] >gi|9279607|dbj|BAB01065.1| protein
  misc_feature (1)..(492): Homolog of NCBI NO: 21530784 NR Description: putative protein phosphatase 2A B'zeta subunit
  misc_feature (1)..(491): Homolog of NCBI NO: 21530786 NR Description: putative protein phosphatase 2A B'teta subunit
  misc_feature (1)..(491): Homolog of NCBI NO: 7485149 NR Description: hypothetical protein - Arabidopsis thaliana phosphatase like protein [Arabidopsis thaliana]
  misc_feature (1)..(491): Homolog of NCBI NO: 18414444 NR Description: B' regulatory subunit of PP2A (AtB'gamma) thaliana] >gi|30683249|ref|NP_849390.1| B' regulatory subunit of (AtB'gamma) [Arabidopsis thaliana] >gi|2160694|gb|AAB58902.1| B'
  misc_feature (1)..(491): Homolog of NCBI NO: 20147343 NR Description: AT4g15410/dl3750w [Arabidopsis thaliana]
  misc_feature (1)..(490): Homolog of NCBI NO: 34394129 NR Description: putative protein phosphatase PP2A0 B' subunit
  misc_feature (1)..(487): Homolog of NCBI NO: 11994401 NR Description: protein phosphatase 2A B' regulatory subunit
MWKQILSKLPKKSSSKNHSSSSSSTSKSSDNGASKSGNSQTQNAPPVKPSADSGFKEGNLKGNGNGFTPYEALPGFKDVPNAEKQNLFVRKLSLCCVVFDFSDPTKNVKEKDIKRQTLLELVDYVASPNGKFSETVIQEVVRMVSVNIFRTLNPQPRENKVIDALDLEEEEPSMDPTWPHLQLVYEILLRLIASPETDTKLAKKYIDQSFVSRLLDLFDSEDPRERDCLKTVLHRIYGKFMVHRPFIRKSINNIFYRFVFETEKHNGIAEFLEILGSIINGFALPLKDEHKVFLVRALVPLHKPKSLQMYHQQLSYCITQFVEKDCKLADTVIRGLLKSWPVTNSSKEVMFLNELEEVLEATQPPEFQRCMVPLFRQVARCLNSLHFQVAERALFLWNNDHIENLIMQNRKVILPIIFPALERNTQKHWNQAVHSLTLNVQKIFNDIDAELFKDCLAKFREDESKEAEIGAKREATWKRLEEIGNQKQKSSL

SEQ ID NO: 102134 - protein, 350 aa, Arabidopsis thaliana
  peptide (1)..(350): Ceres Seq. ID no. 13609483
  misc_feature (1)..(343): Pfam Name: Protein phosphatase 2A regulatory B subunit (B56 Pfam Description: Protein phosphatase 2A regulatory B subunit
  misc_feature (1)..(350): Homolog of NCBI NO: 15222851 NR Description: B regulatory subunit of protein phosphatase 2A [Arabidopsis thaliana] >gi|9958073|gb|AAG09562.1|AC011810_21 protein phosphatase 2A regulatory subunit B [Arabidopsis
  misc_feature (1)..(350): Homolog of NCBI NO: 21537284 NR Description: B regulatory subunit of protein phosphatase 2A,
  misc_feature (1)..(345): Homolog of NCBI NO: 15230961 NR Description: B regulatory subunit of protein phosphatase 2A [Arabidopsis thaliana] >gi|9279607|dbj|BAB01065.1| protein
  misc_feature (1)..(350): Homolog of NCBI NO: 21530784 NR Description: putative protein phosphatase 2A B'zeta subunit
  misc_feature (1)..(349): Homolog of NCBI NO: 21530786 NR Description: putative protein phosphatase 2A B'teta subunit
  misc_feature (1)..(349): Homolog of NCBI NO: 7485149 NR Description: hypothetical protein - Arabidopsis thaliana phosphatase like protein [Arabidopsis thaliana]
  misc_feature (1)..(349): Homolog of NCBI NO: 18414444 NR Description: B' regulatory subunit of PP2A (AtB'gamma) thaliana] >gi|30683249|ref|NP_849390.1| B' regulatory subunit of (AtB'gamma) [Arabidopsis thaliana] >gi|2160694|gb|AAB58902.1| B'
  misc_feature (1)..(349): Homolog of NCBI NO: 20147343 NR Description: AT4g15410/dl3750w [Arabidopsis thaliana]
  misc_feature (1)..(348): Homolog of NCBI NO: 34394129 NR Description: putative protein phosphatase PP2A0 B' subunit
  misc_feature (1)..(345): Homolog of NCBI NO: 11994401 NR Description: protein phosphatase 2A B' regulatory subunit
MVSVNIFRTLNPQPRENKVIDALDLEEEEPSMDPTWPHLQLVYEILLRLIASPETDTKLAKKYIDQSFVSRLLDLFDSEDPRERDCLKTVLHRIYGKFMVHRPFIRKSINNIFYRFVFETEKHNGIAEFLEILGSIINGFALPLKDEHKVFLVRALVPLHKPKSLQMYHQQLSYCITQFVEKDCKLADTVIRGLLKSWPVTNSSKEVMFLNELEEVLEATQPPEFQRCMVPLFRQVARCLNSLHFQVAERALFLWNNDHIENLIMQNRKVILPIIFPALERNTQKHWNQAVHSLTLNVQKIFNDIDAELFKDCLAKFREDESKEAEIGAKREATWKRLEEIGNQKQKSSL

SEQ ID NO: 102135 - protein, 319 aa, Arabidopsis thaliana
  peptide (1)..(319): Ceres Seq. ID no. 13609484
  misc_feature (1)..(312): Pfam Name: Protein phosphatase 2A regulatory B subunit (B56 Pfam Description: Protein phosphatase 2A regulatory B subunit
  misc_feature (1)..(319): Homolog of NCBI NO: 15222851 NR Description: B regulatory subunit of protein phosphatase 2A [Arabidopsis thaliana] >gi|9958073|gb|AAG09562.1|AC011810_21 protein phosphatase 2A regulatory subunit B [Arabidopsis
  misc_feature (1)..(319): Homolog of NCBI NO: 21537284 NR Description: B regulatory subunit of protein phosphatase 2A,
  misc_feature (1)..(314): Homolog of NCBI NO: 15230961 NR Description: B regulatory subunit of protein phosphatase 2A [Arabidopsis thaliana] >gi|9279607|dbj|BAB01065.1| protein
  misc_feature (1)..(319): Homolog of NCBI NO: 21530784 NR Description: putative protein phosphatase 2A B'zeta subunit
  misc_feature (1)..(318): Homolog of NCBI NO: 21530786 NR Description: putative protein phosphatase 2A B'teta subunit
  misc_feature (1)..(318): Homolog of NCBI NO: 7485149 NR Description: hypothetical protein - Arabidopsis thaliana phosphatase like protein [Arabidopsis thaliana]
  misc_feature (1)..(318): Homolog of NCBI NO: 18414444 NR Description: B' regulatory subunit of PP2A (AtB'gamma) thaliana] >gi|30683249|ref|NP_849390.1| B' regulatory subunit of (AtB'gamma) [Arabidopsis thaliana] >gi|2160694|gb|AAB58902.1| B'
  misc_feature (1)..(318): Homolog of NCBI NO: 20147343 NR Description: AT4g15410/dl3750w [Arabidopsis thaliana]
  misc_feature (1)..(317): Homolog of NCBI NO: 34394129 NR Description: putative protein phosphatase PP2A0 B' subunit
  misc_feature (1)..(314): Homolog of NCBI NO: 11994401 NR Description: protein phosphatase 2A B' regulatory subunit
MDPTWPHLQLVYEILLRLIASPETDTKLAKKYIDQSFVSRLLDLFDSEDPRERDCLKTVLHRIYGKFMVHRPFIRKSINNIFYRFVFETEKHNGIAEFLEILGSIINGFALPLKDEHKVFLVRALVPLHKPKSLQMYHQQLSYCITQFVEKDCKLADTVIRGLLKSWPVTNSSKEVMFLNELEEVLEATQPPEFQRCMVPLFRQVARCLNSLHFQVAERALFLWNNDHIENLIMQNRKVILPIIFPALERNTQKHWNQAVHSLTLNVQKIFNDIDAELFKDCLAKFREDESKEAEIGAKREATWKRLEEIGNQKQKSSL

SEQ ID NO: 102136 - DNA, 2411 bp, Arabidopsis thaliana
  misc_feature (1)..(2411): Ceres Seq. ID no. 13609489
  misc_feature: MA Experiment ID: 108434 Result: Up-regulated in Transcription
  misc_feature: MA Experiment 108434 PARAMETER Experiment Name: At_Root_Tips_cDNA_P Parameter: Tissue Value: Root Tips
  misc_feature: MA Experiment ID: 20000093 Result: Up-regulated in Transcription
  misc_feature: MA Experiment 20000093 PARAMETER Experiment Name: At_42deg_Heat_cDNA_P Parameter: Temperature (deg C) Value: 42 vs. 22
  misc_feature: MA Experiment 20000093 PARAMETER Experiment Name: At_42deg_Heat_cDNA_P Parameter: Timepoint (hr) Value: 0.5
  misc_feature: MA Experiment 20000093 PARAMETER Experiment Name: At_42deg_Heat_cDNA_P Parameter: Tissue Value: Aerial
  misc_feature: MA Experiment ID: 20000112 Result: Up-regulated in Transcription
  misc_feature: MA Experiment 20000112 PARAMETER Experiment Name: At_42deg_Heat_cDNA_P Parameter: Temperature (deg C) Value: 42 vs. 22
  misc_feature: MA Experiment 20000112 PARAMETER Experiment Name: At_42deg_Heat_cDNA_P Parameter: Timepoint (hr) Value: 2
  misc_feature: MA Experiment 20000112 PARAMETER Experiment Name: At_42deg_Heat_cDNA_P Parameter: Tissue Value: Aerial
  misc_feature: MA Experiment ID: 20000113 Result: Up-regulated in Transcription
  misc_feature: MA Experiment 20000113 PARAMETER Experiment Name: At_42deg_Heat_cDNA_P Parameter: Temperature (deg C) Value: 42 vs. 22
  misc_feature: MA Experiment 20000113 PARAMETER Experiment Name: At_42deg_Heat_cDNA_P Parameter: Timepoint (hr) Value: 8
  misc_feature: MA Experiment 20000113 PARAMETER Experiment Name: At_42deg_Heat_cDNA_P Parameter: Tissue Value: Aerial
  misc_feature: MA Experiment ID: 20000144 Result: Up-regulated in Transcription
  misc_feature: MA Experiment 20000144 PARAMETER Experiment Name: At_42deg_Heat_cDNA_P Parameter: Temperature (deg C) Value: 42 vs. 22
  misc_feature: MA Experiment 20000144 PARAMETER Experiment Name: At_42deg_Heat_cDNA_P Parameter: Timepoint (hr) Value: 1
  misc_feature: MA Experiment 20000144 PARAMETER Experiment Name: At_42deg_Heat_cDNA_P Parameter: Tissue Value: Aerial
  misc_feature: MA Experiment ID: 20000173 Result: Up-regulated in Transcription
  misc_feature: MA Experiment 20000173 PARAMETER Experiment Name: At_42deg_Heat_P Parameter: Age (day) Value: 14
  misc_feature: MA Experiment 20000173 PARAMETER Experiment Name: At_42deg_Heat_P Parameter: Organism Value: A. thaliana
  misc_feature: MA Experiment 20000173 PARAMETER Experiment Name: At_42deg_Heat_P Parameter: Plant Line Value: WS
  misc_feature: MA Experiment 20000173 PARAMETER Experiment Name: At_42deg_Heat_P Parameter: Temperature (deg C) Value: 42 vs. 22
  misc_feature: MA Experiment 20000173 PARAMETER Experiment Name: At_42deg_Heat_P Parameter: Timepoint (hr) Value: 6
  misc_feature: MA Experiment 20000173 PARAMETER Experiment Name: At_42deg_Heat_P Parameter: Tissue Value: Aerial
  misc_feature: MA Experiment ID: 20001248 Result: Up-regulated in Transcription
  misc_feature: MA Experiment 20001248 PARAMETER Experiment Name: At_Far-red-induction_P Parameter: Age (day) Value: 7
  misc_feature: MA Experiment 20001248 PARAMETER Experiment Name: At_Far-red-induction_P Parameter: Light Value: Far-red vs. White
  misc_feature: MA Experiment 20001248 PARAMETER Experiment Name: At_Far-red-induction_P Parameter: Organism Value: A. thaliana
  misc_feature: MA Experiment 20001248 PARAMETER Experiment Name: At_Far-red-induction_P Parameter: Plant Line Value: Columbia
  misc_feature: MA Experiment 20001248 PARAMETER Experiment Name: At_Far-red-induction_P Parameter: Timepoint (hr) Value: 4
  misc_feature: MA Experiment 20001248 PARAMETER Experiment Name: At_Far-red-induction_P Parameter: Tissue Value: Whole Plant
  misc_feature: MA Experiment ID: 20001451 Result: Up-regulated in Transcription
  misc_feature: MA Experiment 20001451 PARAMETER Experiment Name: At_Far-red-induction_P Parameter: Age (day) Value: 7
  misc_feature: MA Experiment 20001451 PARAMETER Experiment Name: At_Far-red-induction_P Parameter: Light Value: Far-red vs. White
  misc_feature: MA Experiment 20001451 PARAMETER Experiment Name: At_Far-red-induction_P Parameter: Organism Value: A. thaliana
  misc_feature: MA Experiment 20001451 PARAMETER Experiment Name: At_Far-red-induction_P Parameter: Plant Line Value: Columbia
  misc_feature: MA Experiment 20001451 PARAMETER Experiment Name: At_Far-red-induction_P Parameter: Timepoint (hr) Value: 24
  misc_feature: MA Experiment 20001451 PARAMETER Experiment Name: At_Far-red-induction_P Parameter: Tissue Value: Whole Plant
  misc_feature: MA Experiment ID: 20001911 Result: Up-regulated in Transcription
  misc_feature: MA Experiment 20001911 PARAMETER Experiment Name: At_Drought_Reproduction_P Parameter: Age (day) Value: 40
  misc_feature: MA Experiment 20001911 PARAMETER Experiment Name: At_Drought_Reproduction_P Parameter: Organism Value: A. thaliana
  misc_feature: MA Experiment 20001911 PARAMETER Experiment Name: At_Drought_Reproduction_P Parameter: Plant Line Value: WS
  misc_feature: MA Experiment 20001911 PARAMETER Experiment Name: At_Drought_Reproduction_P Parameter: Timepoint (day) Value: 10
  misc_feature: MA Experiment 20001911 PARAMETER Experiment Name: At_Drought_Reproduction_P Parameter: Tissue Value: Flowers
  misc_feature: MA Experiment 20001911 PARAMETER Experiment Name: At_Drought_Reproduction_P Parameter: Treatment Value: Drought vs. No Drought
aaaaaagcgtcgttgagaggttagagacgaaggaaggaggcagaggatagagagatagcgaggctaatggatcagtgactcactgagtcagattttaccgattcattgcctccattgaagcctcttttctcagattctacgcttcactgtctcttctccatgtgcgtctcctcctcctccgtttcttcagatcttgctttccggtgacggttttaatcttcttctctctggtaacacgtataaagcatggcttacctgatgtagacatgtagtgttaggctaaagactcctcttttcacttctgtcttgttgagtttgtgttggtttaaggctttaagccaaaggcgttgttggtctgacaagatggcaatggcggtgtttaaggctcctctaaaaggggaatttcatggggctagaaagatggaagggaagcaatataagcaccatctgcttcagcaacagtctacagggagaagacgtgtgttcgtgcaaaccgatactggctgtgtgttgggagttgagttggatcgtaatgacaatgttcatactgtgaagaaaaggcttcagattgcgtttaactttcctactgaggaaagctctttgacctttggggatatggtgttgaagaatgacttgagtgctgtgaggaatgattctccgcttctcttaaagcgtaacttaatgcacagaagctcttctactccgtgtctttcacctactgggaatgatctgcagaggaaagatcgaagtggtcctattgagatacttagtcactcgccctgttttctgtctttgaagcaaacagcgaatgacattgttaaggcgatgaagatgggtgttgaaccaatccctgttaatggtgggcttggaggggcatactattttagggatgaaaagggtcaaagtgttgctattgtcaagcctacggatgaagagccgtttgcccctaacaatcctaaaggcttcgtagggaaagcgcttgggcagcctggtttaaagccttctgtgcgggttggggaaaccgggtttagagaagttgctgcataccttcttgattatgatcactttgctaatgttcctcctacggctcttgtgaagataacacactctgttttcaatgtcaatgatggaatggatgggaacaaatctcgtgagaagaagaagctggtcagcagcaagattgcttcgttccagaagtttgtacctcatgattttgatgccagtgatcacgggacttcaagcttccctgtcgcttctgtgcaccgcattgggattttggacataaggattctcaacacagaccggcatggtggaaatcttttggtgaagaagcttgatgatggtggtgttgggaggtttggtcaagtggagcttattccaatagatcatggtctttgcttaccagaaacactcgaagatccttacttcgaatggattcattggcctcaggcttcaatacctttctctgaagaagaacttgactacatacaaagtcttgatccagtgaaagattgtgaaatgcttcgaagagagcttccgatgattcgagaggcttgtctcagggttctagttctctgtaccgttttccttaaagaagctgctgtttttggactttgtcttgcagagatcggtgagatgatgactcgagaatttcgtgcaggagaagaggaaccaagtgaactagaaatgttgtgtatcgaagccaagagattaaccactgaacaagacgttttgtctcccaagtcagatggagaaggagagacagagtttcagtttgatatagactacaatgagctagactcggtttatggctctgagacagaaaccgatgagttcttcgccaagaacccattttcaaacggacgttcttcacttggagagctcaaagagagcattgctgaagaagaagaagatgacgaagaggaggcaaaacttactctatctctctcaaagctttccacatcaatgaagaacaatctaagcaacaccatgggatccggatacctgaaacctccgaaagacaaccaaaccgacaaagcattggtaagtcacaagagcgcgaacgtgcagctcccgcttagcgtaaactttgtgaagttagccgacatgaaagaagttgaatgggttgtgttcttggagaggtttcaggagttgctttactcggcttttgcagaacgcaagaccatgacgttgaggaacacacagagacttggtacatcgtgcaagttttgagatcatacgagttcacataagagaagaccaaagatttcacttttacgagttttgaagcaattacttgttagctacgttaagattagtttacttttgtagcgaccacgagcacttgcaatgtgaagaaatgtttattttgcctgtaaatattctttaccatttttttttccctaacttcc

SEQ ID NO: 102137 - protein, 622 aa, Arabidopsis thaliana; identical to SEQ ID NO: 39992
  peptide (1)..(622): Ceres Seq. ID no. 13609490
  misc_feature (167)..(429): Pfam Name: Phosphatidylinositol 3- and 4-kinase Pfam Description: Phosphatidylinositol 3- and 4-kinase
  misc_feature (1)..(525): Homolog of NCBI NO: 18395629 NR Description: phosphatidylinositol 3- and 4-kinase family thaliana] >gi|15810175|gb|AAL06989.1| At2g03890/T18C20.9 thaliana] >gi|20198186|gb|AAD24822.2| expressed protein
  misc_feature (527)..(622): Homolog of NCBI NO: 18395629 NR Description: phosphatidylinositol 3- and 4-kinase family thaliana] >gi|15810175|gb|AAL06989.1| At2g03890/T18C20.9 thaliana] >gi|20198186|gb|AAD24822.2| expressed protein
  misc_feature (1)..(525): Homolog of NCBI NO: 25363315 NR Description: hypothetical protein At2g03890 [imported] -
  misc_feature (527)..(622): Homolog of NCBI NO: 25363315 NR Description: hypothetical protein At2g03890 [imported] -
  misc_feature (1)..(622): Homolog of NCBI NO: 18395825 NR Description: phosphatidylinositol 3- and 4-kinase family
  misc_feature (107)..(610): Homolog of NCBI NO: 19310381 NR Description: At2g40850/T20B5.5 [Arabidopsis thaliana]
  misc_feature (107)..(610): Homolog of NCBI NO: 15226765 NR Description: phosphatidylinositol 3- and 4-kinase family
  misc_feature (105)..(478): Homolog of NCBI NO: 15228965 NR Description: phosphatidylinositol 3- and 4-kinase family
  misc_feature (223)..(474): Homolog of NCBI NO: 34903186 NR Description: unnamed protein product [Oryza sativa (japonica group)] >gi|6721557|dbj|BAA89587.1| unnamed protein product
  misc_feature (117)..(429): Homolog of NCBI NO: 34904388 NR Description: unnamed protein product [Oryza sativa (japonica group)] >gi|8468000|dbj|BAA96601.1| unnamed protein product

SEQ ID NO: 102138 - protein, 620 aa, Arabidopsis thaliana; identical to SEQ ID NO: 39993
  peptide (1)..(620): Ceres Seq. ID no. 13609491
  misc_feature (165)..(427): Pfam Name: Phosphatidylinositol 3- and 4-kinase Pfam Description: Phosphatidylinositol 3- and 4-kinase
  misc_feature (1)..(523): Homolog of NCBI NO: 18395629 NR Description: phosphatidylinositol 3- and 4-kinase family thaliana] >gi|15810175|gb|AAL06989.1| At2g03890/T18C20.9 thaliana] >gi|20198186|gb|AAD24822.2| expressed protein
  misc_feature (525)..(620): Homolog of NCBI NO: 18395629 NR Description: phosphatidylinositol 3- and 4-kinase family thaliana] >gi|15810175|gb|AAL06989.1| At2g03890/T18C20.9 thaliana] >gi|20198186|gb|AAD24822.2| expressed protein
  misc_feature (1)..(523): Homolog of NCBI NO: 25363315 NR Description: hypothetical protein At2g03890 [imported] -
  misc_feature (525)..(620): Homolog of NCBI NO: 25363315 NR Description: hypothetical protein At2g03890 [imported] -
  misc_feature (1)..(620): Homolog of NCBI NO: 18395825 NR Description: phosphatidylinositol 3- and 4-kinase family
  misc_feature (105)..(608): Homolog of NCBI NO: 19310381 NR Description: At2g40850/T20B5.5 [Arabidopsis thaliana]
  misc_feature (105)..(608): Homolog of NCBI NO: 15226765 NR Description: phosphatidylinositol 3- and 4-kinase family
  misc_feature (103)..(476): Homolog of NCBI NO: 15228965 NR Description: phosphatidylinositol 3- and 4-kinase family
  misc_feature (221)..(472): Homolog of NCBI NO: 34903186 NR Description: unnamed protein product [Oryza sativa (japonica group)] >gi|6721557|dbj|BAA89587.1| unnamed protein product
  misc_feature (115)..(427): Homolog of NCBI NO: 34904388 NR Description: unnamed protein product [Oryza sativa (japonica group)] >gi|8468000|dbj|BAA96601.1| unnamed protein product

SEQ ID NO: 102139 - protein, 603 aa, Arabidopsis thaliana; identical to SEQ ID NO: 39994
  peptide (1)..(603): Ceres Seq. ID no. 13609492
  misc_feature (148)..(410): Pfam Name: Phosphatidylinositol 3- and 4-kinase Pfam Description: Phosphatidylinositol 3- and 4-kinase
  misc_feature (1)..(506): Homolog of NCBI NO: 18395629 NR Description: phosphatidylinositol 3- and 4-kinase family thaliana] >gi|15810175|gb|AAL06989.1| At2g03890/T18C20.9 thaliana] >gi|20198186|gb|AAD24822.2| expressed protein
  misc_feature (508)..(603): Homolog of NCBI NO: 18395629 NR Description: phosphatidylinositol 3- and 4-kinase family thaliana] >gi|15810175|gb|AAL06989.1| At2g03890/T18C20.9 thaliana] >gi|20198186|gb|AAD24822.2| expressed protein
  misc_feature (1)..(506): Homolog of NCBI NO: 25363315 NR Description: hypothetical protein At2g03890 [imported] -
  misc_feature (508)..(603): Homolog of NCBI NO: 25363315 NR Description: hypothetical protein At2g03890 [imported] -
  misc_feature (1)..(603): Homolog of NCBI NO: 18395825 NR Description: phosphatidylinositol 3- and 4-kinase family
  misc_feature (88)..(591): Homolog of NCBI NO: 19310381 NR Description: At2g40850/T20B5.5 [Arabidopsis thaliana]
  misc_feature (88)..(591): Homolog of NCBI NO: 15226765 NR Description: phosphatidylinositol 3- and 4-kinase family
  misc_feature (86)..(459): Homolog of NCBI NO: 15228965 NR Description: phosphatidylinositol 3- and 4-kinase family
  misc_feature (204)..(455): Homolog of NCBI NO: 34903186 NR Description: unnamed protein product [Oryza sativa (japonica group)] >gi|6721557|dbj|BAA89587.1| unnamed protein product
  misc_feature (98)..(410): Homolog of NCBI NO: 34904388 NR Description: unnamed protein product [Oryza sativa (japonica group)] >gi|8468000|dbj|BAA96601.1| unnamed protein product

SEQ ID NO: 102140 - DNA, 1774 bp, Arabidopsis thaliana
  misc_feature (1)..(1774): Ceres Seq. ID no. 13609500
  misc_feature: MA Experiment ID: 108434 Result: Up-regulated in Transcription
  misc_feature: MA Experiment 108434 PARAMETER Experiment Name: At_Root_Tips_cDNA_P Parameter: Tissue Value: Root Tips
  misc_feature: MA Experiment ID: 108462 Result: Down-regulated in Transcription
  misc_feature: MA Experiment 108462 PARAMETER Experiment Name: At_Germinating_Seeds_cDNA_P Parameter: Age (day) Value: 2 vs. 0
  misc_feature: MA Experiment 108462 PARAMETER Experiment Name: At_Germinating_Seeds_cDNA_P Parameter: Tissue Value: Germinating Seeds
  misc_feature: MA Experiment ID: 108463 Result: Down-regulated in Transcription
  misc_feature: MA Experiment 108463 PARAMETER Experiment Name: At_Germinating_Seeds_cDNA_P Parameter: Age (day) Value: 3 vs. 0
  misc_feature: MA Experiment 108463 PARAMETER Experiment Name: At_Germinating_Seeds_cDNA_P Parameter: Tissue Value: Germinating Seeds
  misc_feature: MA Experiment ID: 108464 Result: Down-regulated in Transcription
  misc_feature: MA Experiment 108464 PARAMETER Experiment Name: At_Germinating_Seeds_cDNA_P Parameter: Age (day) Value: 4 vs. 0
  misc_feature: MA Experiment 108464 PARAMETER Experiment Name: At_Germinating_Seeds_cDNA_P Parameter: Tissue Value: Germinating Seeds
  misc_feature: MA Experiment ID: 108576 Result: Down-regulated in Transcription
  misc_feature: MA Experiment 108576 PARAMETER Experiment Name: At_42deg_Heat_cDNA_P Parameter: Temperature (deg C) Value: 42 vs. 22
  misc_feature: MA Experiment 108576 PARAMETER Experiment Name: At_42deg_Heat_cDNA_P Parameter: Timepoint (hr) Value: 1
  misc_feature: MA Experiment 108576 PARAMETER Experiment Name: At_42deg_Heat_cDNA_P Parameter: Tissue Value: Aerial
  misc_feature: MA Experiment ID: 108577 Result: Down-regulated in Transcription
  misc_feature: MA Experiment 108577 PARAMETER Experiment Name: At_42deg_Heat_cDNA_P Parameter: Temperature (deg C) Value: 42 vs. 22
  misc_feature: MA Experiment 108577 PARAMETER Experiment Name: At_42deg_Heat_cDNA_P Parameter: Timepoint (hr) Value: 6
  misc_feature: MA Experiment 108577 PARAMETER Experiment Name: At_42deg_Heat_cDNA_P Parameter: Tissue Value: Aerial
  misc_feature: MA Experiment ID: 20000087 Result: Down-regulated in Transcription
  misc_feature: MA Experiment 20000087 PARAMETER Experiment Name: At_100uM_ABA_Mutants_cDNA_P Parameter: Plant Line Value: WS
  misc_feature: MA Experiment 20000087 PARAMETER Experiment Name: At_100uM_ABA_Mutants_cDNA_P Parameter: Timepoint (hr) Value: 6
  misc_feature: MA Experiment 20000087 PARAMETER Experiment Name: At_100uM_ABA_Mutants_cDNA_P Parameter: Tissue Value: Aerial
  misc_feature: MA Experiment 20000087 PARAMETER Experiment Name: At_100uM_ABA_Mutants_cDNA_P Parameter: Treatment Value: 100uM ABA vs. No Treatment
  misc_feature: MA Experiment ID: 20000117 Result: Down-regulated in Transcription
  misc_feature: MA Experiment 20000117 PARAMETER Experiment Name: At_100uM_ABA_Mutants_cDNA_P Parameter: Plant Line Value: Columbia
  misc_feature: MA Experiment 20000117 PARAMETER Experiment Name: At_100uM_ABA_Mutants_cDNA_P Parameter: Timepoint (hr) Value: 6
  misc_feature: MA Experiment 20000117 PARAMETER Experiment Name: At_100uM_ABA_Mutants_cDNA_P Parameter: Tissue Value: Aerial
  misc_feature: MA Experiment 20000117 PARAMETER Experiment Name: At_100uM_ABA_Mutants_cDNA_P Parameter: Treatment Value: 100uM ABA vs. No Treatment
  misc_feature: MA Experiment ID: 20000185 Result: Up-regulated in Transcription
  misc_feature: MA Experiment 20000185 PARAMETER Experiment Name: At_Roots__P Parameter: Age (day) Value: 7 vs. 21
  misc_feature: MA Experiment 20000185 PARAMETER Experiment Name: At_Roots__P Parameter: Organism Value: A. thaliana
  misc_feature: MA Experiment 20000185 PARAMETER Experiment Name: At_Roots__P Parameter: Tissue Value: Roots vs. Whole Plant
  misc_feature: MA Experiment ID: 20000227 Result: Up-regulated in Transcription
  misc_feature: MA Experiment 20000227 PARAMETER Experiment Name: At_Root-Tips-vs-Tops_P Parameter: Tissue Value: Root Tips vs. Root Tops
  misc_feature: MA Experiment ID: 20000234 Result: Up-regulated in Transcription
  misc_feature: MA Experiment 20000234 PARAMETER Experiment Name: At_Siliques_P Parameter: Age (day) Value: 21
  misc_feature: MA Experiment 20000234 PARAMETER Experiment Name: At_Siliques_P Parameter: Organism Value: A. thaliana
  misc_feature: MA Experiment 20000234 PARAMETER Experiment Name: At_Siliques_P Parameter: Plant Line Value: WS
  misc_feature: MA Experiment 20000234 PARAMETER Experiment Name: At_Siliques_P Parameter: Tissue Value: Less Than 5mm Siliques vs. Whole Plant
  misc_feature: MA Experiment ID: 20001451 Result: Up-regulated in Transcription
  misc_feature: MA Experiment 20001451 PARAMETER Experiment Name: At_Far-red-induction_P Parameter: Age (day) Value: 7
  misc_feature: MA Experiment 20001451 PARAMETER Experiment Name: At_Far-red-induction_P Parameter: Light Value: Far-red vs. White
  misc_feature: MA Experiment 20001451 PARAMETER Experiment Name: At_Far-red-induction_P Parameter: Organism Value: A. thaliana
  misc_feature: MA Experiment 20001451 PARAMETER Experiment Name: At_Far-red-induction_P Parameter: Plant Line Value: Columbia
  misc_feature: MA Experiment 20001451 PARAMETER Experiment Name: At_Far-red-induction_P Parameter: Timepoint (hr) Value: 24
  misc_feature: MA Experiment 20001451 PARAMETER Experiment Name: At_Far-red-induction_P Parameter: Tissue Value: Whole Plant
  misc_feature: MA Experiment ID: 20001557 Result: Up-regulated in Transcription
  misc_feature: MA Experiment 20001557 PARAMETER Experiment Name: At_Drought_Soil_Dry_P Parameter: Age (day) Value: 27
  misc_feature: MA Experiment 20001557 PARAMETER Experiment Name: At_Drought_Soil_Dry_P Parameter: Organism Value: A. thaliana
  misc_feature: MA Experiment 20001557 PARAMETER Experiment Name: At_Drought_Soil_Dry_P Parameter: Plant Line Value: WS
  misc_feature: MA Experiment 20001557 PARAMETER Experiment Name: At_Drought_Soil_Dry_P Parameter: Post Timepoint (hr) Value: 3
  misc_feature: MA Experiment 20001557 PARAMETER Experiment Name: At_Drought_Soil_Dry_P Parameter: Post-Treatment Value: Re-Water vs. No Drought
  misc_feature: MA Experiment 20001557 PARAMETER Experiment Name: At_Drought_Soil_Dry_P Parameter: Timepoint (day) Value: 13
  misc_feature: MA Experiment 20001557 PARAMETER Experiment Name: At_Drought_Soil_Dry_P Parameter: Treatment Value: Drought vs. No Drought
  misc_feature: MA Experiment ID: 20001558 Result: Up-regulated in Transcription
  misc_feature: MA Experiment 20001558 PARAMETER Experiment Name: At_Drought_Soil_Dry_P Parameter: Age (day) Value: 27
  misc_feature: MA Experiment 20001558 PARAMETER Experiment Name: At_Drought_Soil_Dry_P Parameter: Organism Value: A. thaliana
  misc_feature: MA Experiment 20001558 PARAMETER Experiment Name: At_Drought_Soil_Dry_P Parameter: Plant Line Value: WS
  misc_feature: MA Experiment 20001558 PARAMETER Experiment Name: At_Drought_Soil_Dry_P Parameter: Post Timepoint (hr) Value: 6
  misc_feature: MA Experiment 20001558 PARAMETER Experiment Name: At_Drought_Soil_Dry_P Parameter: Post-Treatment Value: Re-Water vs. No Drought
  misc_feature: MA Experiment 20001558 PARAMETER Experiment Name: At_Drought_Soil_Dry_P Parameter: Timepoint (day) Value: 13
  misc_feature: MA Experiment 20001558 PARAMETER Experiment Name: At_Drought_Soil_Dry_P Parameter: Treatment Value: Drought vs. No Drought
  misc_feature: MA Experiment ID: 20001560 Result: Up-regulated in Transcription
  misc_feature: MA Experiment 20001560 PARAMETER Experiment Name: At_Drought_Soil_Dry_P Parameter: Age (day) Value: 28
  misc_feature: MA Experiment 20001560 PARAMETER Experiment Name: At_Drought_Soil_Dry_P Parameter: Organism Value: A. thaliana
  misc_feature: MA Experiment 20001560 PARAMETER Experiment Name: At_Drought_Soil_Dry_P Parameter: Plant Line Value: WS
  misc_feature: MA Experiment 20001560 PARAMETER Experiment Name: At_Drought_Soil_Dry_P Parameter: Post Timepoint (hr) Value: None
  misc_feature: MA Experiment 20001560 PARAMETER Experiment Name: At_Drought_Soil_Dry_P Parameter: Post-Treatment Value: None
  misc_feature: MA Experiment 20001560 PARAMETER Experiment Name: At_Drought_Soil_Dry_P Parameter: Timepoint (day) Value: 14
  misc_feature: MA Experiment 20001560 PARAMETER Experiment Name: At_Drought_Soil_Dry_P Parameter: Treatment Value: Drought vs. No Drought
  misc_feature: MA Experiment ID: 20001757 Result: Up-regulated in Transcription
  misc_feature: MA Experiment 20001757 PARAMETER Experiment Name: At_50mM_NH4NO3_L-to-H_P Parameter: Timepoint (hr) Value: 6
  misc_feature: MA Experiment 20001757 PARAMETER Experiment Name: At_50mM_NH4NO3_L-to-H_P Parameter: Tissue Value: Leaf
  misc_feature: MA Experiment 20001757 PARAMETER Experiment Name: At_50mM_NH4NO3_L-to-H_P Parameter: Treatment Value: 50mM NH4NO3 vs 100mM Mannitol
aaaacttccctccttaccataaataataatagtagtataattttagtgtaaaaatcttgaagaaagccctacaatacaaggctacaacaatcccaatttctcctcgtcggagatttctaagtaaaaccctagaactaaccattatatatattataatacaaatatattcatccctccctctccctgtgtcttactctgtcttctcttcgaactgatctgagatttttgattctgcttctcttctcatcttctcccaaggtagagatggcacttgaatcaaatgctccagtggtggacccaaacactattggcaattcttttgttgagaaatactacaacctcttgtataagtcaccatcgcaagtgcatcagttttatctcgacgatagtgttttaggccgtcctggttctgatggagagatggtttctgtcaaatccttgaaagctatcaatgagcagattatgtccttcgattacgaaatctcaaagattcagattttgactgctgattcccaagcatcttacatgaatggagttgtgactctagtcacaggtttactaaccgtgaaagaggggcaaagaatgagattttctcaatcgtttttccttgtgccgctgaatggaagctatttcgttctcaacgatgtctttaggtatgttgctgatgagattgttgaaccagaagctaacaagaaagaagtcgaggaggttattcctcaagtggtccaaccaacagagcaggtagatgaagttgcagagccggttactatccctacccaacaacccgaggcgaaacagacaaccgaaaatacagtgaagaaaccagaaagagctgtagcaaatggacatcccaaaacacaggaggataatgttgtgaacgataaaagcaatggtgttgatgctcccaagaaatcatttgcacatattgtccaagatttggctcaaaacggtgctacattcaatgccaaagcttctcctgcaaagcctaagtctaagcctgttacaaagccgagtgctgctcgtgaatccaaagctcctgctcctgtttctgaacactcttctgctgcaacaatcgaccaacaagctgagggttatacgatatttgttgccaacttgctcatggacgctacaccagagcaactaaatgaaacattcaaaggttttggagctattacgaaagatggtatccaagtgagaagttacaggctcaagggaaactgttttggctttgtgacattcgcatctgctgaagctgtgaaattggtcctccaggctcacaaagaatcagccatcagaatcggaaaccgaagagtttcaatagaagagaaacgaggcaacaacgataatggaagacccgcaatgcgaaacggaggttataggaacgacaacggttacagaaacgatgggtataggcctcgaggcaacggttccaatggaggtcgaggctatggaagaaatggatctgagagacggggtgaatcacgcaatggtgaggctcacaatggtgatggcaaagttcatcagaacggtacggtagaagctagccgttaaaatactcaatccagaggctaaacaagtttgaagtcatttgttaaactctgttgtgttattgttgttcatttgaaattgaggttttataggaagagatagtgagagggagagagagagattagaagttcttttggagtaggtttatctcttaggtgataatcccttctttgagattttgtttgggataacaaaaatttgatgattacttttaccttccattctg

SEQ ID NO: 102141 - protein, 428 aa, Arabidopsis thaliana
  peptide (1)..(428): Ceres Seq. ID no. 13609501
  misc_feature (15)..(131): Pfam Name: Nuclear transport factor 2 (NTF2) domain Pfam Description: Nuclear transport factor 2 (NTF2) domain
  misc_feature (1)..(428): Homolog of NCBI NO: 18394029 NR Description: NTF2-containing RNA-binding protein, putative
  misc_feature (1)..(426): Homolog of NCBI NO: 25411027 NR Description: hypothetical protein At2g03640 [imported] - thaliana >gi|4406775|gb|AAD20086.1| unknown protein [Arabidopsis
  misc_feature (1)..(426): Homolog of NCBI NO: 30678068 NR Description: NTF2-containing RNA-binding protein, putative thaliana] >gi|26453142|dbj|BAC43647.1| unknown protein thaliana] >gi|28951005|gb|AAO63426.1| At2g03640 [Arabidopsis
  misc_feature (1)..(422): Homolog of NCBI NO: 30697452 NR Description: NTF2-containing RNA-binding protein, putative
  misc_feature (1)..(420): Homolog of NCBI NO: 30697455 NR Description: NTF2-containing RNA-binding protein, putative
  misc_feature (1)..(422): Homolog of NCBI NO: 21553535 NR Description: ras-GTPase-activating protein SH3-domain binding
  misc_feature (1)..(405): Homolog of NCBI NO: 15222258 NR Description: NTF2-containing RNA-binding protein, putative
  misc_feature (4)..(252): Homolog of NCBI NO: 34394922 NR Description: putative Ras-GTPase activating protein SH3
  misc_feature (7)..(188): Homolog of NCBI NO: 30687772 NR Description: NTF2-containing RNA-binding protein, putative thaliana] >gi|17979475|gb|AAL50074.1| AT3g25150/MJL12_9 thaliana] >gi|21360395|gb|AAM47313.1| AT3g25150/MJL12_9
  misc_feature (15)..(188): Homolog of NCBI NO: 9294171 NR Description: RNA-binding protein-like [Arabidopsis thaliana]
MALESNAPVVDPNTIGNSFVEKYYNLLYKSPSQVHQFYLDDSVLGRPGSDGEMVSVKSLKAINEQIMSFDYEISKIQILTADSQASYMNGVVTLVTGLLTVKEGQRMRFSQSFFLVPLNGSYFVLNDVFRYVADEIVEPEANKKEVEEVIPQVVQPTEQVDEVAEPVTIPTQQPEAKQTTENTVKKPERAVANGHPKTQEDNVVNDKSNGVDAPKKSFAHIVQDLAQNGATFNAKASPAKPKSKPVTKPSAARESKAPAPVSEHSSAATIDQQAEGYTIFVANLLMDATPEQLNETFKGFGAITKDGIQVRSYRLKGNCFGFVTFASAEAVKLVLQAHKESAIRIGNRRVSIEEKRGNNDNGRPAMRNGGYRNDNGYRNDGYRPRGNGSNGGRGYGRNGSERRGESRNGEAHNGDGKVHQNGTVEASR

SEQ ID NO: 102142 - protein, 376 aa, Arabidopsis thaliana
  peptide (1)..(376): Ceres Seq. ID no. 13609502
  misc_feature (1)..(79): Pfam Name: Nuclear transport factor 2 (NTF2) domain Pfam Description: Nuclear transport factor 2 (NTF2) domain
  misc_feature (1)..(376): Homolog of NCBI NO: 18394029 NR Description: NTF2-containing RNA-binding protein, putative
  misc_feature (1)..(374): Homolog of NCBI NO: 25411027 NR Description: hypothetical protein At2g03640 [imported] - thaliana >gi|4406775|gb|AAD20086.1| unknown protein [Arabidopsis
  misc_feature (1)..(374): Homolog of NCBI NO: 30678068 NR Description: NTF2-containing RNA-binding protein, putative thaliana] >gi|26453142|dbj|BAC43647.1| unknown protein thaliana] >gi|28951005|gb|AAO63426.1| At2g03640 [Arabidopsis
  misc_feature (1)..(370): Homolog of NCBI NO: 30697452 NR Description: NTF2-containing RNA-binding protein, putative
  misc_feature (1)..(368): Homolog of NCBI NO: 30697455 NR Description: NTF2-containing RNA-binding protein, putative
  misc_feature (1)..(370): Homolog of NCBI NO: 21553535 NR Description: ras-GTPase-activating protein SH3-domain binding
  misc_feature (1)..(353): Homolog of NCBI NO: 15222258 NR Description: NTF2-containing RNA-binding protein, putative
  misc_feature (1)..(200): Homolog of NCBI NO: 34394922 NR Description: putative Ras-GTPase activating protein SH3
  misc_feature (1)..(136): Homolog of NCBI NO: 30687772 NR Description: NTF2-containing RNA-binding protein, putative thaliana] >gi|17979475|gb|AAL50074.1| AT3g25150/MJL12_9 thaliana] >gi|21360395|gb|AAM47313.1| AT3g25150/MJL12_9
  misc_feature (1)..(136): Homolog of NCBI NO: 9294171 NR Description: RNA-binding protein-like [Arabidopsis thaliana]
MVSVKSLKAINEQIMSFDYEISKIQILTADSQASYMNGVVTLVTGLLTVKEGQRMRFSQSFFLVPLNGSYFVLNDVFRYVADEIVEPEANKKEVEEVIPQVVQPTEQVDEVAEPVTIPTQQPEAKQTTENTVKKPERAVANGHPKTQEDNVVNDKSNGVDAPKKSFAHIVQDLAQNGATFNAKASPAKPKSKPVTKPSAARESKAPAPVSEHSSAATIDQQAEGYTIFVANLLMDATPEQLNETFKGFGAITKDGIQVRSYRLKGNCFGFVTFASAEAVKLVLQAHKESAIRIGNRRVSIEEKRGNNDNGRPAMRNGGYRNDNGYRNDGYRPRGNGSNGGRGYGRNGSERRGESRNGEAHNGDGKVHQNGTVEASR

SEQ ID NO: 102143 - protein, 362 aa, Arabidopsis thaliana
  peptide (1)..(362): Ceres Seq. ID no. 13609503
  misc_feature (1)..(65): Pfam Name: Nuclear transport factor 2 (NTF2) domain Pfam Description: Nuclear transport factor 2 (NTF2) domain
  misc_feature (1)..(362): Homolog of NCBI NO: 18394029 NR Description: NTF2-containing RNA-binding protein, putative
  misc_feature (1)..(360): Homolog of NCBI NO: 25411027 NR Description: hypothetical protein At2g03640 [imported] - thaliana >gi|4406775|gb|AAD20086.1| unknown protein [Arabidopsis
  misc_feature (1)..(360): Homolog of NCBI NO: 30678068 NR Description: NTF2-containing RNA-binding protein, putative thaliana] >gi|26453142|dbj|BAC43647.1| unknown protein thaliana] >gi|28951005|gb|AAO63426.1| At2g03640 [Arabidopsis
  misc_feature (1)..(356): Homolog of NCBI NO: 30697452 NR Description: NTF2-containing RNA-binding protein, putative
  misc_feature (1)..(354): Homolog of NCBI NO: 30697455 NR Description: NTF2-containing RNA-binding protein, putative
  misc_feature (1)..(356): Homolog of NCBI NO: 21553535 NR Description: ras-GTPase-activating protein SH3-domain binding
  misc_feature (1)..(339): Homolog of NCBI NO: 15222258 NR Description: NTF2-containing RNA-binding protein, putative
  misc_feature (1)..(186): Homolog of NCBI NO: 34394922 NR Description: putative Ras-GTPase activating protein SH3
  misc_feature (1)..(122): Homolog of NCBI NO: 30687772 NR Description: NTF2-containing RNA-binding protein, putative thaliana] >gi|17979475|gb|AAL50074.1| AT3g25150/MJL12_9 thaliana] >gi|21360395|gb|AAM47313.1| AT3g25150/MJL12_9
  misc_feature (1)..(122): Homolog of NCBI NO: 9294171 NR Description: RNA-binding protein-like [Arabidopsis thaliana]
MSFDYEISKIQILTADSQASYMNGVVTLVTGLLTVKEGQRMRFSQSFFLVPLNGSYFVLNDVFRYVADEIVEPEANKKEVEEVIPQVVQPTEQVDEVAEPVTIPTQQPEAKQTTENTVKKPERAVANGHPKTQEDNVVNDKSNGVDAPKKSFAHIVQDLAQNGATFNAKASPAKPKSKPVTKPSAARESKAPAPVSEHSSAATIDQQAEGYTIFVANLLMDATPEQLNETFKGFGAITKDGIQVRSYRLKGNCFGFVTFASAEAVKLVLQAHKESAIRIGNRRVSIEEKRGNNDNGRPAMRNGGYRNDNGYRNDGYRPRGNGSNGGRGYGRNGSERRGESRNGEAHNGDGKVHQNGTVEASR

SEQ ID NO: 102144 - DNA, 1135 bp, Arabidopsis thaliana
  misc_feature (1)..(1135): Ceres Seq. ID no. 13609525
  misc_feature: MA Experiment ID: 108462 Result: Up-regulated in Transcription
  misc_feature: MA Experiment 108462 PARAMETER Experiment Name: At_Germinating_Seeds_cDNA_P Parameter: Age (day) Value: 2 vs. 0
  misc_feature: MA Experiment 108462 PARAMETER Experiment Name: At_Germinating_Seeds_cDNA_P Parameter: Tissue Value: Germinating Seeds
  misc_feature: MA Experiment ID: 108463 Result: Up-regulated in Transcription
  misc_feature: MA Experiment 108463 PARAMETER Experiment Name: At_Germinating_Seeds_cDNA_P Parameter: Age (day) Value: 3 vs. 0
  misc_feature: MA Experiment 108463 PARAMETER Experiment Name: At_Germinating_Seeds_cDNA_P Parameter: Tissue Value: Germinating Seeds
  misc_feature: MA Experiment ID: 108464 Result: Up-regulated in Transcription
  misc_feature: MA Experiment 108464 PARAMETER Experiment Name: At_Germinating_Seeds_cDNA_P Parameter: Age (day) Value: 4 vs. 0
  misc_feature: MA Experiment 108464 PARAMETER Experiment Name: At_Germinating_Seeds_cDNA_P Parameter: Tissue Value: Germinating Seeds
  misc_feature: MA Experiment ID: 108561 Result: Up-regulated in Transcription
  misc_feature: MA Experiment 108561 PARAMETER Experiment Name: At_100uM_ABA_cDNA_P Parameter: Timepoint (hr) Value: 6
  misc_feature: MA Experiment 108561 PARAMETER Experiment Name: At_100uM_ABA_cDNA_P Parameter: Tissue Value: Aerial
  misc_feature: MA Experiment 108561 PARAMETER Experiment Name: At_100uM_ABA_cDNA_P Parameter: Treatment Value: 100uM ABA vs. No Treatment
  misc_feature: MA Experiment ID: 108572 Result: Up-regulated in Transcription
  misc_feature: MA Experiment 108572 PARAMETER Experiment Name: At_Drought_cDNA_P Parameter: Timepoint (hr) Value: 1
  misc_feature: MA Experiment 108572 PARAMETER Experiment Name: At_Drought_cDNA_P Parameter: Tissue Value: Aerial
  misc_feature: MA Experiment 108572 PARAMETER Experiment Name: At_Drought_cDNA_P Parameter: Treatment Value: Drought vs. No Drought
  misc_feature: MA Experiment ID: 108573 Result: Up-regulated in Transcription
  misc_feature: MA Experiment 108573 PARAMETER Experiment Name: At_Drought_cDNA_P Parameter: Timepoint (hr) Value: 6
  misc_feature: MA Experiment 108573 PARAMETER Experiment Name: At_Drought_cDNA_P Parameter: Tissue Value: Aerial
  misc_feature: MA Experiment 108573 PARAMETER Experiment Name: At_Drought_cDNA_P Parameter: Treatment Value: Drought vs. No Drought
  misc_feature: MA Experiment ID: 108576 Result: Up-regulated in Transcription
  misc_feature: MA Experiment 108576 PARAMETER Experiment Name: At_42deg_Heat_cDNA_P Parameter: Temperature (deg C) Value: 42 vs. 22
  misc_feature: MA Experiment 108576 PARAMETER Experiment Name: At_42deg_Heat_cDNA_P Parameter: Timepoint (hr) Value: 1
  misc_feature: MA Experiment 108576 PARAMETER Experiment Name: At_42deg_Heat_cDNA_P Parameter: Tissue Value: Aerial
  misc_feature: MA Experiment ID: 108577 Result: Up-regulated in Transcription
  misc_feature: MA Experiment 108577 PARAMETER Experiment Name: At_42deg_Heat_cDNA_P Parameter: Temperature (deg C) Value: 42 vs. 22
  misc_feature: MA Experiment 108577 PARAMETER Experiment Name: At_42deg_Heat_cDNA_P Parameter: Timepoint (hr) Value: 6
  misc_feature: MA Experiment 108577 PARAMETER Experiment Name: At_42deg_Heat_cDNA_P Parameter: Tissue Value: Aerial
  misc_feature: MA Experiment ID: 108579 Result: Up-regulated in Transcription
  misc_feature: MA Experiment 108579 PARAMETER Experiment Name: At_4deg_Cold_cDNA_P Parameter: Temperature (deg C) Value: 4 vs. 22
  misc_feature: MA Experiment 108579 PARAMETER Experiment Name: At_4deg_Cold_cDNA_P Parameter: Timepoint (hr) Value: 6
  misc_feature: MA Experiment 108579 PARAMETER Experiment Name: At_4deg_Cold_cDNA_P Parameter: Tissue Value: Aerial
  misc_feature: MA Experiment ID: 108594 Result: Down-regulated in Transcription
  misc_feature: MA Experiment 108594 PARAMETER Experiment Name: At_Ler-rhl_Root_cDNA_P Parameter: Plant Line Value: null
  misc_feature: MA Experiment ID: 108605 Result: Up-regulated in Transcription
  misc_feature: MA Experiment 108605 PARAMETER Experiment Name: At_100uM_ABA_cDNA_P Parameter: Timepoint (hr) Value: 6
  misc_feature: MA Experiment 108605 PARAMETER Experiment Name: At_100uM_ABA_cDNA_P Parameter: Tissue Value: Aerial
  misc_feature: MA Experiment 108605 PARAMETER Experiment Name: At_100uM_ABA_cDNA_P Parameter: Treatment Value: 100uM ABA vs. No Treatment
  misc_feature: MA Experiment ID: 108607 Result: Up-regulated in Transcription
  misc_feature: MA Experiment 108607 PARAMETER Experiment Name: At_100uM_ABA_cDNA_P Parameter: Timepoint (hr) Value: 4
  misc_feature: MA Experiment 108607 PARAMETER Experiment Name: At_100uM_ABA_cDNA_P Parameter: Tissue Value: Aerial
  misc_feature: MA Experiment 108607 PARAMETER Experiment Name: At_100uM_ABA_cDNA_P Parameter: Treatment Value: 100uM ABA vs. No Treatment
  misc_feature: MA Experiment ID: 108609 Result: Up-regulated in Transcription
  misc_feature: MA Experiment 108609 PARAMETER Experiment Name: At_100uM_ABA_cDNA_P Parameter: Timepoint (hr) Value: 24
  misc_feature: MA Experiment 108609 PARAMETER Experiment Name: At_100uM_ABA_cDNA_P Parameter: Tissue Value: Aerial
  misc_feature: MA Experiment 108609 PARAMETER Experiment Name: At_100uM_ABA_cDNA_P Parameter: Treatment Value: 100uM ABA vs. No Treatment
  misc_feature: MA Experiment ID: 108668 Result: Up-regulated in Transcription
  misc_feature: MA Experiment 108668 PARAMETER Experiment Name: At_2mM_SA_cDNA_P Parameter: Plant Line Value: WS
  misc_feature: MA Experiment 108668 PARAMETER Experiment Name: At_2mM_SA_cDNA_P Parameter: Timepoint (hr) Value: 6
  misc_feature: MA Experiment 108668 PARAMETER Experiment Name: At_2mM_SA_cDNA_P Parameter: Treatment Value: 2mM SA vs. No Treatment
  misc_feature: MA Experiment ID: 20000069 Result: Up-regulated in Transcription
  misc_feature: MA Experiment 20000069 PARAMETER Experiment Name: At_100uM_ABA_Mutants_cDNA_P Parameter: Plant Line Value: CS23
  misc_feature: MA Experiment 20000069 PARAMETER Experiment Name: At_100uM_ABA_Mutants_cDNA_P Parameter: Timepoint (hr) Value: 6
  misc_feature: MA Experiment 20000069 PARAMETER Experiment Name: At_100uM_ABA_Mutants_cDNA_P Parameter: Tissue Value: Aerial
  misc_feature: MA Experiment 20000069 PARAMETER Experiment Name: At_100uM_ABA_Mutants_cDNA_P Parameter: Treatment Value: 100uM ABA vs. No Treatment
  misc_feature: MA Experiment ID: 20000070 Result: Up-regulated in Transcription
  misc_feature: MA Experiment 20000070 PARAMETER Experiment Name: At_100uM_ABA_Mutants_cDNA_P Parameter: Plant Line Value: CS24
  misc_feature: MA Experiment 20000070 PARAMETER Experiment Name: At_100uM_ABA_Mutants_cDNA_P Parameter: Timepoint (hr) Value: 6
  misc_feature: MA Experiment 20000070 PARAMETER Experiment Name: At_100uM_ABA_Mutants_cDNA_P Parameter: Tissue Value: Aerial
  misc_feature: MA Experiment 20000070 PARAMETER Experiment Name: At_100uM_ABA_Mutants_cDNA_P Parameter: Treatment Value: 100uM ABA vs. No Treatment
  misc_feature: MA Experiment ID: 20000072 Result: Up-regulated in Transcription
  misc_feature: MA Experiment 20000072 PARAMETER Experiment Name: At_100uM_ABA_Mutants_cDNA_P Parameter: Plant Line Value: CS8105
  misc_feature: MA Experiment 20000072 PARAMETER Experiment Name: At_100uM_ABA_Mutants_cDNA_P Parameter: Timepoint (hr) Value: 6
  misc_feature: MA Experiment 20000072 PARAMETER Experiment Name: At_100uM_ABA_Mutants_cDNA_P Parameter: Tissue Value: Aerial
  misc_feature: MA Experiment 20000072 PARAMETER Experiment Name: At_100uM_ABA_Mutants_cDNA_P Parameter: Treatment Value: 100uM ABA vs. No Treatment
  misc_feature: MA Experiment ID: 20000088 Result: Up-regulated in Transcription
  misc_feature: MA Experiment 20000088 PARAMETER Experiment Name: At_100uM_ABA_Mutants_cDNA_P Parameter: Plant Line Value: Landsberg
  misc_feature: MA Experiment 20000088 PARAMETER Experiment Name: At_100uM_ABA_Mutants_cDNA_P Parameter: Timepoint (hr) Value: 6
  misc_feature: MA Experiment 20000088 PARAMETER Experiment Name: At_100uM_ABA_Mutants_cDNA_P Parameter: Tissue Value: Aerial
  misc_feature: MA Experiment 20000088 PARAMETER Experiment Name: At_100uM_ABA_Mutants_cDNA_P Parameter: Treatment Value: 100uM ABA vs. No Treatment
  misc_feature: MA Experiment ID: 20000093 Result: Up-regulated in Transcription
  misc_feature: MA Experiment 20000093 PARAMETER Experiment Name: At_42deg_Heat_cDNA_P Parameter: Temperature (deg C) Value: 42 vs. 22
  misc_feature: MA Experiment 20000093 PARAMETER Experiment Name: At_42deg_Heat_cDNA_P Parameter: Timepoint (hr) Value: 0.5
  misc_feature: MA Experiment 20000093 PARAMETER Experiment Name: At_42deg_Heat_cDNA_P Parameter: Tissue Value: Aerial
  misc_feature: MA Experiment ID: 20000111 Result: Up-regulated in Transcription
  misc_feature: MA Experiment 20000111 PARAMETER Experiment Name: At_42deg_Heat_cDNA_P Parameter: Temperature (deg C) Value: 42 vs. 22
  misc_feature: MA Experiment 20000111 PARAMETER Experiment Name: At_42deg_Heat_cDNA_P Parameter: Timepoint (hr) Value: 6
  misc_feature: MA Experiment 20000111 PARAMETER Experiment Name: At_42deg_Heat_cDNA_P Parameter: Tissue Value: Aerial
  misc_feature: MA Experiment ID: 20000112 Result: Up-regulated in Transcription
  misc_feature: MA Experiment 20000112 PARAMETER Experiment Name: At_42deg_Heat_cDNA_P Parameter: Temperature (deg C) Value: 42 vs. 22
  misc_feature: MA Experiment 20000112 PARAMETER Experiment Name: At_42deg_Heat_cDNA_P Parameter: Timepoint (hr) Value: 2
  misc_feature: MA Experiment 20000112 PARAMETER Experiment Name: At_42deg_Heat_cDNA_P Parameter: Tissue Value: Aerial
  misc_feature: MA Experiment ID: 20000113 Result: Up-regulated in Transcription
  misc_feature: MA Experiment 20000113 PARAMETER Experiment Name: At_42deg_Heat_cDNA_P Parameter: Temperature (deg C) Value: 42 vs. 22
  misc_feature: MA Experiment 20000113 PARAMETER Experiment Name: At_42deg_Heat_cDNA_P Parameter: Timepoint (hr) Value: 8
  misc_feature: MA Experiment 20000113 PARAMETER Experiment Name: At_42deg_Heat_cDNA_P Parameter: Tissue Value: Aerial
  misc_feature: MA Experiment ID: 20000117 Result: Up-regulated in Transcription
  misc_feature: MA Experiment 20000117 PARAMETER Experiment Name: At_100uM_ABA_Mutants_cDNA_P Parameter: Plant Line Value: Columbia
  misc_feature: MA Experiment 20000117 PARAMETER Experiment Name: At_100uM_ABA_Mutants_cDNA_P Parameter: Timepoint (hr) Value: 6
  misc_feature: MA Experiment 20000117 PARAMETER Experiment Name: At_100uM_ABA_Mutants_cDNA_P Parameter: Tissue Value: Aerial
  misc_feature: MA Experiment 20000117 PARAMETER Experiment Name: At_100uM_ABA_Mutants_cDNA_P Parameter: Treatment Value: 100uM ABA vs. No Treatment
  misc_feature: MA Experiment ID: 20000144 Result: Up-regulated in Transcription
  misc_feature: MA Experiment 20000144 PARAMETER Experiment Name: At_42deg_Heat_cDNA_P Parameter: Temperature (deg C) Value: 42 vs. 22
  misc_feature: MA Experiment 20000144 PARAMETER Experiment Name: At_42deg_Heat_cDNA_P Parameter: Timepoint (hr) Value: 1
  misc_feature: MA Experiment 20000144 PARAMETER Experiment Name: At_42deg_Heat_cDNA_P Parameter: Tissue Value: Aerial
  misc_feature: MA Experiment ID: 20000169 Result: Up-regulated in Transcription
  misc_feature: MA Experiment 20000169 PARAMETER Experiment Name: At_100uM_ABA_P Parameter: Age (day) Value: 14
  misc_feature: MA Experiment 20000169 PARAMETER Experiment Name: At_100uM_ABA_P Parameter: Organism Value: A. thaliana
  misc_feature: MA Experiment 20000169 PARAMETER Experiment Name: At_100uM_ABA_P Parameter: Plant Line Value: WS
  misc_feature: MA Experiment 20000169 PARAMETER Experiment Name: At_100uM_ABA_P Parameter: Timepoint (hr) Value: 6
  misc_feature: MA Experiment 20000169 PARAMETER Experiment Name: At_100uM_ABA_P Parameter: Tissue Value: Aerial
  misc_feature: MA Experiment 20000169 PARAMETER Experiment Name: At_100uM_ABA_P Parameter: Treatment Value: 100uM ABA vs. No Treatment
  misc_feature: MA Experiment ID: 20000171 Result: Up-regulated in Transcription
  misc_feature: MA Experiment 20000171 PARAMETER Experiment Name: At_42deg_Heat_P Parameter: Age (day) Value: 14
  misc_feature: MA Experiment 20000171 PARAMETER Experiment Name: At_42deg_Heat_P Parameter: Organism Value: A. thaliana
  misc_feature: MA Experiment 20000171 PARAMETER Experiment Name: At_42deg_Heat_P Parameter: Plant Line Value: WS
  misc_feature: MA Experiment 20000171 PARAMETER Experiment Name: At_42deg_Heat_P Parameter: Temperature (deg C) Value: 42 vs. 22
  misc_feature: MA Experiment 20000171 PARAMETER Experiment Name: At_42deg_Heat_P Parameter: Timepoint (hr) Value: 1
  misc_feature: MA Experiment 20000171 PARAMETER Experiment Name: At_42deg_Heat_P Parameter: Tissue Value: Aerial
  misc_feature: MA Experiment ID: 20000173 Result: Up-regulated in Transcription
  misc_feature: MA Experiment 20000173 PARAMETER Experiment Name: At_42deg_Heat_P Parameter: Age (day) Value: 14
  misc_feature: MA Experiment 20000173 PARAMETER Experiment Name: At_42deg_Heat_P Parameter: Organism Value: A. thaliana
  misc_feature: MA Experiment 20000173 PARAMETER Experiment Name: At_42deg_Heat_P Parameter: Plant Line Value: WS
  misc_feature: MA Experiment 20000173 PARAMETER Experiment Name: At_42deg_Heat_P Parameter: Temperature (deg C) Value: 42 vs. 22
  misc_feature: MA Experiment 20000173 PARAMETER Experiment Name: At_42deg_Heat_P Parameter: Timepoint (hr) Value: 6
  misc_feature: MA Experiment 20000173 PARAMETER Experiment Name: At_42deg_Heat_P Parameter: Tissue Value: Aerial
  misc_feature: MA Experiment ID: 20000180 Result: Up-regulated in Transcription
  misc_feature: MA Experiment 20000180 PARAMETER Experiment Name: At_Germinating_Seeds_P Parameter: Age (hr) Value: 24 vs. 0
  misc_feature: MA Experiment 20000180 PARAMETER Experiment Name: At_Germinating_Seeds_P Parameter: Tissue Value: Germinating Seeds
  misc_feature: MA Experiment ID: 20000185 Result: Down-regulated in Transcription
  misc_feature: MA Experiment 20000185 PARAMETER Experiment Name: At_Roots__P Parameter: Age (day) Value: 7 vs. 21
  misc_feature: MA Experiment 20000185 PARAMETER Experiment Name: At_Roots__P Parameter: Organism Value: A. thaliana
  misc_feature: MA Experiment 20000185 PARAMETER Experiment Name: At_Roots__P Parameter: Tissue Value: Roots vs. Whole Plant
  misc_feature: MA Experiment ID: 20000234 Result: Down-regulated in Transcription
  misc_feature: MA Experiment 20000234 PARAMETER Experiment Name: At_Siliques_P Parameter: Age (day) Value: 21
  misc_feature: MA Experiment 20000234 PARAMETER Experiment Name: At_Siliques_P Parameter: Organism Value: A. thaliana
  misc_feature: MA Experiment 20000234 PARAMETER Experiment Name: At_Siliques_P Parameter: Plant Line Value: WS
  misc_feature: MA Experiment 20000234 PARAMETER Experiment Name: At_Siliques_P Parameter: Tissue Value: Less Than 5mm Siliques vs. Whole Plant
  misc_feature: MA Experiment ID: 20000235 Result: Down-regulated in Transcription
  misc_feature: MA Experiment 20000235 PARAMETER Experiment Name: At_Siliques_P Parameter: Age (day) Value: 21
  misc_feature: MA Experiment 20000235 PARAMETER Experiment Name: At_Siliques_P Parameter: Organism Value: A. thaliana
  misc_feature: MA Experiment 20000235 PARAMETER Experiment Name: At_Siliques_P Parameter: Plant Line Value: WS
  misc_feature: MA Experiment 20000235 PARAMETER Experiment Name: At_Siliques_P Parameter: Tissue Value: 5-10mm Siliques vs. Whole Plant
  misc_feature: MA Experiment ID: 20000264 Result: Up-regulated in Transcription
  misc_feature: MA Experiment 20000264 PARAMETER Experiment Name: At_Open_Flower_P Parameter: Age (day) Value: 21
  misc_feature: MA Experiment 20000264 PARAMETER Experiment Name: At_Open_Flower_P Parameter: Plant Line Value: WS
  misc_feature: MA Experiment 20000264 PARAMETER Experiment Name: At_Open_Flower_P Parameter: Tissue Value: Open Flower vs. Whole Plant
  misc_feature: MA Experiment ID: 20000268 Result: Up-regulated in Transcription
  misc_feature: MA Experiment 20000268 PARAMETER Experiment Name: At_100mM_NaCl__P Parameter: Age (day) Value: 14
  misc_feature: MA Experiment 20000268 PARAMETER Experiment Name: At_100mM_NaCl__P Parameter: Organism Value: A. thaliana
  misc_feature: MA Experiment 20000268 PARAMETER Experiment Name: At_100mM_NaCl__P Parameter: Plant Line Value: WS
  misc_feature: MA Experiment 20000268 PARAMETER Experiment Name: At_100mM_NaCl__P Parameter: Timepoint (hr) Value: 6
  misc_feature: MA Experiment 20000268 PARAMETER Experiment Name: At_100mM_NaCl__P Parameter: Tissue Value: Whole Plant
  misc_feature: MA Experiment 20000268 PARAMETER Experiment Name: At_100mM_NaCl__P Parameter: Treatment Value: 100mM NaCl vs. No Treatment
  misc_feature: MA Experiment ID: 20000436 Result: Up-regulated in Transcription
  misc_feature: MA Experiment 20000436 PARAMETER Experiment Name: At_Drought_P Parameter: Age (day) Value: 7
  misc_feature: MA Experiment 20000436 PARAMETER Experiment Name: At_Drought_P Parameter: Organism Value: A. thaliana
  misc_feature: MA Experiment 20000436 PARAMETER Experiment Name: At_Drought_P Parameter: Plant Line Value: WS
  misc_feature: MA Experiment 20000436 PARAMETER Experiment Name: At_Drought_P Parameter: Timepoint (hr) Value: 12
  misc_feature: MA Experiment 20000436 PARAMETER Experiment Name: At_Drought_P Parameter: Tissue Value: Whole Plant
  misc_feature: MA Experiment 20000436 PARAMETER Experiment Name: At_Drought_P Parameter: Treatment Value: Drought vs. No Drought
  misc_feature: MA Experiment ID: 20000439 Result: Down-regulated in Transcription
  misc_feature: MA Experiment 20000439 PARAMETER Experiment Name: At_Roots__P Parameter: Age (day) Value: 14 vs. 21
  misc_feature: MA Experiment 20000439 PARAMETER Experiment Name: At_Roots__P Parameter: Organism Value: A. thaliana
  misc_feature: MA Experiment 20000439 PARAMETER Experiment Name: At_Roots__P Parameter: Tissue Value: Roots vs. Whole Plant
  misc_feature: MA Experiment ID: 20000453 Result: Up-regulated in Transcription
  misc_feature: MA Experiment 20000453 PARAMETER Experiment Name: At_100uM_ABA_P Parameter: Age (day) Value: 15
  misc_feature: MA Experiment 20000453 PARAMETER Experiment Name: At_100uM_ABA_P Parameter: Organism Value: A. thaliana
  misc_feature: MA Experiment 20000453 PARAMETER Experiment Name: At_100uM_ABA_P Parameter: Plant Line Value: WS
  misc_feature: MA Experiment 20000453 PARAMETER Experiment Name: At_100uM_ABA_P Parameter: Timepoint (hr) Value: 24
  misc_feature: MA Experiment 20000453 PARAMETER Experiment Name: At_100uM_ABA_P Parameter: Tissue Value: Aerial
  misc_feature: MA Experiment 20000453 PARAMETER Experiment Name: At_100uM_ABA_P Parameter: Treatment Value: 100uM ABA vs. No Treatment
  misc_feature: MA Experiment ID: 20000794 Result: Up-regulated in Transcription
  misc_feature: MA Experiment 20000794 PARAMETER Experiment Name: At_Petals_P Parameter: Age (day) Value: 23-25 days
  misc_feature: MA Experiment 20000794 PARAMETER Experiment Name: At_Petals_P Parameter: Plant Line Value: WS
  misc_feature: MA Experiment 20000794 PARAMETER Experiment Name: At_Petals_P Parameter: Tissue Value: Petals vs. Whole plant
  misc_feature: MA Experiment ID: 20001248 Result: Down-regulated in Transcription
  misc_feature: MA Experiment 20001248 PARAMETER Experiment Name: At_Far-red-induction_P Parameter: Age (day) Value: 7
  misc_feature: MA Experiment 20001248 PARAMETER Experiment Name: At_Far-red-induction_P Parameter: Light Value: Far-red vs. White
  misc_feature: MA Experiment 20001248 PARAMETER Experiment Name: At_Far-red-induction_P Parameter: Organism Value: A. thaliana
  misc_feature: MA Experiment 20001248 PARAMETER Experiment Name: At_Far-red-induction_P Parameter: Plant Line Value: Columbia
  misc_feature: MA Experiment 20001248 PARAMETER Experiment Name: At_Far-red-induction_P Parameter: Timepoint (hr) Value: 4
  misc_feature: MA Experiment 20001248 PARAMETER Experiment Name: At_Far-red-induction_P Parameter: Tissue Value: Whole Plant
  misc_feature: MA Experiment ID: 20001451 Result: Down-regulated in Transcription
  misc_feature: MA Experiment 20001451 PARAMETER Experiment Name: At_Far-red-induction_P Parameter: Age (day) Value: 7
  misc_feature: MA Experiment 20001451 PARAMETER Experiment Name: At_Far-red-induction_P Parameter: Light Value: Far-red vs. White
  misc_feature: MA Experiment 20001451 PARAMETER Experiment Name: At_Far-red-induction_P Parameter: Organism Value: A. thaliana
  misc_feature: MA Experiment 20001451 PARAMETER Experiment Name: At_Far-red-induction_P Parameter: Plant Line Value: Columbia
  misc_feature: MA Experiment 20001451 PARAMETER Experiment Name: At_Far-red-induction_P Parameter: Timepoint (hr) Value: 24
  misc_feature: MA Experiment 20001451 PARAMETER Experiment Name: At_Far-red-induction_P Parameter: Tissue Value: Whole Plant
  misc_feature: MA Experiment ID: 20001555 Result: Up-regulated in Transcription
  misc_feature: MA Experiment 20001555 PARAMETER Experiment Name: At_Drought_Soil_Dry_P Parameter: Age (day) Value: 24
  misc_feature: MA Experiment 20001555 PARAMETER Experiment Name: At_Drought_Soil_Dry_P Parameter: Organism Value: A. thaliana
  misc_feature: MA Experiment 20001555 PARAMETER Experiment Name: At_Drought_Soil_Dry_P Parameter: Plant Line Value: WS
  misc_feature: MA Experiment 20001555 PARAMETER Experiment Name: At_Drought_Soil_Dry_P Parameter: Post Timepoint (hr) Value: None
  misc_feature: MA Experiment 20001555 PARAMETER Experiment Name: At_Drought_Soil_Dry_P Parameter: Post-Treatment Value: None
  misc_feature: MA Experiment 20001555 PARAMETER Experiment Name: At_Drought_Soil_Dry_P Parameter: Timepoint (day) Value: 10
  misc_feature: MA Experiment 20001555 PARAMETER Experiment Name: At_Drought_Soil_Dry_P Parameter: Treatment Value: Drought vs. No Drought
  misc_feature: MA Experiment ID: 20001559 Result: Up-regulated in Transcription
  misc_feature: MA Experiment 20001559 PARAMETER Experiment Name: At_Drought_Soil_Dry_P Parameter: Age (day) Value: 28
  misc_feature: MA Experiment 20001559 PARAMETER Experiment Name: At_Drought_Soil_Dry_P Parameter: Organism Value: A. thaliana
  misc_feature: MA Experiment 20001559 PARAMETER Experiment Name: At_Drought_Soil_Dry_P Parameter: Plant Line Value: WS
  misc_feature: MA Experiment 20001559 PARAMETER Experiment Name: At_Drought_Soil_Dry_P Parameter: Post Timepoint (hr) Value: 29
  misc_feature: MA Experiment 20001559 PARAMETER Experiment Name: At_Drought_Soil_Dry_P Parameter: Post-Treatment Value: Re-Water vs. No Drought
  misc_feature: MA Experiment 20001559 PARAMETER Experiment Name: At_Drought_Soil_Dry_P Parameter: Timepoint (day) Value: 14
  misc_feature: MA Experiment 20001559 PARAMETER Experiment Name: At_Drought_Soil_Dry_P Parameter: Treatment Value: Drought vs. No Drought
  misc_feature: MA Experiment ID: 20001904 Result: Up-regulated in Transcription
  misc_feature: MA Experiment 20001904 PARAMETER Experiment Name: At_Drought_Reproduction_P Parameter: Age (day) Value: 37
  misc_feature: MA Experiment 20001904 PARAMETER Experiment Name: At_Drought_Reproduction_P Parameter: Organism Value: A. thaliana
  misc_feature: MA Experiment 20001904 PARAMETER Experiment Name: At_Drought_Reproduction_P Parameter: Plant Line Value: WS
  misc_feature: MA Experiment 20001904 PARAMETER Experiment Name: At_Drought_Reproduction_P Parameter: Timepoint (day) Value: 7
  misc_feature: MA Experiment 20001904 PARAMETER Experiment Name: At_Drought_Reproduction_P Parameter: Tissue Value: Rosettes
  misc_feature: MA Experiment 20001904 PARAMETER Experiment Name: At_Drought_Reproduction_P Parameter: Treatment Value: Drought vs. No Drought
  misc_feature: MA Experiment ID: 20001905 Result: Up-regulated in Transcription
  misc_feature: MA Experiment 20001905 PARAMETER Experiment Name: At_Drought_Reproduction_P Parameter: Age (day) Value: 40
  misc_feature: MA Experiment 20001905 PARAMETER Experiment Name: At_Drought_Reproduction_P Parameter: Organism Value: A. thaliana
  misc_feature: MA Experiment 20001905 PARAMETER Experiment Name: At_Drought_Reproduction_P Parameter: Plant Line Value: WS
  misc_feature: MA Experiment 20001905 PARAMETER Experiment Name: At_Drought_Reproduction_P Parameter: Timepoint (day) Value: 10
  misc_feature: MA Experiment 20001905 PARAMETER Experiment Name: At_Drought_Reproduction_P Parameter: Tissue Value: Rosettes
  misc_feature: MA Experiment 20001905 PARAMETER Experiment Name: At_Drought_Reproduction_P Parameter: Treatment Value: Drought vs. No Drought
taacaatgtctataaaatcagtacaggtctattcttgttcactagcttcgaaattttagtcgaagaaacaaaaaaaaatggcgacggtacaattgtccacccaatttagctgccaaaccagagtttcaatctcaccgaactctaaatctatctccaagcctccgtttctggtaccggtgacctcaattattcaccgcccgatgatctccaccggaggaatcgctgtttccccccgtagagttttcaaagtccgagccacagatacgggagagataggatcagctctattggcggcggaggaagcaattgaagacgtggaagagacggagcggctaaagagatcgctcgtggattcgttgtacggaacagatcgaggtttaagcgcatcgagcgaaaccagagctgaaatcggagatctaatcacacagctcgagtctaagaaccctactccagctccgacggaagctcttttccttctcaacggcaaatggatcctcgcctacacatcgttcgtgaatttgttcccgttgctatcacgaggaatcgtaccgttaataaaagtcgatgagatctctcaaaccattgattcagataacttcaccgtccagaactctgttcgtttcgctggtcctttaggtacaaactcgattagcaccaacgctaaattcgaaatccgaagccctaaacgcgtccagattaagtttgagcaaggcgtaattgggacgcctcagctaacggattctattgagataccggaatatgtagaggttcttggtcaaaagattgatcttaacccgatcagagggttacttacctcggtgcaagacacagcctcgtctgtggctagaaccatatcaagccaaccaccgttgaaattctctttgccggcggacaatgcgcagtcttggctactcacgacttatctagacaaagacattcggatctctagaggagacggtggaagtgtctttgtgcttatcaaagaaggaagccctctcttgaatccttgaacttggtcaaaatatatgtctctctcttgtcgttgtgttaagtgagacaaatatatagtgtggttgtaggtttacttcttaatcgttgttattaactcgatgataaggaatataatgtttttaac

SEQ ID NO: 102145 - protein, 310 aa, Arabidopsis thaliana; identical to SEQ ID NO: 37403
  peptide (1)..(310): Ceres Seq. ID no. 13609526
  misc_feature (84)..(301): Pfam Name: PAP_fibrillin Pfam Description: PAP_fibrillin
  misc_feature (1)..(310): Homolog of NCBI NO: 15235575 NR Description: plastid-lipid associated protein (PAP), putative
  misc_feature (1)..(310): Homolog of NCBI NO: 21618237 NR Description: fibrillin precursor-like protein [Arabidopsis
  misc_feature (1)..(310): Homolog of NCBI NO: 18377868 NR Description: AT4g22240/T10I14_70 [Arabidopsis thaliana]
  misc_feature (1)..(310): Homolog of NCBI NO: 14248556 NR Description: plastid-lipid associated protein PAP2 [Brassica
  misc_feature (1)..(310): Homolog of NCBI NO: 14248550 NR Description: plastid-lipid associated protein PAP2 [Brassica
  misc_feature (1)..(310): Homolog of NCBI NO: 15233357 NR Description: plastid-lipid associated protein PAP/fibrillin,
  misc_feature (3)..(310): Homolog of NCBI NO: 14248554 NR Description: plastid-lipid associated protein PAP1 [Brassica
  misc_feature (3)..(310): Homolog of NCBI NO: 14248548 NR Description: plastid-lipid associated protein PAP1 [Brassica
  misc_feature (74)..(310): Homolog of NCBI NO: 4139097 NR Description: fibrillin [Brassica napus]
  misc_feature (1)..(310): Homolog of NCBI NO: 3928760 NR Description: homolog to plastid-lipid-associated protein

SEQ ID NO: 102146 - protein, 269 aa, Arabidopsis thaliana; identical to SEQ ID NO: 37404
  peptide (1)..(269): Ceres Seq. ID no. 13609527
  misc_feature (43)..(260): Pfam Name: PAP_fibrillin Pfam Description: PAP_fibrillin
  misc_feature (1)..(269): Homolog of NCBI NO: 15235575 NR Description: plastid-lipid associated protein (PAP), putative
  misc_feature (1)..(269): Homolog of NCBI NO: 21618237 NR Description: fibrillin precursor-like protein [Arabidopsis
  misc_feature (1)..(269): Homolog of NCBI NO: 18377868 NR Description: AT4g22240/T10I14_70 [Arabidopsis thaliana]
  misc_feature (1)..(269): Homolog of NCBI NO: 14248556 NR Description: plastid-lipid associated protein PAP2 [Brassica
  misc_feature (1)..(269): Homolog of NCBI NO: 14248550 NR Description: plastid-lipid associated protein PAP2 [Brassica
  misc_feature (1)..(269): Homolog of NCBI NO: 15233357 NR Description: plastid-lipid associated protein PAP/fibrillin,
  misc_feature (1)..(269): Homolog of NCBI NO: 14248554 NR Description: plastid-lipid associated protein PAP1 [Brassica
  misc_feature (1)..(269): Homolog of NCBI NO: 14248548 NR Description: plastid-lipid associated protein PAP1 [Brassica
  misc_feature (33)..(269): Homolog of NCBI NO: 4139097 NR Description: fibrillin [Brassica napus]
  misc_feature (1)..(269): Homolog of NCBI NO: 3928760 NR Description: homolog to plastid-lipid-associated protein

SEQ ID NO: 102147 - DNA, 1101 bp, Arabidopsis thaliana
  misc_feature (1)..(1101): Ceres Seq. ID no. 13609528
  misc_feature: MA Experiment ID: 20000166 Result: Down-regulated in Transcription
  misc_feature: MA Experiment 20000166 PARAMETER Experiment Name: At_100uM_ABA_P Parameter: Age (day) Value: 14
  misc_feature: MA Experiment 20000166 PARAMETER Experiment Name: At_100uM_ABA_P Parameter: Organism Value: A. thaliana
  misc_feature: MA Experiment 20000166 PARAMETER Experiment Name: At_100uM_ABA_P Parameter: Plant Line Value: WS
  misc_feature: MA Experiment 20000166 PARAMETER Experiment Name: At_100uM_ABA_P Parameter: Timepoint (hr) Value: 1
  misc_feature: MA Experiment 20000166 PARAMETER Experiment Name: At_100uM_ABA_P Parameter: Tissue Value: Aerial
  misc_feature: MA Experiment 20000166 PARAMETER Experiment Name: At_100uM_ABA_P Parameter: Treatment Value: 100uM ABA vs. No Treatment
  misc_feature: MA Experiment ID: 20000171 Result: Down-regulated in Transcription
  misc_feature: MA Experiment 20000171 PARAMETER Experiment Name: At_42deg_Heat_P Parameter: Age (day) Value: 14
  misc_feature: MA Experiment 20000171 PARAMETER Experiment Name: At_42deg_Heat_P Parameter: Organism Value: A. thaliana
  misc_feature: MA Experiment 20000171 PARAMETER Experiment Name: At_42deg_Heat_P Parameter: Plant Line Value: WS
  misc_feature: MA Experiment 20000171 PARAMETER Experiment Name: At_42deg_Heat_P Parameter: Temperature (deg C) Value: 42 vs. 22
  misc_feature: MA Experiment 20000171 PARAMETER Experiment Name: At_42deg_Heat_P Parameter: Timepoint (hr) Value: 1
  misc_feature: MA Experiment 20000171 PARAMETER Experiment Name: At_42deg_Heat_P Parameter: Tissue Value: Aerial
  misc_feature: MA Experiment ID: 20000173 Result: Down-regulated in Transcription
  misc_feature: MA Experiment 20000173 PARAMETER Experiment Name: At_42deg_Heat_P Parameter: Age (day) Value: 14
  misc_feature: MA Experiment 20000173 PARAMETER Experiment Name: At_42deg_Heat_P Parameter: Organism Value: A. thaliana
  misc_feature: MA Experiment 20000173 PARAMETER Experiment Name: At_42deg_Heat_P Parameter: Plant Line Value: WS
  misc_feature: MA Experiment 20000173 PARAMETER Experiment Name: At_42deg_Heat_P Parameter: Temperature (deg C) Value: 42 vs. 22
  misc_feature: MA Experiment 20000173 PARAMETER Experiment Name: At_42deg_Heat_P Parameter: Timepoint (hr) Value: 6
  misc_feature: MA Experiment 20000173 PARAMETER Experiment Name: At_42deg_Heat_P Parameter: Tissue Value: Aerial
  misc_feature: MA Experiment ID: 20000179 Result: Down-regulated in Transcription
  misc_feature: MA Experiment 20000179 PARAMETER Experiment Name: At_Germinating_Seeds_P Parameter: Age (hr) Value: 6 vs. 0
  misc_feature: MA Experiment 20000179 PARAMETER Experiment Name: At_Germinating_Seeds_P Parameter: Tissue Value: Germinating Seeds
  misc_feature: MA Experiment ID: 20000180 Result: Down-regulated in Transcription
  misc_feature: MA Experiment 20000180 PARAMETER Experiment Name: At_Germinating_Seeds_P Parameter: Age (hr) Value: 24 vs. 0
  misc_feature: MA Experiment 20000180 PARAMETER Experiment Name: At_Germinating_Seeds_P Parameter: Tissue Value: Germinating Seeds
  misc_feature: MA Experiment ID: 20000185 Result: Down-regulated in Transcription
  misc_feature: MA Experiment 20000185 PARAMETER Experiment Name: At_Roots__P Parameter: Age (day) Value: 7 vs. 21
  misc_feature: MA Experiment 20000185 PARAMETER Experiment Name: At_Roots__P Parameter: Organism Value: A. thaliana
  misc_feature: MA Experiment 20000185 PARAMETER Experiment Name: At_Roots__P Parameter: Tissue Value: Roots vs. Whole Plant
  misc_feature: MA Experiment ID: 20000234 Result: Down-regulated in Transcription
  misc_feature: MA Experiment 20000234 PARAMETER Experiment Name: At_Siliques_P Parameter: Age (day) Value: 21
  misc_feature: MA Experiment 20000234 PARAMETER Experiment Name: At_Siliques_P Parameter: Organism Value: A. thaliana
  misc_feature: MA Experiment 20000234 PARAMETER Experiment Name: At_Siliques_P Parameter: Plant Line Value: WS
  misc_feature: MA Experiment 20000234 PARAMETER Experiment Name: At_Siliques_P Parameter: Tissue Value: Less Than 5mm Siliques vs. Whole Plant
  misc_feature: MA Experiment ID: 20000264 Result: Down-regulated in Transcription
  misc_feature: MA Experiment 20000264 PARAMETER Experiment Name: At_Open_Flower_P Parameter: Age (day) Value: 21
  misc_feature: MA Experiment 20000264 PARAMETER Experiment Name: At_Open_Flower_P Parameter: Plant Line Value: WS
  misc_feature: MA Experiment 20000264 PARAMETER Experiment Name: At_Open_Flower_P Parameter: Tissue Value: Open Flower vs. Whole Plant
  misc_feature: MA Experiment ID: 20000265 Result: Down-regulated in Transcription
  misc_feature: MA Experiment 20000265 PARAMETER Experiment Name: At_Open_Flower_P Parameter: Age (day) Value: 21
  misc_feature: MA Experiment 20000265 PARAMETER Experiment Name: At_Open_Flower_P Parameter: Plant Line Value: WS
  misc_feature: MA Experiment 20000265 PARAMETER Experiment Name: At_Open_Flower_P Parameter: Tissue Value: Closed Flower vs. Whole Plant
  misc_feature: MA Experiment ID: 20000268 Result: Down-regulated in Transcription
  misc_feature: MA Experiment 20000268 PARAMETER Experiment Name: At_100mM_NaCl__P Parameter: Age (day) Value: 14
  misc_feature: MA Experiment 20000268 PARAMETER Experiment Name: At_100mM_NaCl__P Parameter: Organism Value: A. thaliana
  misc_feature: MA Experiment 20000268 PARAMETER Experiment Name: At_100mM_NaCl__P Parameter: Plant Line Value: WS
  misc_feature: MA Experiment 20000268 PARAMETER Experiment Name: At_100mM_NaCl__P Parameter: Timepoint (hr) Value: 6
  misc_feature: MA Experiment 20000268 PARAMETER Experiment Name: At_100mM_NaCl__P Parameter: Tissue Value: Whole Plant
  misc_feature: MA Experiment 20000268 PARAMETER Experiment Name: At_100mM_NaCl__P Parameter: Treatment Value: 100mM NaCl vs. No Treatment
  misc_feature: MA Experiment ID: 20000286 Result: Down-regulated in Transcription
  misc_feature: MA Experiment 20000286 PARAMETER Experiment Name: At_Open_Flower_P Parameter: Age (day) Value: 21
  misc_feature: MA Experiment 20000286 PARAMETER Experiment Name: At_Open_Flower_P Parameter: Plant Line Value: WS
  misc_feature: MA Experiment 20000286 PARAMETER Experiment Name: At_Open_Flower_P Parameter: Tissue Value: Half Open vs. Whole Plant
  misc_feature: MA Experiment ID: 20000437 Result: Down-regulated in Transcription
  misc_feature: MA Experiment 20000437 PARAMETER Experiment Name: At_Drought_P Parameter: Age (day) Value: 8
  misc_feature: MA Experiment 20000437 PARAMETER Experiment Name: At_Drought_P Parameter: Organism Value: A. thaliana
  misc_feature: MA Experiment 20000437 PARAMETER Experiment Name: At_Drought_P Parameter: Plant Line Value: WS
  misc_feature: MA Experiment 20000437 PARAMETER Experiment Name: At_Drought_P Parameter: Timepoint (hr) Value: 24
  misc_feature: MA Experiment 20000437 PARAMETER Experiment Name: At_Drought_P Parameter: Tissue Value: Whole Plant
  misc_feature: MA Experiment 20000437 PARAMETER Experiment Name: At_Drought_P Parameter: Treatment Value: Drought vs. No Drought
  misc_feature: MA Experiment ID: 20000439 Result: Down-regulated in Transcription
  misc_feature: MA Experiment 20000439 PARAMETER Experiment Name: At_Roots__P Parameter: Age (day) Value: 14 vs. 21
  misc_feature: MA Experiment 20000439 PARAMETER Experiment Name: At_Roots__P Parameter: Organism Value: A. thaliana
  misc_feature: MA Experiment 20000439 PARAMETER Experiment Name: At_Roots__P Parameter: Tissue Value: Roots vs. Whole Plant
  misc_feature: MA Experiment ID: 20000441 Result: Up-regulated in Transcription
  misc_feature: MA Experiment 20000441 PARAMETER Experiment Name: At_1uM_BR-BRZ__P Parameter: Tissue Value: Shoot Apices
  misc_feature: MA Experiment 20000441 PARAMETER Experiment Name: At_1uM_BR-BRZ__P Parameter: Treatment Value: 1uM BR vs. No Treatment
  misc_feature: MA Experiment ID: 20000443 Result: Up-regulated in Transcription
  misc_feature: MA Experiment 20000443 PARAMETER Experiment Name: At_1uM_BR-BRZ__P Parameter: Tissue Value: Shoot Apices
  misc_feature: MA Experiment 20000443 PARAMETER Experiment Name: At_1uM_BR-BRZ__P Parameter: Treatment Value: 1uM BRZ vs. No Treatment
  misc_feature: MA Experiment ID: 20000573 Result: Down-regulated in Transcription
  misc_feature: MA Experiment 20000573 PARAMETER Experiment Name: At_100uM_ABA_Mutants__P Parameter: Organism Value: A. thaliana
  misc_feature: MA Experiment 20000573 PARAMETER Experiment Name: At_100uM_ABA_Mutants__P Parameter: Plant Line Value: CS22 vs. Ler wt
  misc_feature: MA Experiment 20000573 PARAMETER Experiment Name: At_100uM_ABA_Mutants__P Parameter: Timepoint (hr) Value: N/A
  misc_feature: MA Experiment 20000573 PARAMETER Experiment Name: At_100uM_ABA_Mutants__P Parameter: Tissue Value: Whole Plant
  misc_feature: MA Experiment 20000573 PARAMETER Experiment Name: At_100uM_ABA_Mutants__P Parameter: Treatment Value: None
  misc_feature: MA Experiment ID: 20000794 Result: Down-regulated in Transcription
  misc_feature: MA Experiment 20000794 PARAMETER Experiment Name: At_Petals_P Parameter: Age (day) Value: 23-25 days
  misc_feature: MA Experiment 20000794 PARAMETER Experiment Name: At_Petals_P Parameter: Plant Line Value: WS
  misc_feature: MA Experiment 20000794 PARAMETER Experiment Name: At_Petals_P Parameter: Tissue Value: Petals vs. Whole plant
  misc_feature: MA Experiment ID: 20001248 Result: Down-regulated in Transcription
  misc_feature: MA Experiment 20001248 PARAMETER Experiment Name: At_Far-red-induction_P Parameter: Age (day) Value: 7
  misc_feature: MA Experiment 20001248 PARAMETER Experiment Name: At_Far-red-induction_P Parameter: Light Value: Far-red vs. White
  misc_feature: MA Experiment 20001248 PARAMETER Experiment Name: At_Far-red-induction_P Parameter: Organism Value: A. thaliana
  misc_feature: MA Experiment 20001248 PARAMETER Experiment Name: At_Far-red-induction_P Parameter: Plant Line Value: Columbia
  misc_feature: MA Experiment 20001248 PARAMETER Experiment Name: At_Far-red-induction_P Parameter: Timepoint (hr) Value: 4
  misc_feature: MA Experiment 20001248 PARAMETER Experiment Name: At_Far-red-induction_P Parameter: Tissue Value: Whole Plant
  misc_feature: MA Experiment ID: 20001450 Result: Down-regulated in Transcription
  misc_feature: MA Experiment 20001450 PARAMETER Experiment Name: At_Far-red-induction_P Parameter: Age (day) Value: 7
  misc_feature: MA Experiment 20001450 PARAMETER Experiment Name: At_Far-red-induction_P Parameter: Light Value: Far-red vs. White
  misc_feature: MA Experiment 20001450 PARAMETER Experiment Name: At_Far-red-induction_P Parameter: Organism Value: A. thaliana
  misc_feature: MA Experiment 20001450 PARAMETER Experiment Name: At_Far-red-induction_P Parameter: Plant Line Value: Columbia
  misc_feature: MA Experiment 20001450 PARAMETER Experiment Name: At_Far-red-induction_P Parameter: Timepoint (hr) Value: 8
  misc_feature: MA Experiment 20001450 PARAMETER Experiment Name: At_Far-red-induction_P Parameter: Tissue Value: Whole Plant
  misc_feature: MA Experiment ID: 20001451 Result: Down-regulated in Transcription
  misc_feature: MA Experiment 20001451 PARAMETER Experiment Name: At_Far-red-induction_P Parameter: Age (day) Value: 7
  misc_feature: MA Experiment 20001451 PARAMETER Experiment Name: At_Far-red-induction_P Parameter: Light Value: Far-red vs. White
  misc_feature: MA Experiment 20001451 PARAMETER Experiment Name: At_Far-red-induction_P Parameter: Organism Value: A. thaliana
  misc_feature: MA Experiment 20001451 PARAMETER Experiment Name: At_Far-red-induction_P Parameter: Plant Line Value: Columbia
  misc_feature: MA Experiment 20001451 PARAMETER Experiment Name: At_Far-red-induction_P Parameter: Timepoint (hr) Value: 24
  misc_feature: MA Experiment 20001451 PARAMETER Experiment Name: At_Far-red-induction_P Parameter: Tissue Value: Whole Plant
  misc_feature: MA Experiment ID: 20001560 Result: Down-regulated in Transcription
  misc_feature: MA Experiment 20001560 PARAMETER Experiment Name: At_Drought_Soil_Dry_P Parameter: Age (day) Value: 28
  misc_feature: MA Experiment 20001560 PARAMETER Experiment Name: At_Drought_Soil_Dry_P Parameter: Organism Value: A. thaliana
  misc_feature: MA Experiment 20001560 PARAMETER Experiment Name: At_Drought_Soil_Dry_P Parameter: Plant Line Value: WS
  misc_feature: MA Experiment 20001560 PARAMETER Experiment Name: At_Drought_Soil_Dry_P Parameter: Post Timepoint (hr) Value: None
  misc_feature: MA Experiment 20001560 PARAMETER Experiment Name: At_Drought_Soil_Dry_P Parameter: Post-Treatment Value: None
  misc_feature: MA Experiment 20001560 PARAMETER Experiment Name: At_Drought_Soil_Dry_P Parameter: Timepoint (day) Value: 14
  misc_feature: MA Experiment 20001560 PARAMETER Experiment Name: At_Drought_Soil_Dry_P Parameter: Treatment Value: Drought vs. No Drought
agacgagagaacgagcttaggaaacgagctcaaaaccctaatatctgatatctccgacatagaagggattcaaaactactcagatttctttccgttgttctcaagattcgatttccaaggattggttaagcagatgaaaggccatgtgaagaagcttgatctcttgttcgatagagttatggagagtcacgtcaaaatggtgggaaagaagagcgaagaagaagaagatttcttgcaatacttacttagagttaaagatgatgatgagaaagctcctctgtccatgactcatgtcaagtctctcctcatggatatggttcttggtggtgtcgacacatcggttaacgcatccgaattcgccatggcagagattgtgagcagaccggaagtgttaaacaagatccgactagaacttgaccaagttgttggcaaagacaacatcgttgaggaatcacatttacctaagcttccttacctacaagcggttatgaaagagactcttaggcttcaccctacgcttcctcttcttgttcctcacagaaacagcgaaacctcggtggttgcgggatacactgtgcctaaagactccaagattttcatcaacgtttgggcgattcatagagatcctaagaattgggatgaaccaaacgagttcaaacctgagaggtttttggagaattcgcttgatttcaatggaggtgattttaagtacttgccttttgggtcaggaaggaggatttgtgcggcgattaacatggctgagagacttgttctgttcaacattgcttcacttcttcactcttttgattggaaagcacctcaaggacagaagtttgaggttgaagagaagtttggtcttgttcttaagttgaagtctccacttgtggctattcctgttccaaggttgtccgatccaaaactctatacagcttaagtaagtaagaaggaaatttggtttgagcttatgagaggaagttgaattgagttttcttgtttaaagtttatttttctttattcgtgtttggagtttgatgctttgtaaaaaaagatgtgtcaagttaaatttaattttcttatatataataaaataaagttttagtc

SEQ ID NO: 102148 - protein, 310 aa, Arabidopsis thaliana
  peptide (1)..(310): Ceres Seq. ID no. 13609529
  misc_feature (1)..(310): Homolog of NCBI NO: 7430667 NR Description: cytochrome P450 homolog T12H17.80 - Arabidopsis >gi|2827546|emb|CAA16554.1| cytochrome P450 like protein thaliana] >gi|7269115|emb|CAB79224.1| cytochrome P450 like
  misc_feature (1)..(310): Homolog of NCBI NO: 15235775 NR Description: cytochrome P450 family [Arabidopsis thaliana]
  misc_feature (1)..(310): Homolog of NCBI NO: 30685891 NR Description: cytochrome P450 family [Arabidopsis thaliana]
  misc_feature (1)..(310): Homolog of NCBI NO: 15810341 NR Description: putative cytochrome P450 protein [Arabidopsis
  misc_feature (45)..(203): Homolog of NCBI NO: 14030621 NR Description: AT4g22710/T12H17_100 [Arabidopsis thaliana]
  misc_feature (1)..(308): Homolog of NCBI NO: 11345411 NR Description: putative cytochrome P450 [Matthiola incana]
  misc_feature (1)..(308): Homolog of NCBI NO: 15234514 NR Description: cytochrome p450 family [Arabidopsis thaliana]
  misc_feature (1)..(308): Homolog of NCBI NO: 15234519 NR Description: cytochrome P450, putative [Arabidopsis thaliana]
  misc_feature (1)..(308): Homolog of NCBI NO: 15234517 NR Description: cytochrome P450, putative [Arabidopsis thaliana]
  misc_feature (1)..(308): Homolog of NCBI NO: 15234521 NR Description: cytochrome P450 family [Arabidopsis thaliana]
DERTSLGNELKTLISDISDIEGIQNYSDFFPLFSRFDFQGLVKQMKGHVKKLDLLFDRVMESHVKMVGKKSEEEEDFLQYLLRVKDDDEKAPLSMTHVKSLLMDMVLGGVDTSVNASEFAMAEIVSRPEVLNKIRLELDQVVGKDNIVEESHLPKLPYLQAVMKETLRLHPTLPLLVPHRNSETSVVAGYTVPKDSKIFINVWAIHRDPKNWDEPNEFKPERFLENSLDFNGGDFKYLPFGSGRRICAAINMAERLVLFNIASLLHSFDWKAPQGQKFEVEEKFGLVLKLKSPLVAIPVPRLSDPKLYTA

SEQ ID NO: 102149 - protein, 266 aa, Arabidopsis thaliana
  peptide (1)..(266): Ceres Seq. ID no. 13609530
  misc_feature (1)..(266): Homolog of NCBI NO: 7430667 NR Description: cytochrome P450 homolog T12H17.80 - Arabidopsis >gi|2827546|emb|CAA16554.1| cytochrome P450 like protein thaliana] >gi|7269115|emb|CAB79224.1| cytochrome P450 like
  misc_feature (1)..(266): Homolog of NCBI NO: 15235775 NR Description: cytochrome P450 family [Arabidopsis thaliana]
  misc_feature (1)..(266): Homolog of NCBI NO: 30685891 NR Description: cytochrome P450 family [Arabidopsis thaliana]
  misc_feature (1)..(266): Homolog of NCBI NO: 15810341 NR Description: putative cytochrome P450 protein [Arabidopsis
  misc_feature (1)..(159): Homolog of NCBI NO: 14030621 NR Description: AT4g22710/T12H17_100 [Arabidopsis thaliana]
  misc_feature (1)..(264): Homolog of NCBI NO: 11345411 NR Description: putative cytochrome P450 [Matthiola incana]
  misc_feature (1)..(264): Homolog of NCBI NO: 15234514 NR Description: cytochrome p450 family [Arabidopsis thaliana]
  misc_feature (1)..(264): Homolog of NCBI NO: 15234519 NR Description: cytochrome P450, putative [Arabidopsis thaliana]
  misc_feature (1)..(264): Homolog of NCBI NO: 15234517 NR Description: cytochrome P450, putative [Arabidopsis thaliana]
  misc_feature (1)..(264): Homolog of NCBI NO: 15234521 NR Description: cytochrome P450 family [Arabidopsis thaliana]
MKGHVKKLDLLFDRVMESHVKMVGKKSEEEEDFLQYLLRVKDDDEKAPLSMTHVKSLLMDMVLGGVDTSVNASEFAMAEIVSRPEVLNKIRLELDQVVGKDNIVEESHLPKLPYLQAVMKETLRLHPTLPLLVPHRNSETSVVAGYTVPKDSKIFINVWAIHRDPKNWDEPNEFKPERFLENSLDFNGGDFKYLPFGSGRRICAAINMAERLVLFNIASLLHSFDWKAPQGQKFEVEEKFGLVLKLKSPLVAIPVPRLSDPKLYTA

SEQ ID NO: 102150 - protein, 251 aa, Arabidopsis thaliana
  peptide (1)..(251): Ceres Seq. ID no. 13609531
  misc_feature (1)..(251): Homolog of NCBI NO: 7430667 NR Description: cytochrome P450 homolog T12H17.80 - Arabidopsis >gi|2827546|emb|CAA16554.1| cytochrome P450 like protein thaliana] >gi|7269115|emb|CAB79224.1| cytochrome P450 like
  misc_feature (1)..(251): Homolog of NCBI NO: 15235775 NR Description: cytochrome P450 family [Arabidopsis thaliana]
  misc_feature (1)..(251): Homolog of NCBI NO: 30685891 NR Description: cytochrome P450 family [Arabidopsis thaliana]
  misc_feature (1)..(251): Homolog of NCBI NO: 15810341 NR Description: putative cytochrome P450 protein [Arabidopsis
  misc_feature (1)..(144): Homolog of NCBI NO: 14030621 NR Description: AT4g22710/T12H17_100 [Arabidopsis thaliana]
  misc_feature (1)..(249): Homolog of NCBI NO: 11345411 NR Description: putative cytochrome P450 [Matthiola incana]
  misc_feature (1)..(249): Homolog of NCBI NO: 15234514 NR Description: cytochrome p450 family [Arabidopsis thaliana]
  misc_feature (1)..(249): Homolog of NCBI NO: 15234519 NR Description: cytochrome P450, putative [Arabidopsis thaliana]
  misc_feature (1)..(249): Homolog of NCBI NO: 15234517 NR Description: cytochrome P450, putative [Arabidopsis thaliana]
  misc_feature (1)..(249): Homolog of NCBI NO: 15234521 NR Description: cytochrome P450 family [Arabidopsis thaliana]
MESHVKMVGKKSEEEEDFLQYLLRVKDDDEKAPLSMTHVKSLLMDMVLGGVDTSVNASEFAMAEIVSRPEVLNKIRLELDQVVGKDNIVEESHLPKLPYLQAVMKETLRLHPTLPLLVPHRNSETSVVAGYTVPKDSKIFINVWAIHRDPKNWDEPNEFKPERFLENSLDFNGGDFKYLPFGSGRRICAAINMAERLVLFNIASLLHSFDWKAPQGQKFEVEEKFGLVLKLKSPLVAIPVPRLSDPKLYTA

SEQ ID NO: 102151 - DNA, 1402 bp, Arabidopsis thaliana
  misc_feature (1)..(1402): Ceres Seq. ID no. 13609546
  misc_feature: MA Experiment ID: 108461 Result: Up-regulated in Transcription
  misc_feature: MA Experiment 108461 PARAMETER Experiment Name: At_Germinating_Seeds_cDNA_P Parameter: Age (day) Value: 1 vs. 0
  misc_feature: MA Experiment 108461 PARAMETER Experiment Name: At_Germinating_Seeds_cDNA_P Parameter: Tissue Value: Germinating Seeds
  misc_feature: MA Experiment ID: 108462 Result: Up-regulated in Transcription
  misc_feature: MA Experiment 108462 PARAMETER Experiment Name: At_Germinating_Seeds_cDNA_P Parameter: Age (day) Value: 2 vs. 0
  misc_feature: MA Experiment 108462 PARAMETER Experiment Name: At_Germinating_Seeds_cDNA_P Parameter: Tissue Value: Germinating Seeds
  misc_feature: MA Experiment ID: 108463 Result: Up-regulated in Transcription
  misc_feature: MA Experiment 108463 PARAMETER Experiment Name: At_Germinating_Seeds_cDNA_P Parameter: Age (day) Value: 3 vs. 0
  misc_feature: MA Experiment 108463 PARAMETER Experiment Name: At_Germinating_Seeds_cDNA_P Parameter: Tissue Value: Germinating Seeds
  misc_feature: MA Experiment ID: 108464 Result: Up-regulated in Transcription
  misc_feature: MA Experiment 108464 PARAMETER Experiment Name: At_Germinating_Seeds_cDNA_P Parameter: Age (day) Value: 4 vs. 0
  misc_feature: MA Experiment 108464 PARAMETER Experiment Name: At_Germinating_Seeds_cDNA_P Parameter: Tissue Value: Germinating Seeds
  misc_feature: MA Experiment ID: 108473 Result: Up-regulated in Transcription
  misc_feature: MA Experiment 108473 PARAMETER Experiment Name: At_Drought_Flowers_cDNA_P Parameter: Timepoint (hr) Value: 7 d
  misc_feature: MA Experiment 108473 PARAMETER Experiment Name: At_Drought_Flowers_cDNA_P Parameter: Tissue Value: Flower
  misc_feature: MA Experiment 108473 PARAMETER Experiment Name: At_Drought_Flowers_cDNA_P Parameter: Treatment Value: Drought vs. No Drought
  misc_feature: MA Experiment ID: 108561 Result: Up-regulated in Transcription
  misc_feature: MA Experiment 108561 PARAMETER Experiment Name: At_100uM_ABA_cDNA_P Parameter: Timepoint (hr) Value: 6
  misc_feature: MA Experiment 108561 PARAMETER Experiment Name: At_100uM_ABA_cDNA_P Parameter: Tissue Value: Aerial
  misc_feature: MA Experiment 108561 PARAMETER Experiment Name: At_100uM_ABA_cDNA_P Parameter: Treatment Value: 100uM ABA vs. No Treatment
  misc_feature: MA Experiment ID: 108573 Result: Up-regulated in Transcription
  misc_feature: MA Experiment 108573 PARAMETER Experiment Name: At_Drought_cDNA_P Parameter: Timepoint (hr) Value: 6
  misc_feature: MA Experiment 108573 PARAMETER Experiment Name: At_Drought_cDNA_P Parameter: Tissue Value: Aerial
  misc_feature: MA Experiment 108573 PARAMETER Experiment Name: At_Drought_cDNA_P Parameter: Treatment Value: Drought vs. No Drought
  misc_feature: MA Experiment ID: 108594 Result: Down-regulated in Transcription
  misc_feature: MA Experiment 108594 PARAMETER Experiment Name: At_Ler-rhl_Root_cDNA_P Parameter: Plant Line Value: null
  misc_feature: MA Experiment ID: 108595 Result: Up-regulated in Transcription
  misc_feature: MA Experiment 108595 PARAMETER Experiment Name: At_Ler-pi_Ovule_cDNA_P Parameter: Plant Line Value: null
  misc_feature: MA Experiment ID: 108605 Result: Up-regulated in Transcription
  misc_feature: MA Experiment 108605 PARAMETER Experiment Name: At_100uM_ABA_cDNA_P Parameter: Timepoint (hr) Value: 6
  misc_feature: MA Experiment 108605 PARAMETER Experiment Name: At_100uM_ABA_cDNA_P Parameter: Tissue Value: Aerial
  misc_feature: MA Experiment 108605 PARAMETER Experiment Name: At_100uM_ABA_cDNA_P Parameter: Treatment Value: 100uM ABA vs. No Treatment
  misc_feature: MA Experiment ID: 108607 Result: Up-regulated in Transcription
  misc_feature: MA Experiment 108607 PARAMETER Experiment Name: At_100uM_ABA_cDNA_P Parameter: Timepoint (hr) Value: 4
  misc_feature: MA Experiment 108607 PARAMETER Experiment Name: At_100uM_ABA_cDNA_P Parameter: Tissue Value: Aerial
  misc_feature: MA Experiment 108607 PARAMETER Experiment Name: At_100uM_ABA_cDNA_P Parameter: Treatment Value: 100uM ABA vs. No Treatment
  misc_feature: MA Experiment ID: 20000069 Result: Up-regulated in Transcription
  misc_feature: MA Experiment 20000069 PARAMETER Experiment Name: At_100uM_ABA_Mutants_cDNA_P Parameter: Plant Line Value: CS23
  misc_feature: MA Experiment 20000069 PARAMETER Experiment Name: At_100uM_ABA_Mutants_cDNA_P Parameter: Timepoint (hr) Value: 6
  misc_feature: MA Experiment 20000069 PARAMETER Experiment Name: At_100uM_ABA_Mutants_cDNA_P Parameter: Tissue Value: Aerial
  misc_feature: MA Experiment 20000069 PARAMETER Experiment Name: At_100uM_ABA_Mutants_cDNA_P Parameter: Treatment Value: 100uM ABA vs. No Treatment
  misc_feature: MA Experiment ID: 20000070 Result: Up-regulated in Transcription
  misc_feature: MA Experiment 20000070 PARAMETER Experiment Name: At_100uM_ABA_Mutants_cDNA_P Parameter: Plant Line Value: CS24
  misc_feature: MA Experiment 20000070 PARAMETER Experiment Name: At_100uM_ABA_Mutants_cDNA_P Parameter: Timepoint (hr) Value: 6
  misc_feature: MA Experiment 20000070 PARAMETER Experiment Name: At_100uM_ABA_Mutants_cDNA_P Parameter: Tissue Value: Aerial
  misc_feature: MA Experiment 20000070 PARAMETER Experiment Name: At_100uM_ABA_Mutants_cDNA_P Parameter: Treatment Value: 100uM ABA vs. No Treatment
  misc_feature: MA Experiment ID: 20000071 Result: Up-regulated in Transcription
  misc_feature: MA Experiment 20000071 PARAMETER Experiment Name: At_100uM_ABA_Mutants_cDNA_P Parameter: Plant Line Value: CS8104
  misc_feature: MA Experiment 20000071 PARAMETER Experiment Name: At_100uM_ABA_Mutants_cDNA_P Parameter: Timepoint (hr) Value: 6
  misc_feature: MA Experiment 20000071 PARAMETER Experiment Name: At_100uM_ABA_Mutants_cDNA_P Parameter: Tissue Value: Aerial
  misc_feature: MA Experiment 20000071 PARAMETER Experiment Name: At_100uM_ABA_Mutants_cDNA_P Parameter: Treatment Value: 100uM ABA vs. No Treatment
  misc_feature: MA Experiment ID: 20000086 Result: Up-regulated in Transcription
  misc_feature: MA Experiment 20000086 PARAMETER Experiment Name: At_100uM_ABA_Mutants_cDNA_P Parameter: Plant Line Value: CS22
  misc_feature: MA Experiment 20000086 PARAMETER Experiment Name: At_100uM_ABA_Mutants_cDNA_P Parameter: Timepoint (hr) Value: 6
  misc_feature: MA Experiment 20000086 PARAMETER Experiment Name: At_100uM_ABA_Mutants_cDNA_P Parameter: Tissue Value: Aerial
  misc_feature: MA Experiment 20000086 PARAMETER Experiment Name: At_100uM_ABA_Mutants_cDNA_P Parameter: Treatment Value: 100uM ABA vs. No Treatment
  misc_feature: MA Experiment ID: 20000087 Result: Up-regulated in Transcription
  misc_feature: MA Experiment 20000087 PARAMETER Experiment Name: At_100uM_ABA_Mutants_cDNA_P Parameter: Plant Line Value: WS
  misc_feature: MA Experiment 20000087 PARAMETER Experiment Name: At_100uM_ABA_Mutants_cDNA_P Parameter: Timepoint (hr) Value: 6
  misc_feature: MA Experiment 20000087 PARAMETER Experiment Name: At_100uM_ABA_Mutants_cDNA_P Parameter: Tissue Value: Aerial
  misc_feature: MA Experiment 20000087 PARAMETER Experiment Name: At_100uM_ABA_Mutants_cDNA_P Parameter: Treatment Value: 100uM ABA vs. No Treatment
  misc_feature: MA Experiment ID: 20000169 Result: Up-regulated in Transcription
  misc_feature: MA Experiment 20000169 PARAMETER Experiment Name: At_100uM_ABA_P Parameter: Age (day) Value: 14
  misc_feature: MA Experiment 20000169 PARAMETER Experiment Name: At_100uM_ABA_P Parameter: Organism Value: A. thaliana
  misc_feature: MA Experiment 20000169 PARAMETER Experiment Name: At_100uM_ABA_P Parameter: Plant Line Value: WS
  misc_feature: MA Experiment 20000169 PARAMETER Experiment Name: At_100uM_ABA_P Parameter: Timepoint (hr) Value: 6
  misc_feature: MA Experiment 20000169 PARAMETER Experiment Name: At_100uM_ABA_P Parameter: Tissue Value: Aerial
  misc_feature: MA Experiment 20000169 PARAMETER Experiment Name: At_100uM_ABA_P Parameter: Treatment Value: 100uM ABA vs. No Treatment
  misc_feature: MA Experiment ID: 20000180 Result: Up-regulated in Transcription
  misc_feature: MA Experiment 20000180 PARAMETER Experiment Name: At_Germinating_Seeds_P Parameter: Age (hr) Value: 24 vs. 0
  misc_feature: MA Experiment 20000180 PARAMETER Experiment Name: At_Germinating_Seeds_P Parameter: Tissue Value: Germinating Seeds
  misc_feature: MA Experiment ID: 20000184 Result: Up-regulated in Transcription
  misc_feature: MA Experiment 20000184 PARAMETER Experiment Name: At_Shoots__P Parameter: Age (day) Value: 7
  misc_feature: MA Experiment 20000184 PARAMETER Experiment Name: At_Shoots__P Parameter: Tissue Value: Shoots vs. Whole Plant
  misc_feature: MA Experiment ID: 20000185 Result: Up-regulated in Transcription
  misc_feature: MA Experiment 20000185 PARAMETER Experiment Name: At_Roots__P Parameter: Age (day) Value: 7 vs. 21
  misc_feature: MA Experiment 20000185 PARAMETER Experiment Name: At_Roots__P Parameter: Organism Value: A. thaliana
  misc_feature: MA Experiment 20000185 PARAMETER Experiment Name: At_Roots__P Parameter: Tissue Value: Roots vs. Whole Plant
  misc_feature: MA Experiment ID: 20000234 Result: Up-regulated in Transcription
  misc_feature: MA Experiment 20000234 PARAMETER Experiment Name: At_Siliques_P Parameter: Age (day) Value: 21
  misc_feature: MA Experiment 20000234 PARAMETER Experiment Name: At_Siliques_P Parameter: Organism Value: A. thaliana
  misc_feature: MA Experiment 20000234 PARAMETER Experiment Name: At_Siliques_P Parameter: Plant Line Value: WS
  misc_feature: MA Experiment 20000234 PARAMETER Experiment Name: At_Siliques_P Parameter: Tissue Value: Less Than 5mm Siliques vs. Whole Plant
  misc_feature: MA Experiment ID: 20000267 Result: Up-regulated in Transcription
  misc_feature: MA Experiment 20000267 PARAMETER Experiment Name: At_Drought_P Parameter: Age (day) Value: 7
  misc_feature: MA Experiment 20000267 PARAMETER Experiment Name: At_Drought_P Parameter: Organism Value: A. thaliana
  misc_feature: MA Experiment 20000267 PARAMETER Experiment Name: At_Drought_P Parameter: Plant Line Value: WS
  misc_feature: MA Experiment 20000267 PARAMETER Experiment Name: At_Drought_P Parameter: Timepoint (hr) Value: 6
  misc_feature: MA Experiment 20000267 PARAMETER Experiment Name: At_Drought_P Parameter: Tissue Value: Whole Plant
  misc_feature: MA Experiment 20000267 PARAMETER Experiment Name: At_Drought_P Parameter: Treatment Value: Drought vs. No Drought
  misc_feature: MA Experiment ID: 20000436 Result: Up-regulated in Transcription
  misc_feature: MA Experiment 20000436 PARAMETER Experiment Name: At_Drought_P Parameter: Age (day) Value: 7
  misc_feature: MA Experiment 20000436 PARAMETER Experiment Name: At_Drought_P Parameter: Organism Value: A. thaliana
  misc_feature: MA Experiment 20000436 PARAMETER Experiment Name: At_Drought_P Parameter: Plant Line Value: WS
  misc_feature: MA Experiment 20000436 PARAMETER Experiment Name: At_Drought_P Parameter: Timepoint (hr) Value: 12
  misc_feature: MA Experiment 20000436 PARAMETER Experiment Name: At_Drought_P Parameter: Tissue Value: Whole Plant
  misc_feature: MA Experiment 20000436 PARAMETER Experiment Name: At_Drought_P Parameter: Treatment Value: Drought vs. No Drought
  misc_feature: MA Experiment ID: 20000437 Result: Up-regulated in Transcription
  misc_feature: MA Experiment 20000437 PARAMETER Experiment Name: At_Drought_P Parameter: Age (day) Value: 8
  misc_feature: MA Experiment 20000437 PARAMETER Experiment Name: At_Drought_P Parameter: Organism Value: A. thaliana
  misc_feature: MA Experiment 20000437 PARAMETER Experiment Name: At_Drought_P Parameter: Plant Line Value: WS
  misc_feature: MA Experiment 20000437 PARAMETER Experiment Name: At_Drought_P Parameter: Timepoint (hr) Value: 24
  misc_feature: MA Experiment 20000437 PARAMETER Experiment Name: At_Drought_P Parameter: Tissue Value: Whole Plant
  misc_feature: MA Experiment 20000437 PARAMETER Experiment Name: At_Drought_P Parameter: Treatment Value: Drought vs. No Drought
  misc_feature: MA Experiment ID: 20000439 Result: Up-regulated in Transcription
  misc_feature: MA Experiment 20000439 PARAMETER Experiment Name: At_Roots__P Parameter: Age (day) Value: 14 vs. 21
  misc_feature: MA Experiment 20000439 PARAMETER Experiment Name: At_Roots__P Parameter: Organism Value: A. thaliana
  misc_feature: MA Experiment 20000439 PARAMETER Experiment Name: At_Roots__P Parameter: Tissue Value: Roots vs. Whole Plant
  misc_feature: MA Experiment ID: 20000441 Result: Down-regulated in Transcription
  misc_feature: MA Experiment 20000441 PARAMETER Experiment Name: At_1uM_BR-BRZ__P Parameter: Tissue Value: Shoot Apices
  misc_feature: MA Experiment 20000441 PARAMETER Experiment Name: At_1uM_BR-BRZ__P Parameter: Treatment Value: 1uM BR vs. No Treatment
  misc_feature: MA Experiment ID: 20000443 Result: Down-regulated in Transcription
  misc_feature: MA Experiment 20000443 PARAMETER Experiment Name: At_1uM_BR-BRZ__P Parameter: Tissue Value: Shoot Apices
  misc_feature: MA Experiment 20000443 PARAMETER Experiment Name: At_1uM_BR-BRZ__P Parameter: Treatment Value: 1uM BRZ vs. No Treatment
  misc_feature: MA Experiment ID: 20000453 Result: Up-regulated in Transcription
  misc_feature: MA Experiment 20000453 PARAMETER Experiment Name: At_100uM_ABA_P Parameter: Age (day) Value: 15
  misc_feature: MA Experiment 20000453 PARAMETER Experiment Name: At_100uM_ABA_P Parameter: Organism Value: A. thaliana
  misc_feature: MA Experiment 20000453 PARAMETER Experiment Name: At_100uM_ABA_P Parameter: Plant Line Value: WS
  misc_feature: MA Experiment 20000453 PARAMETER Experiment Name: At_100uM_ABA_P Parameter: Timepoint (hr) Value: 24
  misc_feature: MA Experiment 20000453 PARAMETER Experiment Name: At_100uM_ABA_P Parameter: Tissue Value: Aerial
  misc_feature: MA Experiment 20000453 PARAMETER Experiment Name: At_100uM_ABA_P Parameter: Treatment Value: 100uM ABA vs. No Treatment
  misc_feature: MA Experiment ID: 20000527 Result: Down-regulated in Transcription
  misc_feature: MA Experiment 20000527 PARAMETER Experiment Name: At_10percent_PEG_P Parameter: Age (day) Value: 20
  misc_feature: MA Experiment 20000527 PARAMETER Experiment Name: At_10percent_PEG_P Parameter: Organism Value: A. thaliana
  misc_feature: MA Experiment 20000527 PARAMETER Experiment Name: At_10percent_PEG_P Parameter: Plant Line Value: WS
  misc_feature: MA Experiment 20000527 PARAMETER Experiment Name: At_10percent_PEG_P Parameter: Timepoint (day) Value: 20
  misc_feature: MA Experiment 20000527 PARAMETER Experiment Name: At_10percent_PEG_P Parameter: Tissue Value: Whole Plant
  misc_feature: MA Experiment 20000527 PARAMETER Experiment Name: At_10percent_PEG_P Parameter: Treatment Value: 10percent PEG vs. No Treatment
  misc_feature: MA Experiment ID: 20001554 Result: Up-regulated in Transcription
  misc_feature: MA Experiment 20001554 PARAMETER Experiment Name: At_Drought_Soil_Dry_P Parameter: Age (day) Value: 21
  misc_feature: MA Experiment 20001554 PARAMETER Experiment Name: At_Drought_Soil_Dry_P Parameter: Organism Value: A. thaliana
  misc_feature: MA Experiment 20001554 PARAMETER Experiment Name: At_Drought_Soil_Dry_P Parameter: Plant Line Value: WS
  misc_feature: MA Experiment 20001554 PARAMETER Experiment Name: At_Drought_Soil_Dry_P Parameter: Post Timepoint (hr) Value: None
  misc_feature: MA Experiment 20001554 PARAMETER Experiment Name: At_Drought_Soil_Dry_P Parameter: Post-Treatment Value: None
  misc_feature: MA Experiment 20001554 PARAMETER Experiment Name: At_Drought_Soil_Dry_P Parameter: Timepoint (day) Value: 7
  misc_feature: MA Experiment 20001554 PARAMETER Experiment Name: At_Drought_Soil_Dry_P Parameter: Treatment Value: Drought vs. No Drought
  misc_feature: MA Experiment ID: 20001904 Result: Up-regulated in Transcription
  misc_feature: MA Experiment 20001904 PARAMETER Experiment Name: At_Drought_Reproduction_P Parameter: Age (day) Value: 37
  misc_feature: MA Experiment 20001904 PARAMETER Experiment Name: At_Drought_Reproduction_P Parameter: Organism Value: A. thaliana
  misc_feature: MA Experiment 20001904 PARAMETER Experiment Name: At_Drought_Reproduction_P Parameter: Plant Line Value: WS
  misc_feature: MA Experiment 20001904 PARAMETER Experiment Name: At_Drought_Reproduction_P Parameter: Timepoint (day) Value: 7
  misc_feature: MA Experiment 20001904 PARAMETER Experiment Name: At_Drought_Reproduction_P Parameter: Tissue Value: Rosettes
  misc_feature: MA Experiment 20001904 PARAMETER Experiment Name: At_Drought_Reproduction_P Parameter: Treatment Value: Drought vs. No Drought
  misc_feature: MA Experiment ID: 20001906 Result: Up-regulated in Transcription
  misc_feature: MA Experiment 20001906 PARAMETER Experiment Name: At_Drought_Reproduction_P Parameter: Age (day) Value: 35
  misc_feature: MA Experiment 20001906 PARAMETER Experiment Name: At_Drought_Reproduction_P Parameter: Organism Value: A. thaliana
  misc_feature: MA Experiment 20001906 PARAMETER Experiment Name: At_Drought_Reproduction_P Parameter: Plant Line Value: WS
  misc_feature: MA Experiment 20001906 PARAMETER Experiment Name: At_Drought_Reproduction_P Parameter: Timepoint (day) Value: 5
  misc_feature: MA Experiment 20001906 PARAMETER Experiment Name: At_Drought_Reproduction_P Parameter: Tissue Value: Siliques
  misc_feature: MA Experiment 20001906 PARAMETER Experiment Name: At_Drought_Reproduction_P Parameter: Treatment Value: Drought vs. No Drought
aacaaatatctcctgctcttacatctgagtctttttctttctaaccttctgattcatgagtaatcatatgtccattatgaagttcttgaatcaaatcctctgtctctctcttatcctctccatatccatgactactctttcctttgctcagacatgttctaaatacaagttctccagcaacaatgtctttgactcttgcaacgatcttccttttcttgattccttcctccattacacttacgagtcttccaccgggagcctccacattgcttatcgccacactaagctcacctctggtaaatgggttgcttgggctgtgaacccaacgtctacgggaatggtgggagctcaagccatcgttgcttatccacaatcagatggtactgtcagggtttacacttctcccatcagaagctaccagacgagtctactagagggtgatctgagtttcaatgtctctggtttgtctgcaacttaccagaacaatgagatcgttgtgttggcaagtctgaagcttgcacaggatcttgggaatggtggaaccattaacacagtgtggcaagatgggtcaatgtctgggaacagtcttctgcctcatccaacttctggcaacaatgttcgatcagtgtcaactctcaatctggtatccggtgtttcagcagctgcaggaggagctggaggaagttccaagcttcgcaaacgcaatattcatggaatattgaatggagtgagctggggaatcatgatgccactaggggcaatcattgctcgatacttgagagtagccaaatcagcagaccctgcttggttctacattcacgtttctgccaggcttctgcttacatcatcggtgttgccggatgggccactggtctcaaactcggtggcgactcaccagggattcagtacagcacccaccgtgccatcgggatcgctctcttctctctagcgacagttcaggtgtttgcgatgtttctgaggccaaaaccagagcacaagcataggctctactggaacatttaccaccacacgatcggctacacgataatcatcctaggggtggtgaacgttttcaaagggctaggcatattgagtcccaagaagcagtggaaaaatgcctacatcggtatcattgttgttctcgccattgtggccaccctactcgaagccttcacctggtatgtagtcattaaaagaaggaaactggaggctaaaacggctcagcatggagcatctaacggcactcggtctcagtatgcttaagattagcaacagacttgcttccttttctctttgtgcatagagacacagttatttatctgcttatctatctgttcccatatgcaatgatgattttttacattcatgatttaggatttataatgccatttttatttgatca

SEQ ID NO: 102152 - protein, 297 aa, Arabidopsis thaliana
  peptide (1)..(297): Ceres Seq. ID no. 13609547
  misc_feature (95)..(226): Pfam Name: Protein of unknown function (DUF568) Pfam Description: Protein of unknown function (DUF568)
  misc_feature (1)..(256): Homolog of NCBI NO: 18086563 NR Description: AT4g17280/dl4675c [Arabidopsis thaliana]
  misc_feature (12)..(256): Homolog of NCBI NO: 15238124 NR Description: auxin-induced protein, putative [Arabidopsis >gi|9758781|dbj|BAB09079.1| gene_id:MNJ7.12~pir||H71441~similar
  misc_feature (1)..(297): Homolog of NCBI NO: 22328744 NR Description: auxin-induced protein family [Arabidopsis
  misc_feature (25)..(297): Homolog of NCBI NO: 7485214 NR Description: hypothetical protein - Arabidopsis thaliana hypothetical protein [Arabidopsis thaliana]
  misc_feature (9)..(259): Homolog of NCBI NO: 13785209 NR Description: putative membrane protein [Solanum tuberosum]
  misc_feature (9)..(259): Homolog of NCBI NO: 13785207 NR Description: putative membrane protein [Solanum tuberosum]
  misc_feature (8)..(259): Homolog of NCBI NO: 13785213 NR Description: putative membrane protein [Solanum tuberosum]
  misc_feature (9)..(259): Homolog of NCBI NO: 13785211 NR Description: putative membrane protein [Solanum tuberosum]
  misc_feature (18)..(257): Homolog of NCBI NO: 18421491 NR Description: auxin-induced protein family [Arabidopsis >gi|9758647|dbj|BAB09271.1| gene_id:MXH1.11~pir||T10200~similar unknown protein [Arabidopsis thaliana]
  misc_feature (18)..(257): Homolog of NCBI NO: 21592781 NR Description: putative membrane protein [Arabidopsis thaliana]
MSNHMSIMKFLNQILCLSLILSISMTTLSFAQTCSKYKFSSNNVFDSCNDLPFLDSFLHYTYESSTGSLHIAYRHTKLTSGKWVAWAVNPTSTGMVGAQAIVAYPQSDGTVRVYTSPIRSYQTSLLEGDLSFNVSGLSATYQNNEIVVLASLKLAQDLGNGGTINTVWQDGSMSGNSLLPHPTSGNNVRSVSTLNLVSGVSAAAGGAGGSSKLRKRNIHGILNGVSWGIMMPLGAIIARYLRVAKSADPAWFYIHVSARLLLTSSVLPDGPLVSNSVATHQGFSTAPTVPSGSLSSL

SEQ ID NO: 102153 - protein, 293 aa, Arabidopsis thaliana
  peptide (1)..(293): Ceres Seq. ID no. 13609548
  misc_feature (91)..(222): Pfam Name: Protein of unknown function (DUF568) Pfam Description: Protein of unknown function (DUF568)
  misc_feature (1)..(252): Homolog of NCBI NO: 18086563 NR Description: AT4g17280/dl4675c [Arabidopsis thaliana]
  misc_feature (8)..(252): Homolog of NCBI NO: 15238124 NR Description: auxin-induced protein, putative [Arabidopsis >gi|9758781|dbj|BAB09079.1| gene_id:MNJ7.12~pir||H71441~similar
  misc_feature (1)..(293): Homolog of NCBI NO: 22328744 NR Description: auxin-induced protein family [Arabidopsis
  misc_feature (21)..(293): Homolog of NCBI NO: 7485214 NR Description: hypothetical protein - Arabidopsis thaliana hypothetical protein [Arabidopsis thaliana]
  misc_feature (5)..(255): Homolog of NCBI NO: 13785209 NR Description: putative membrane protein [Solanum tuberosum]
  misc_feature (5)..(255): Homolog of NCBI NO: 13785207 NR Description: putative membrane protein [Solanum tuberosum]
  misc_feature (4)..(255): Homolog of NCBI NO: 13785213 NR Description: putative membrane protein [Solanum tuberosum]
  misc_feature (5)..(255): Homolog of NCBI NO: 13785211 NR Description: putative membrane protein [Solanum tuberosum]
  misc_feature (14)..(253): Homolog of NCBI NO: 18421491 NR Description: auxin-induced protein family [Arabidopsis >gi|9758647|dbj|BAB09271.1| gene_id:MXH1.11~pir||T10200~similar unknown protein [Arabidopsis thaliana]
  misc_feature (14)..(253): Homolog of NCBI NO: 21592781 NR Description: putative membrane protein [Arabidopsis thaliana]
MSIMKFLNQILCLSLILSISMTTLSFAQTCSKYKFSSNNVFDSCNDLPFLDSFLHYTYESSTGSLHIAYRHTKLTSGKWVAWAVNPTSTGMVGAQAIVAYPQSDGTVRVYTSPIRSYQTSLLEGDLSFNVSGLSATYQNNEIVVLASLKLAQDLGNGGTINTVWQDGSMSGNSLLPHPTSGNNVRSVSTLNLVSGVSAAAGGAGGSSKLRKRNIHGILNGVSWGIMMPLGAIIARYLRVAKSADPAWFYIHVSARLLLTSSVLPDGPLVSNSVATHQGFSTAPTVPSGSLSSL

SEQ ID NO: 102154 - protein, 290 aa, Arabidopsis thaliana
  peptide (1)..(290): Ceres Seq. ID no. 13609549
  misc_feature (88)..(219): Pfam Name: Protein of unknown function (DUF568) Pfam Description: Protein of unknown function (DUF568)
  misc_feature (1)..(249): Homolog of NCBI NO: 18086563 NR Description: AT4g17280/dl4675c [Arabidopsis thaliana]
  misc_feature (5)..(249): Homolog of NCBI NO: 15238124 NR Description: auxin-induced protein, putative [Arabidopsis >gi|9758781|dbj|BAB09079.1| gene_id:MNJ7.12~pir||H71441~similar
  misc_feature (1)..(290): Homolog of NCBI NO: 22328744 NR Description: auxin-induced protein family [Arabidopsis
  misc_feature (18)..(290): Homolog of NCBI NO: 7485214 NR Description: hypothetical protein - Arabidopsis thaliana hypothetical protein [Arabidopsis thaliana]
  misc_feature (2)..(252): Homolog of NCBI NO: 13785209 NR Description: putative membrane protein [Solanum tuberosum]
  misc_feature (2)..(252): Homolog of NCBI NO: 13785207 NR Description: putative membrane protein [Solanum tuberosum]
  misc_feature (1)..(252): Homolog of NCBI NO: 13785213 NR Description: putative membrane protein [Solanum tuberosum]
  misc_feature (2)..(252): Homolog of NCBI NO: 13785211 NR Description: putative membrane protein [Solanum tuberosum]
  misc_feature (11)..(250): Homolog of NCBI NO: 18421491 NR Description: auxin-induced protein family [Arabidopsis >gi|9758647|dbj|BAB09271.1| gene_id:MXH1.11~pir||T10200~similar unknown protein [Arabidopsis thaliana]
  misc_feature (11)..(250): Homolog of NCBI NO: 21592781 NR Description: putative membrane protein [Arabidopsis thaliana]
MKFLNQILCLSLILSISMTTLSFAQTCSKYKFSSNNVFDSCNDLPFLDSFLHYTYESSTGSLHIAYRHTKLTSGKWVAWAVNPTSTGMVGAQAIVAYPQSDGTVRVYTSPIRSYQTSLLEGDLSFNVSGLSATYQNNEIVVLASLKLAQDLGNGGTINTVWQDGSMSGNSLLPHPTSGNNVRSVSTLNLVSGVSAAAGGAGGSSKLRKRNIHGILNGVSWGIMMPLGAIIARYLRVAKSADPAWFYIHVSARLLLTSSVLPDGPLVSNSVATHQGFSTAPTVPSGSLSSL

SEQ ID NO: 102155 - DNA, 975 bp, Arabidopsis thaliana
  misc_feature (1)..(975): Ceres Seq. ID no. 13609550
  misc_feature: MA Experiment ID: 108434 Result: Down-regulated in Transcription
  misc_feature: MA Experiment 108434 PARAMETER Experiment Name: At_Root_Tips_cDNA_P Parameter: Tissue Value: Root Tips
  misc_feature: MA Experiment ID: 108462 Result: Up-regulated in Transcription
  misc_feature: MA Experiment 108462 PARAMETER Experiment Name: At_Germinating_Seeds_cDNA_P Parameter: Age (day) Value: 2 vs. 0
  misc_feature: MA Experiment 108462 PARAMETER Experiment Name: At_Germinating_Seeds_cDNA_P Parameter: Tissue Value: Germinating Seeds
  misc_feature: MA Experiment ID: 108463 Result: Up-regulated in Transcription
  misc_feature: MA Experiment 108463 PARAMETER Experiment Name: At_Germinating_Seeds_cDNA_P Parameter: Age (day) Value: 3 vs. 0
  misc_feature: MA Experiment 108463 PARAMETER Experiment Name: At_Germinating_Seeds_cDNA_P Parameter: Tissue Value: Germinating Seeds
  misc_feature: MA Experiment ID: 108464 Result: Up-regulated in Transcription
  misc_feature: MA Experiment 108464 PARAMETER Experiment Name: At_Germinating_Seeds_cDNA_P Parameter: Age (day) Value: 4 vs. 0
  misc_feature: MA Experiment 108464 PARAMETER Experiment Name: At_Germinating_Seeds_cDNA_P Parameter: Tissue Value: Germinating Seeds
  misc_feature: MA Experiment ID: 108572 Result: Up-regulated in Transcription
  misc_feature: MA Experiment 108572 PARAMETER Experiment Name: At_Drought_cDNA_P Parameter: Timepoint (hr) Value: 1
  misc_feature: MA Experiment 108572 PARAMETER Experiment Name: At_Drought_cDNA_P Parameter: Tissue Value: Aerial
  misc_feature: MA Experiment 108572 PARAMETER Experiment Name: At_Drought_cDNA_P Parameter: Treatment Value: Drought vs. No Drought
  misc_feature: MA Experiment ID: 108573 Result: Up-regulated in Transcription
  misc_feature: MA Experiment 108573 PARAMETER Experiment Name: At_Drought_cDNA_P Parameter: Timepoint (hr) Value: 6
  misc_feature: MA Experiment 108573 PARAMETER Experiment Name: At_Drought_cDNA_P Parameter: Tissue Value: Aerial
  misc_feature: MA Experiment 108573 PARAMETER Experiment Name: At_Drought_cDNA_P Parameter: Treatment Value: Drought vs. No Drought
  misc_feature: MA Experiment ID: 108585 Result: Up-regulated in Transcription
  misc_feature: MA Experiment 108585 PARAMETER Experiment Name: At_5mM_NaNP_cDNA_P Parameter: Timepoint (hr) Value: 6
  misc_feature: MA Experiment 108585 PARAMETER Experiment Name: At_5mM_NaNP_cDNA_P Parameter: Tissue Value: Aerial
  misc_feature: MA Experiment 108585 PARAMETER Experiment Name: At_5mM_NaNP_cDNA_P Parameter: Treatment Value: null
  misc_feature: MA Experiment ID: 108594 Result: Down-regulated in Transcription
  misc_feature: MA Experiment 108594 PARAMETER Experiment Name: At_Ler-rhl_Root_cDNA_P Parameter: Plant Line Value: null
  misc_feature: MA Experiment ID: 108595 Result: Down-regulated in Transcription
  misc_feature: MA Experiment 108595 PARAMETER Experiment Name: At_Ler-pi_Ovule_cDNA_P Parameter: Plant Line Value: null
  misc_feature: MA Experiment ID: 108668 Result: Up-regulated in Transcription
  misc_feature: MA Experiment 108668 PARAMETER Experiment Name: At_2mM_SA_cDNA_P Parameter: Plant Line Value: WS
  misc_feature: MA Experiment 108668 PARAMETER Experiment Name: At_2mM_SA_cDNA_P Parameter: Timepoint (hr) Value: 6
  misc_feature: MA Experiment 108668 PARAMETER Experiment Name: At_2mM_SA_cDNA_P Parameter: Treatment Value: 2mM SA vs. No Treatment
  misc_feature: MA Experiment ID: 20000089 Result: Down-regulated in Transcription
  misc_feature: MA Experiment ID: 20000182 Result: Up-regulated in Transcription
  misc_feature: MA Experiment 20000182 PARAMETER Experiment Name: At_2mM_SA_P Parameter: Age (day) Value: 14
  misc_feature: MA Experiment 20000182 PARAMETER Experiment Name: At_2mM_SA_P Parameter: Organism Value: A. thaliana
  misc_feature: MA Experiment 20000182 PARAMETER Experiment Name: At_2mM_SA_P Parameter: Plant Line Value: WS
  misc_feature: MA Experiment 20000182 PARAMETER Experiment Name: At_2mM_SA_P Parameter: Timepoint (hr) Value: 6
  misc_feature: MA Experiment 20000182 PARAMETER Experiment Name: At_2mM_SA_P Parameter: Tissue Value: Aerial
  misc_feature: MA Experiment 20000182 PARAMETER Experiment Name: At_2mM_SA_P Parameter: Treatment Value: 2mM SA vs. No Treatment
  misc_feature: MA Experiment ID: 20000185 Result: Up-regulated in Transcription
  misc_feature: MA Experiment 20000185 PARAMETER Experiment Name: At_Roots__P Parameter: Age (day) Value: 7 vs. 21
  misc_feature: MA Experiment 20000185 PARAMETER Experiment Name: At_Roots__P Parameter: Organism Value: A. thaliana
  misc_feature: MA Experiment 20000185 PARAMETER Experiment Name: At_Roots__P Parameter: Tissue Value: Roots vs. Whole Plant
  misc_feature: MA Experiment ID: 20000224 Result: Down-regulated in Transcription
  misc_feature: MA Experiment ID: 20000234 Result: Down-regulated in Transcription
  misc_feature: MA Experiment 20000234 PARAMETER Experiment Name: At_Siliques_P Parameter: Age (day) Value: 21
  misc_feature: MA Experiment 20000234 PARAMETER Experiment Name: At_Siliques_P Parameter: Organism Value: A. thaliana
  misc_feature: MA Experiment 20000234 PARAMETER Experiment Name: At_Siliques_P Parameter: Plant Line Value: WS
  misc_feature: MA Experiment 20000234 PARAMETER Experiment Name: At_Siliques_P Parameter: Tissue Value: Less Than 5mm Siliques vs. Whole Plant
  misc_feature: MA Experiment ID: 20000235 Result: Down-regulated in Transcription
  misc_feature: MA Experiment 20000235 PARAMETER Experiment Name: At_Siliques_P Parameter: Age (day) Value: 21
  misc_feature: MA Experiment 20000235 PARAMETER Experiment Name: At_Siliques_P Parameter: Organism Value: A. thaliana
  misc_feature: MA Experiment 20000235 PARAMETER Experiment Name: At_Siliques_P Parameter: Plant Line Value: WS
  misc_feature: MA Experiment 20000235 PARAMETER Experiment Name: At_Siliques_P Parameter: Tissue Value: 5-10mm Siliques vs. Whole Plant
  misc_feature: MA Experiment ID: 20000264 Result: Down-regulated in Transcription
  misc_feature: MA Experiment 20000264 PARAMETER Experiment Name: At_Open_Flower_P Parameter: Age (day) Value: 21
  misc_feature: MA Experiment 20000264 PARAMETER Experiment Name: At_Open_Flower_P Parameter: Plant Line Value: WS
  misc_feature: MA Experiment 20000264 PARAMETER Experiment Name: At_Open_Flower_P Parameter: Tissue Value: Open Flower vs. Whole Plant
  misc_feature: MA Experiment ID: 20000265 Result: Down-regulated in Transcription
  misc_feature: MA Experiment 20000265 PARAMETER Experiment Name: At_Open_Flower_P Parameter: Age (day) Value: 21
  misc_feature: MA Experiment 20000265 PARAMETER Experiment Name: At_Open_Flower_P Parameter: Plant Line Value: WS
  misc_feature: MA Experiment 20000265 PARAMETER Experiment Name: At_Open_Flower_P Parameter: Tissue Value: Closed Flower vs. Whole Plant
  misc_feature: MA Experiment ID: 20000269 Result: Down-regulated in Transcription
  misc_feature: MA Experiment 20000269 PARAMETER Experiment Name: At_1mM_KNO3_L-vs-H_Roots_P Parameter: Age (day) Value: 7,10,12
  misc_feature: MA Experiment 20000269 PARAMETER Experiment Name: At_1mM_KNO3_L-vs-H_Roots_P Parameter: Organism Value: A. thaliana
  misc_feature: MA Experiment 20000269 PARAMETER Experiment Name: At_1mM_KNO3_L-vs-H_Roots_P Parameter: Plant Line Value: WS
  misc_feature: MA Experiment 20000269 PARAMETER Experiment Name: At_1mM_KNO3_L-vs-H_Roots_P Parameter: Timepoint (day) Value: 7,10,12
  misc_feature: MA Experiment 20000269 PARAMETER Experiment Name: At_1mM_KNO3_L-vs-H_Roots_P Parameter: Tissue Value: Roots
  misc_feature: MA Experiment 20000269 PARAMETER Experiment Name: At_1mM_KNO3_L-vs-H_Roots_P Parameter: Treatment Value: 1mM KNO3 vs. 50mM KNO3
  misc_feature: MA Experiment ID: 20000286 Result: Down-regulated in Transcription
  misc_feature: MA Experiment 20000286 PARAMETER Experiment Name: At_Open_Flower_P Parameter: Age (day) Value: 21
  misc_feature: MA Experiment 20000286 PARAMETER Experiment Name: At_Open_Flower_P Parameter: Plant Line Value: WS
  misc_feature: MA Experiment 20000286 PARAMETER Experiment Name: At_Open_Flower_P Parameter: Tissue Value: Half Open vs. Whole Plant
  misc_feature: MA Experiment ID: 20000308 Result: Down-regulated in Transcription
  misc_feature: MA Experiment 20000308 PARAMETER Experiment Name: At_100mM_NaCl__P Parameter: Age (day) Value: 17
  misc_feature: MA Experiment 20000308 PARAMETER Experiment Name: At_100mM_NaCl__P Parameter: Organism Value: A. thaliana
  misc_feature: MA Experiment 20000308 PARAMETER Experiment Name: At_100mM_NaCl__P Parameter: Plant Line Value: WS
  misc_feature: MA Experiment 20000308 PARAMETER Experiment Name: At_100mM_NaCl__P Parameter: Timepoint (hr) Value: 72
  misc_feature: MA Experiment 20000308 PARAMETER Experiment Name: At_100mM_NaCl__P Parameter: Tissue Value: Whole Plant
  misc_feature: MA Experiment 20000308 PARAMETER Experiment Name: At_100mM_NaCl__P Parameter: Treatment Value: 100mM NaCl vs. No Treatment
  misc_feature: MA Experiment ID: 20000438 Result: Up-regulated in Transcription
  misc_feature: MA Experiment 20000438 PARAMETER Experiment Name: At_Shoots__P Parameter: Age (day) Value: 14
  misc_feature: MA Experiment 20000438 PARAMETER Experiment Name: At_Shoots__P Parameter: Tissue Value: Shoots vs. Whole Plant
  misc_feature: MA Experiment ID: 20000439 Result: Up-regulated in Transcription
  misc_feature: MA Experiment 20000439 PARAMETER Experiment Name: At_Roots__P Parameter: Age (day) Value: 14 vs. 21
  misc_feature: MA Experiment 20000439 PARAMETER Experiment Name: At_Roots__P Parameter: Organism Value: A. thaliana
  misc_feature: MA Experiment 20000439 PARAMETER Experiment Name: At_Roots__P Parameter: Tissue Value: Roots vs. Whole Plant
  misc_feature: MA Experiment ID: 20000451 Result: Down-regulated in Transcription
  misc_feature: MA Experiment 20000451 PARAMETER Experiment Name: At_CS6879_Shoots-Roots_P Parameter: Age (day) Value: 14
  misc_feature: MA Experiment 20000451 PARAMETER Experiment Name: At_CS6879_Shoots-Roots_P Parameter: Organism Value: A. thaliana
  misc_feature: MA Experiment 20000451 PARAMETER Experiment Name: At_CS6879_Shoots-Roots_P Parameter: Plant Line Value: CS6879 vs. WS
  misc_feature: MA Experiment 20000451 PARAMETER Experiment Name: At_CS6879_Shoots-Roots_P Parameter: Tissue Value: Roots
  misc_feature: MA Experiment ID: 20000452 Result: Down-regulated in Transcription
  misc_feature: MA Experiment 20000452 PARAMETER Experiment Name: At_CS6879_Shoots-Roots_P Parameter: Age (day) Value: 14
  misc_feature: MA Experiment 20000452 PARAMETER Experiment Name: At_CS6879_Shoots-Roots_P Parameter: Organism Value: A. thaliana
  misc_feature: MA Experiment 20000452 PARAMETER Experiment Name: At_CS6879_Shoots-Roots_P Parameter: Plant Line Value: CS6879 vs. WS
  misc_feature: MA Experiment 20000452 PARAMETER Experiment Name: At_CS6879_Shoots-Roots_P Parameter: Tissue Value: Shoots
  misc_feature: MA Experiment ID: 20000576 Result: Up-regulated in Transcription
  misc_feature: MA Experiment 20000576 PARAMETER Experiment Name: At_100uM_ABA_Mutants__P Parameter: Organism Value: A. thaliana
  misc_feature: MA Experiment 20000576 PARAMETER Experiment Name: At_100uM_ABA_Mutants__P Parameter: Plant Line Value: CS23
  misc_feature: MA Experiment 20000576 PARAMETER Experiment Name: At_100uM_ABA_Mutants__P Parameter: Timepoint (hr) Value: 6
  misc_feature: MA Experiment 20000576 PARAMETER Experiment Name: At_100uM_ABA_Mutants__P Parameter: Tissue Value: Whole Plant
  misc_feature: MA Experiment 20000576 PARAMETER Experiment Name: At_100uM_ABA_Mutants__P Parameter: Treatment Value: 1uM ABA vs. No Treatment
  misc_feature: MA Experiment ID: 20000794 Result: Down-regulated in Transcription
  misc_feature: MA Experiment 20000794 PARAMETER Experiment Name: At_Petals_P Parameter: Age (day) Value: 23-25 days
  misc_feature: MA Experiment 20000794 PARAMETER Experiment Name: At_Petals_P Parameter: Plant Line Value: WS
  misc_feature: MA Experiment 20000794 PARAMETER Experiment Name: At_Petals_P Parameter: Tissue Value: Petals vs. Whole plant
  misc_feature: MA Experiment ID: 20001555 Result: Down-regulated in Transcription
  misc_feature: MA Experiment 20001555 PARAMETER Experiment Name: At_Drought_Soil_Dry_P Parameter: Age (day) Value: 24
  misc_feature: MA Experiment 20001555 PARAMETER Experiment Name: At_Drought_Soil_Dry_P Parameter: Organism Value: A. thaliana
  misc_feature: MA Experiment 20001555 PARAMETER Experiment Name: At_Drought_Soil_Dry_P Parameter: Plant Line Value: WS
  misc_feature: MA Experiment 20001555 PARAMETER Experiment Name: At_Drought_Soil_Dry_P Parameter: Post Timepoint (hr) Value: None
  misc_feature: MA Experiment 20001555 PARAMETER Experiment Name: At_Drought_Soil_Dry_P Parameter: Post-Treatment Value: None
  misc_feature: MA Experiment 20001555 PARAMETER Experiment Name: At_Drought_Soil_Dry_P Parameter: Timepoint (day) Value: 10
  misc_feature: MA Experiment 20001555 PARAMETER Experiment Name: At_Drought_Soil_Dry_P Parameter: Treatment Value: Drought vs. No Drought
  misc_feature: MA Experiment ID: 20001556 Result: Down-regulated in Transcription
  misc_feature: MA Experiment 20001556 PARAMETER Experiment Name: At_Drought_Soil_Dry_P Parameter: Age (day) Value: 26
  misc_feature: MA Experiment 20001556 PARAMETER Experiment Name: At_Drought_Soil_Dry_P Parameter: Organism Value: A. thaliana
  misc_feature: MA Experiment 20001556 PARAMETER Experiment Name: At_Drought_Soil_Dry_P Parameter: Plant Line Value: WS
  misc_feature: MA Experiment 20001556 PARAMETER Experiment Name: At_Drought_Soil_Dry_P Parameter: Post Timepoint (hr) Value: None
  misc_feature: MA Experiment 20001556 PARAMETER Experiment Name: At_Drought_Soil_Dry_P Parameter: Post-Treatment Value: None
  misc_feature: MA Experiment 20001556 PARAMETER Experiment Name: At_Drought_Soil_Dry_P Parameter: Timepoint (day) Value: 12
  misc_feature: MA Experiment 20001556 PARAMETER Experiment Name: At_Drought_Soil_Dry_P Parameter: Treatment Value: Drought vs. No Drought
  misc_feature: MA Experiment ID: 20001558 Result: Down-regulated in Transcription
  misc_feature: MA Experiment 20001558 PARAMETER Experiment Name: At_Drought_Soil_Dry_P Parameter: Age (day) Value: 27
  misc_feature: MA Experiment 20001558 PARAMETER Experiment Name: At_Drought_Soil_Dry_P Parameter: Organism Value: A. thaliana
  misc_feature: MA Experiment 20001558 PARAMETER Experiment Name: At_Drought_Soil_Dry_P Parameter: Plant Line Value: WS
  misc_feature: MA Experiment 20001558 PARAMETER Experiment Name: At_Drought_Soil_Dry_P Parameter: Post Timepoint (hr) Value: 6
  misc_feature: MA Experiment 20001558 PARAMETER Experiment Name: At_Drought_Soil_Dry_P Parameter: Post-Treatment Value: Re-Water vs. No Drought
  misc_feature: MA Experiment 20001558 PARAMETER Experiment Name: At_Drought_Soil_Dry_P Parameter: Timepoint (day) Value: 13
  misc_feature: MA Experiment 20001558 PARAMETER Experiment Name: At_Drought_Soil_Dry_P Parameter: Treatment Value: Drought vs. No Drought
  misc_feature: MA Experiment ID: 20001559 Result: Down-regulated in Transcription
  misc_feature: MA Experiment 20001559 PARAMETER Experiment Name: At_Drought_Soil_Dry_P Parameter: Age (day) Value: 28
  misc_feature: MA Experiment 20001559 PARAMETER Experiment Name: At_Drought_Soil_Dry_P Parameter: Organism Value: A. thaliana
  misc_feature: MA Experiment 20001559 PARAMETER Experiment Name: At_Drought_Soil_Dry_P Parameter: Plant Line Value: WS
  misc_feature: MA Experiment 20001559 PARAMETER Experiment Name: At_Drought_Soil_Dry_P Parameter: Post Timepoint (hr) Value: 29
  misc_feature: MA Experiment 20001559 PARAMETER Experiment Name: At_Drought_Soil_Dry_P Parameter: Post-Treatment Value: Re-Water vs. No Drought
  misc_feature: MA Experiment 20001559 PARAMETER Experiment Name: At_Drought_Soil_Dry_P Parameter: Timepoint (day) Value: 14
  misc_feature: MA Experiment 20001559 PARAMETER Experiment Name: At_Drought_Soil_Dry_P Parameter: Treatment Value: Drought vs. No Drought
  misc_feature: MA Experiment ID: 20001560 Result: Down-regulated in Transcription
  misc_feature: MA Experiment 20001560 PARAMETER Experiment Name: At_Drought_Soil_Dry_P Parameter: Age (day) Value: 28
  misc_feature: MA Experiment 20001560 PARAMETER Experiment Name: At_Drought_Soil_Dry_P Parameter: Organism Value: A. thaliana
  misc_feature: MA Experiment 20001560 PARAMETER Experiment Name: At_Drought_Soil_Dry_P Parameter: Plant Line Value: WS
  misc_feature: MA Experiment 20001560 PARAMETER Experiment Name: At_Drought_Soil_Dry_P Parameter: Post Timepoint (hr) Value: None
  misc_feature: MA Experiment 20001560 PARAMETER Experiment Name: At_Drought_Soil_Dry_P Parameter: Post-Treatment Value: None
  misc_feature: MA Experiment 20001560 PARAMETER Experiment Name: At_Drought_Soil_Dry_P Parameter: Timepoint (day) Value: 14
  misc_feature: MA Experiment 20001560 PARAMETER Experiment Name: At_Drought_Soil_Dry_P Parameter: Treatment Value: Drought vs. No Drought
cacacaaatagaaataacttgtaatcaaccaaagtcgaaaaacagagttattttgtcggatcaaaatggtgaagattgagataggaagtgtgggtgactcctttagtgtagcatctcttaaggcttacttgtctgaatttatcgcaactcttctctttgtgtttgctggcgttggctctgctcttgcttttgccaagctcacatccgatgcagccttggaccccgctggtcttgtcgctgtcgctgtggctcacgcctttgcccttttcgttggtgtttccatagccgccaacatctccggcggacaccttaaccccgccgtgacactcggtctcgccgtcggtggcaacatcacagtaataaccggtttcttttactggattgctcaatgccttggctccatcgtcgcgtgtctcctcctcgtcttcgttaccaatggcgagagcgtaccgactcatggagtagcggccggtttaggagctattgaaggagtagtgatggagattgtggtgacctttgctctggtctacacagtctacgccacagcggctgatccaaagaaaggttcactcgggaccattgctccaattgctatcggtttcatcgttggtgccaacatcctcgcagcgggtccctttagcggtggttccatgaacccggccaggtcatttggaccagctgttgtcagtggtgacttctctcagatatggatctactgggtgggtccactagtcggtggtgcacttgctggactcatctacggagacgtcttcatcggatcctacgctccagctcccaccacagaaagctacccttgatcaatcctatagcgttttaatttgcttggcttgctttttgttgtatgaaaatgtttggtcctcgtttcttccaaaaatgaatgattgaatgtggagaaaaagatcaaagttgtactttgtgttggttataaataagaattgtatattttcaaatttt

SEQ ID NO: 102156 - protein, 250 aa, Arabidopsis thaliana; identical to SEQ ID NO: 38676
  peptide (1)..(250): Ceres Seq. ID no. 13609551
  misc_feature (1)..(250): Homolog of NCBI NO: 15236043 NR Description: major intrinsic protein (MIP) family [Arabidopsis
  misc_feature (1)..(247): Homolog of NCBI NO: 15238100 NR Description: major intrinsic protein (MIP) family [Arabidopsis
  misc_feature (1)..(249): Homolog of NCBI NO: 461929 NR Description: PROBABLE TONOPLAST INTRINSIC PROTEIN DIP
  misc_feature (1)..(249): Homolog of NCBI NO: 126959 NR Description: Tonoplast intrinsic protein, root-specific RB7-5A
  misc_feature (1)..(249): Homolog of NCBI NO: 267135 NR Description: TONOPLAST INTRINSIC PROTEIN, ROOT-SPECIFIC
  misc_feature (1)..(249): Homolog of NCBI NO: 11276918 NR Description: membrane channel protein [imported] - potato >gi|1518057|gb|AAB67881.1| membrane channel protein [Solanum
  misc_feature (1)..(249): Homolog of NCBI NO: 2058706 NR Description: Rb7 [Lycopersicon esculentum]
  misc_feature (1)..(242): Homolog of NCBI NO: 7441268 NR Description: probable membrane protein - carrot
  misc_feature (1)..(249): Homolog of NCBI NO: 7441272 NR Description: aquaporin TIP7 - common sunflower
  misc_feature (7)..(233): Homolog of NCBI NO: 1076687 NR Description: integral membrane protein - garden snapdragon

SEQ ID NO: 102157 - DNA, 1183 bp, Arabidopsis thaliana
  misc_feature (1)..(1183): Ceres Seq. ID no. 13609552
  misc_feature: MA Experiment ID: 108488 Result: Down-regulated in Transcription
  misc_feature: MA Experiment ID: 20001906 Result: Down-regulated in Transcription
  misc_feature: MA Experiment 20001906 PARAMETER Experiment Name: At_Drought_Reproduction_P Parameter: Age (day) Value: 35
  misc_feature: MA Experiment 20001906 PARAMETER Experiment Name: At_Drought_Reproduction_P Parameter: Organism Value: A. thaliana
  misc_feature: MA Experiment 20001906 PARAMETER Experiment Name: At_Drought_Reproduction_P Parameter: Plant Line Value: WS
  misc_feature: MA Experiment 20001906 PARAMETER Experiment Name: At_Drought_Reproduction_P Parameter: Timepoint (day) Value: 5
  misc_feature: MA Experiment 20001906 PARAMETER Experiment Name: At_Drought_Reproduction_P Parameter: Tissue Value: Siliques
  misc_feature: MA Experiment 20001906 PARAMETER Experiment Name: At_Drought_Reproduction_P Parameter: Treatment Value: Drought vs. No Drought
  misc_feature: MA Experiment ID: 20001908 Result: Down-regulated in Transcription
  misc_feature: MA Experiment 20001908 PARAMETER Experiment Name: At_Drought_Reproduction_P Parameter: Age (day) Value: 40
  misc_feature: MA Experiment 20001908 PARAMETER Experiment Name: At_Drought_Reproduction_P Parameter: Organism Value: A. thaliana
  misc_feature: MA Experiment 20001908 PARAMETER Experiment Name: At_Drought_Reproduction_P Parameter: Plant Line Value: WS
  misc_feature: MA Experiment 20001908 PARAMETER Experiment Name: At_Drought_Reproduction_P Parameter: Timepoint (day) Value: 10
  misc_feature: MA Experiment 20001908 PARAMETER Experiment Name: At_Drought_Reproduction_P Parameter: Tissue Value: Siliques
  misc_feature: MA Experiment 20001908 PARAMETER Experiment Name: At_Drought_Reproduction_P Parameter: Treatment Value: Drought vs. No Drought
  misc_feature: MA Experiment ID: 20001911 Result: Down-regulated in Transcription
  misc_feature: MA Experiment 20001911 PARAMETER Experiment Name: At_Drought_Reproduction_P Parameter: Age (day) Value: 40
  misc_feature: MA Experiment 20001911 PARAMETER Experiment Name: At_Drought_Reproduction_P Parameter: Organism Value: A. thaliana
  misc_feature: MA Experiment 20001911 PARAMETER Experiment Name: At_Drought_Reproduction_P Parameter: Plant Line Value: WS
  misc_feature: MA Experiment 20001911 PARAMETER Experiment Name: At_Drought_Reproduction_P Parameter: Timepoint (day) Value: 10
  misc_feature: MA Experiment 20001911 PARAMETER Experiment Name: At_Drought_Reproduction_P Parameter: Tissue Value: Flowers
  misc_feature: MA Experiment 20001911 PARAMETER Experiment Name: At_Drought_Reproduction_P Parameter: Treatment Value: Drought vs. No Drought
tctctctctctctataagaaccctagaagaaggtttctcttgtcctccatacacttagcacaactgataaatcttttgaggtaaaatcagctttagatcaaggtttttctagtcatctctactcataaagatcaaagcttttgctattctcattttctaccaagagacaatatcatgatgatgggtaaagaggatttgggtttaagtcttagcttgggatttgcacaaaaccatcctctccagctaaatcttaaacccacttcttcaccaatgtccaatctccagatgtttccatggaaccaaacccttgtttcttcctcagatcaacaaaagcaacagtttcttaggaaaatcgacgtgaacagcttgccaacaacggtggatttggaagaggagacaggagtttcgtctccaaacagtacgatctcgagcacagtgagtggaaagaggaggagtactgaaagagaaggtacctccggtggtggttgcggagatgaccttgacatcactctagatagatcttcctcacgtggaacctccgatgaagaggaagattacggaggtgagacttgtaggaagaagcttagactatccaaagatcaatccgcagttctcgaagacactttcaaagagcacaatactctcaatcccaaacagaagctggctttggctaagaagctaggtttaacagcaagacaagtggaagtgtggttccaaaacagaagagcaaggacaaagttaaagcagaccgaagtggattgcgagtatttgaaaagatgtgttgagaaattaacggaagagaatcggcggctcgagaaagaggcagcggaactaagagcattaaagctttcaccgcggttgtatggtcagatgagtccaccgaccacacttttgatgtgtccatcgtgtgaacgtgtggccggaccatcctcatctaaccacaaccagcgatctgtctcattgagtccatggctccaaatggcccatgggtcaacctttgatgtgatgcgtcctaggtcttaactttaatgctgcttctatgggttgtgtgtgggtcattgtactttttagattattgactctcagctaatgtatccttaaaagcctttttctacttttaaatttactttaatctaattaaattagttattcttgtcttcttgataacaaacaaatttataat

SEQ ID NO: 102158 - protein, 282 aa, Arabidopsis thaliana; identical to SEQ ID NO: 22674
  peptide (1)..(282): Ceres Seq. ID no. 13609553
  misc_feature (1)..(98): Pfam Name: HD-ZIP protein N terminus Pfam Description: HD-ZIP protein N terminus
  misc_feature (1)..(282): Homolog of NCBI NO: 15236076 NR Description: homeobox-leucine zipper protein HAT1 (HD-Zip
  misc_feature (1)..(282): Homolog of NCBI NO: 21592922 NR Description: homeobox-leucine zipper protein HAT1 (hd-zip
  misc_feature (1)..(282): Homolog of NCBI NO: 15238078 NR Description: homeobox-leucine zipper protein HAT2 (HD-ZIP
  misc_feature (81)..(282): Homolog of NCBI NO: 25386204 NR Description: homeobox protein HAT2 [imported] - Arabidopsis
  misc_feature (1)..(255): Homolog of NCBI NO: 25487873 NR Description: homeobox-leucine zipper protein [imported] -

SEQ ID NO: 102159 - protein, 281 aa, Arabidopsis thaliana; identical to SEQ ID NO: 22675
  peptide (1)..(281): Ceres Seq. ID no. 13609554
  misc_feature (1)..(97): Pfam Name: HD-ZIP protein N terminus Pfam Description: HD-ZIP protein N terminus
  misc_feature (1)..(281): Homolog of NCBI NO: 15236076 NR Description: homeobox-leucine zipper protein HAT1 (HD-Zip
  misc_feature (1)..(281): Homolog of NCBI NO: 21592922 NR Description: homeobox-leucine zipper protein HAT1 (hd-zip
  misc_feature (1)..(281): Homolog of NCBI NO: 15238078 NR Description: homeobox-leucine zipper protein HAT2 (HD-ZIP
  misc_feature (80)..(281): Homolog of NCBI NO: 25386204 NR Description: homeobox protein HAT2 [imported] - Arabidopsis
  misc_feature (1)..(254): Homolog of NCBI NO: 25487873 NR Description: homeobox-leucine zipper protein [imported] -

SEQ ID NO: 102160 - protein, 280 aa, Arabidopsis thaliana; identical to SEQ ID NO: 22676
  peptide (1)..(280): Ceres Seq. ID no. 13609555
  misc_feature (1)..(96): Pfam Name: HD-ZIP protein N terminus Pfam Description: HD-ZIP protein N terminus
  misc_feature (1)..(280): Homolog of NCBI NO: 15236076 NR Description: homeobox-leucine zipper protein HAT1 (HD-Zip
  misc_feature (1)..(280): Homolog of NCBI NO: 21592922 NR Description: homeobox-leucine zipper protein HAT1 (hd-zip
  misc_feature (1)..(280): Homolog of NCBI NO: 15238078 NR Description: homeobox-leucine zipper protein HAT2 (HD-ZIP
  misc_feature (79)..(280): Homolog of NCBI NO: 25386204 NR Description: homeobox protein HAT2 [imported] - Arabidopsis
  misc_feature (1)..(253): Homolog of NCBI NO: 25487873 NR Description: homeobox-leucine zipper protein [imported] -

SEQ ID NO: 102161 - DNA, 1127 bp, Arabidopsis thaliana
  misc_feature (1)..(1127): Ceres Seq. ID no. 13609560
  misc_feature: MA Experiment ID: 108462 Result: Up-regulated in Transcription
  misc_feature: MA Experiment 108462 PARAMETER Experiment Name: At_Germinating_Seeds_cDNA_P Parameter: Age (day) Value: 2 vs. 0
  misc_feature: MA Experiment 108462 PARAMETER Experiment Name: At_Germinating_Seeds_cDNA_P Parameter: Tissue Value: Germinating Seeds
  misc_feature: MA Experiment ID: 108464 Result: Up-regulated in Transcription
  misc_feature: MA Experiment 108464 PARAMETER Experiment Name: At_Germinating_Seeds_cDNA_P Parameter: Age (day) Value: 4 vs. 0
  misc_feature: MA Experiment 108464 PARAMETER Experiment Name: At_Germinating_Seeds_cDNA_P Parameter: Tissue Value: Germinating Seeds
  misc_feature: MA Experiment ID: 108595 Result: Up-regulated in Transcription
  misc_feature: MA Experiment 108595 PARAMETER Experiment Name: At_Ler-pi_Ovule_cDNA_P Parameter: Plant Line Value: null
  misc_feature: MA Experiment ID: 20000227 Result: Down-regulated in Transcription
  misc_feature: MA Experiment 20000227 PARAMETER Experiment Name: At_Root-Tips-vs-Tops_P Parameter: Tissue Value: Root Tips vs. Root Tops
  misc_feature: MA Experiment ID: 20000234 Result: Up-regulated in Transcription
  misc_feature: MA Experiment 20000234 PARAMETER Experiment Name: At_Siliques_P Parameter: Age (day) Value: 21
  misc_feature: MA Experiment 20000234 PARAMETER Experiment Name: At_Siliques_P Parameter: Organism Value: A. thaliana
  misc_feature: MA Experiment 20000234 PARAMETER Experiment Name: At_Siliques_P Parameter: Plant Line Value: WS
  misc_feature: MA Experiment 20000234 PARAMETER Experiment Name: At_Siliques_P Parameter: Tissue Value: Less Than 5mm Siliques vs. Whole Plant
  misc_feature: MA Experiment ID: 20000235 Result: Up-regulated in Transcription
  misc_feature: MA Experiment 20000235 PARAMETER Experiment Name: At_Siliques_P Parameter: Age (day) Value: 21
  misc_feature: MA Experiment 20000235 PARAMETER Experiment Name: At_Siliques_P Parameter: Organism Value: A. thaliana
  misc_feature: MA Experiment 20000235 PARAMETER Experiment Name: At_Siliques_P Parameter: Plant Line Value: WS
  misc_feature: MA Experiment 20000235 PARAMETER Experiment Name: At_Siliques_P Parameter: Tissue Value: 5-10mm Siliques vs. Whole Plant
  misc_feature: MA Experiment ID: 20000264 Result: Up-regulated in Transcription
  misc_feature: MA Experiment 20000264 PARAMETER Experiment Name: At_Open_Flower_P Parameter: Age (day) Value: 21
  misc_feature: MA Experiment 20000264 PARAMETER Experiment Name: At_Open_Flower_P Parameter: Plant Line Value: WS
  misc_feature: MA Experiment 20000264 PARAMETER Experiment Name: At_Open_Flower_P Parameter: Tissue Value: Open Flower vs. Whole Plant
  misc_feature: MA Experiment ID: 20000265 Result: Up-regulated in Transcription
  misc_feature: MA Experiment 20000265 PARAMETER Experiment Name: At_Open_Flower_P Parameter: Age (day) Value: 21
  misc_feature: MA Experiment 20000265 PARAMETER Experiment Name: At_Open_Flower_P Parameter: Plant Line Value: WS
  misc_feature: MA Experiment 20000265 PARAMETER Experiment Name: At_Open_Flower_P Parameter: Tissue Value: Closed Flower vs. Whole Plant
  misc_feature: MA Experiment ID: 20001248 Result: Down-regulated in Transcription
  misc_feature: MA Experiment 20001248 PARAMETER Experiment Name: At_Far-red-induction_P Parameter: Age (day) Value: 7
  misc_feature: MA Experiment 20001248 PARAMETER Experiment Name: At_Far-red-induction_P Parameter: Light Value: Far-red vs. White
  misc_feature: MA Experiment 20001248 PARAMETER Experiment Name: At_Far-red-induction_P Parameter: Organism Value: A. thaliana
  misc_feature: MA Experiment 20001248 PARAMETER Experiment Name: At_Far-red-induction_P Parameter: Plant Line Value: Columbia
  misc_feature: MA Experiment 20001248 PARAMETER Experiment Name: At_Far-red-induction_P Parameter: Timepoint (hr) Value: 4
  misc_feature: MA Experiment 20001248 PARAMETER Experiment Name: At_Far-red-induction_P Parameter: Tissue Value: Whole Plant
  misc_feature: MA Experiment ID: 20001457 Result: Up-regulated in Transcription
  misc_feature: MA Experiment 20001457 PARAMETER Experiment Name: At_50mM_NH4NO3_L-to-H_P Parameter: Age (day) Value: Undefined
  misc_feature: MA Experiment 20001457 PARAMETER Experiment Name: At_50mM_NH4NO3_L-to-H_P Parameter: Organism Value: Undefined
  misc_feature: MA Experiment 20001457 PARAMETER Experiment Name: At_50mM_NH4NO3_L-to-H_P Parameter: Plant Line Value: Undefined
  misc_feature: MA Experiment 20001457 PARAMETER Experiment Name: At_50mM_NH4NO3_L-to-H_P Parameter: Timepoint (hr) Value: 0.5
  misc_feature: MA Experiment 20001457 PARAMETER Experiment Name: At_50mM_NH4NO3_L-to-H_P Parameter: Tissue Value: Siliques
  misc_feature: MA Experiment 20001457 PARAMETER Experiment Name: At_50mM_NH4NO3_L-to-H_P Parameter: Treatment Value: 50mM NH4NO3 vs. 100mM Manitol
atcaaacgtaaacttattgctttcttccttctggtagttccccaaaactcaaagtactctttttctgtgtaaacaaaaaaaaaatcaacggtactctttctcttctaagttgttgttccatggagaagagtttccagaaatcagctctccttgtgaccttgactctcttcttcttcattccagtttcaatctcggttccattcattctgtttcatgggattagagatcaatgctccaatggtggagtgagcagcttcgtacagctccttagcaacctctctagctcccatggatcttgcttagaaataggaaatggagagcaagattcggtgactatgccgcttacgcaacaagcgagtgtagcgtgtgagaaagttaaacagatgaaggatttgagtcaaggctacaacattgttgcacagtctcaaggaaacttggtagctagaggtctaatcgagttttgtgacaatgctcctccggtcttcaactatatatctttaggaggtcctcatgctggcatatccgacattcccaagtgtaattctacactttgcgagttgctgaaaacagcggtctacaccgacttcgtacaagatcatattgctccaagtggttatatcaagattcctacagatataaaagattacctggaacactccaagtatctgccaaagatcaacaacgagagacctaacgaaaggaacaccacttttaaagaccggttcactagcttgcacaacttggtccttgtcatgtttgagggtgatgcagtagtgattcctaaagaaagttcttggttcggatattacccggatggagcttccacacctcttttgtctcctcaacagacaaagctctatactgaggattggattggtctgaaaacattggatgctgccagaaaagttaagtttgtcagtgtccctggcgagcacctaagaatagcgcaagacgacgttgtaaaacacgtcgtgccttacctcaagaaccagcctgcgtctatgagtgaagatttggagatactgcatctatgattgagacttcattgttatgctctcttagaatcaaatttaaaagtgaagaactttagaggctcctttttcttaatcataaatccaaataatttc

SEQ ID NO: 102162 - protein, 304 aa, Arabidopsis thaliana; identical to SEQ ID NO: 36652
  peptide (1)..(304): Ceres Seq. ID no. 13609561
  misc_feature (21)..(289): Pfam Name: Palmitoyl protein thioesterase Pfam Description: Palmitoyl protein thioesterase
  misc_feature (1)..(304): Homolog of NCBI NO: 15236078 NR Description: palmitoyl protein thioesterase precursor, [Arabidopsis thaliana] >gi|28393560|gb|AAO42200.1| unknown [Arabidopsis thaliana] >gi|28973129|gb|AAO63889.1| unknown
  misc_feature (1)..(304): Homolog of NCBI NO: 21554369 NR Description: palmitoyl-protein thioesterase precursor-like
  misc_feature (213)..(304): Homolog of NCBI NO: 7488215 NR Description: probable thioesterase - Arabidopsis thaliana thioesterase like protein [Arabidopsis thaliana]
  misc_feature (62)..(141): Homolog of NCBI NO: 7488215 NR Description: probable thioesterase - Arabidopsis thaliana thioesterase like protein [Arabidopsis thaliana]
  misc_feature (1)..(297): Homolog of NCBI NO: 15236077 NR Description: palmitoyl protein thioesterase precursor,
  misc_feature (1)..(288): Homolog of NCBI NO: 15236079 NR Description: palmitoyl protein thioesterase precursor, [Arabidopsis thaliana] >gi|22136628|gb|AAM91633.1| unknown
  misc_feature (2)..(295): Homolog of NCBI NO: 15238063 NR Description: palmitoyl protein thioesterase precursor, putative
  misc_feature (2)..(295): Homolog of NCBI NO: 28393539 NR Description: putative palmitoyl-protein thioesterase precursor
  misc_feature (23)..(61): Homolog of NCBI NO: 7488215 NR Description: probable thioesterase - Arabidopsis thaliana thioesterase like protein [Arabidopsis thaliana]
  misc_feature (1)..(296): Homolog of NCBI NO: 15238065 NR Description: palmitoyl protein thioesterase precursor, putative

SEQ ID NO: 102163 - protein, 232 aa, Arabidopsis thaliana; identical to SEQ ID NO: 36653
  peptide (1)..(232): Ceres Seq. ID no. 13609562
  misc_feature (1)..(217): Pfam Name: Palmitoyl protein thioesterase Pfam Description: Palmitoyl protein thioesterase
  misc_feature (1)..(232): Homolog of NCBI NO: 15236078 NR Description: palmitoyl protein thioesterase precursor, [Arabidopsis thaliana] >gi|28393560|gb|AAO42200.1| unknown [Arabidopsis thaliana] >gi|28973129|gb|AAO63889.1| unknown
  misc_feature (1)..(232): Homolog of NCBI NO: 21554369 NR Description: palmitoyl-protein thioesterase precursor-like
  misc_feature (141)..(232): Homolog of NCBI NO: 7488215 NR Description: probable thioesterase - Arabidopsis thaliana thioesterase like protein [Arabidopsis thaliana]
  misc_feature (1)..(69): Homolog of NCBI NO: 7488215 NR Description: probable thioesterase - Arabidopsis thaliana thioesterase like protein [Arabidopsis thaliana]
  misc_feature (1)..(225): Homolog of NCBI NO: 15236077 NR Description: palmitoyl protein thioesterase precursor,
  misc_feature (1)..(216): Homolog of NCBI NO: 15236079 NR Description: palmitoyl protein thioesterase precursor, [Arabidopsis thaliana] >gi|22136628|gb|AAM91633.1| unknown
  misc_feature (1)..(223): Homolog of NCBI NO: 15238063 NR Description: palmitoyl protein thioesterase precursor, putative
  misc_feature (1)..(223): Homolog of NCBI NO: 28393539 NR Description: putative palmitoyl-protein thioesterase precursor
  misc_feature (1)..(224): Homolog of NCBI NO: 15238065 NR Description: palmitoyl protein thioesterase precursor, putative
  misc_feature (1)..(224): Homolog of NCBI NO: 15232301 NR Description: palmitoyl protein thioesterase precursor, [Arabidopsis thaliana] >gi|30695179|ref|NP_850728.1| palmitoyl thioesterase precursor, putative [Arabidopsis thaliana]

SEQ ID NO: 102164 - protein, 216 aa, Arabidopsis thaliana; identical to SEQ ID NO: 36654
  peptide (1)..(216): Ceres Seq. ID no. 13609563
  misc_feature (1)..(201): Pfam Name: Palmitoyl protein thioesterase Pfam Description: Palmitoyl protein thioesterase
  misc_feature (1)..(216): Homolog of NCBI NO: 15236078 NR Description: palmitoyl protein thioesterase precursor, [Arabidopsis thaliana] >gi|28393560|gb|AAO42200.1| unknown [Arabidopsis thaliana] >gi|28973129|gb|AAO63889.1| unknown
  misc_feature (1)..(216): Homolog of NCBI NO: 21554369 NR Description: palmitoyl-protein thioesterase precursor-like
  misc_feature (125)..(216): Homolog of NCBI NO: 7488215 NR Description: probable thioesterase - Arabidopsis thaliana thioesterase like protein [Arabidopsis thaliana]
  misc_feature (1)..(53): Homolog of NCBI NO: 7488215 NR Description: probable thioesterase - Arabidopsis thaliana thioesterase like protein [Arabidopsis thaliana]
  misc_feature (1)..(209): Homolog of NCBI NO: 15236077 NR Description: palmitoyl protein thioesterase precursor,
  misc_feature (1)..(200): Homolog of NCBI NO: 15236079 NR Description: palmitoyl protein thioesterase precursor, [Arabidopsis thaliana] >gi|22136628|gb|AAM91633.1| unknown
  misc_feature (1)..(207): Homolog of NCBI NO: 15238063 NR Description: palmitoyl protein thioesterase precursor, putative
  misc_feature (1)..(207): Homolog of NCBI NO: 28393539 NR Description: putative palmitoyl-protein thioesterase precursor
  misc_feature (1)..(208): Homolog of NCBI NO: 15238065 NR Description: palmitoyl protein thioesterase precursor, putative
  misc_feature (1)..(208): Homolog of NCBI NO: 15232301 NR Description: palmitoyl protein thioesterase precursor, [Arabidopsis thaliana] >gi|30695179|ref|NP_850728.1| palmitoyl thioesterase precursor, putative [Arabidopsis thaliana]

SEQ ID NO: 102165 - DNA, 2815 bp, Arabidopsis thaliana
  misc_feature (1)..(2815): Ceres Seq. ID no. 13609564
  misc_feature: MA Experiment ID: 20000234 Result: Up-regulated in Transcription
  misc_feature: MA Experiment 20000234 PARAMETER Experiment Name: At_Siliques_P Parameter: Age (day) Value: 21
  misc_feature: MA Experiment 20000234 PARAMETER Experiment Name: At_Siliques_P Parameter: Organism Value: A. thaliana
  misc_feature: MA Experiment 20000234 PARAMETER Experiment Name: At_Siliques_P Parameter: Plant Line Value: WS
  misc_feature: MA Experiment 20000234 PARAMETER Experiment Name: At_Siliques_P Parameter: Tissue Value: Less Than 5mm Siliques vs. Whole Plant
gcgacgactctttgaagcttccgttgctgacgtggatcactcctctccgccacaaaaacaaaacagaaaaacaaactcagacatgagcaagagctagccgtcactctcactctctgatgtctcacgaattccgatttcaattctaacttaaaccatatttctccgatcaaacatggcgtccgtatctccatctccgtcgtgttccactatacccataccacttcgacgaacatctttcgccgttgctgagttgagacgattaaaacaaagaagagcgatcccacctgtgtccgtcggtctcggacacttcgctgatgttgtacgcaatgacgttgatttcctgaagaacaaaatcggtatcggactccgttgggctaacgaggcttttcgtgtaccggaagtgactaaatccgctgaggaactgttttggcttaggcatcttgaggatcatacttctcagaatttgaagtcacaatcttggcctcagccttcctactcagggctcactggggtggatttgttcatggctgatgtcaaagccttggagacatatgctggttacttttacagtctttctaagatgtggtcaagaccacttcctgaagtttatgattcacaagctgttgcagattactttaattgcaggcctcatgtcgttgcctttaggcttctcgaggtattttctgcgttcacgattgctgccatcagattacgaacatcagcatcagttaagggcaaaagtttagaagcttcagagcagatttttgggatggtgttgaaagaaaccatgctacatttgggcccaacttttatcaaagttggtcaatcgctttccacgaggccagatatcattgggactgaaatctccaaggcactatctgaactgcatgaccgaatccctccctttccctggcctgaggctgtaaaaatccttgaaggggaattaggtggtcctgtcgaatcattctttagtcagttttcgcaagaaactgtagcagcagcatcctttggtcaggtctaccgaggaaggaccctcgatggtgcagatgttgcagtgaaagttcagcgccctgatctgagacatgcagtgctacgcgacatctacattctgcgacttgggttaggtgtattgcgaaaggtagcaaagagagaaaatgacattcgtgtatatgctgatgagcttggaatgggtttggctggagaattggactttactttagaggctgccaatgcctctgaatttcagctcacgcacgattttcctatatccgggttccaaaagtatatcagcatctaacgcgcaaaagagttttgaccatggaatggatggttggtgaaagcccaaccgatctactcgcaatatcttctggttactctgatcatgacaatgagagtcatgagaaacaaaaaattgaagcgagaaggcgtcttcttgatctggtgaacaaaggggtagaggcaactctagttcaactccttgatacaggtattttgcatgcagatccgcatcctggaaaccttcgttacacaacatcaagacaaatagggtttttggactttggtttagtttgtcggatgcaaagaaaacatcagcttgccatgctcgcatcaattgtgcatatcgtaaatggtgattgggcctgtcttgttgaatcgttgattgatatggatgtcatcacgccaggcgttaatacccgtcgttttactctggatctggaatatgcattgggagaggttaaacttataaacgggattcctgatatcgagttcaccaaggtgcttagtaaaatagtcaatgtggccctgaagtatcagctacgcatgccaccatacttcacacttgtcctccgttctcttgcttgcttggaaggtctggctgcagctggagatccaaattttaagacatttgaggcagcatacccttttgtggttcaaaagctcatcactgaaaattcagctgcaacaaggaagattcttcattcgtccttaaccgaaagaaggaattccgatgggaaagggttgctcttttcctgagtaaaagttctacgaggaaacaatcgccactgctaaagttatcaagggatgaaacttctgttgatagtagttccaatctaacggacaaagatgctgacaatgtaagtttggtcttgagacttttggcatccaaaaatggtgtggttcttagaagactcttgatggctgcgaacgggacttcactgatccggacatttatttcaagagaggcacttgtcatacgccagaaactttgcatgacgattgcaactacgatgtaccaatggatggttggaagccttggaattgaatcccttaaattcatttctctttcagacccaccaccatcttcaggaatcaacattacagtcaaagacttcaagattctaatcaatgacaagcgggtcagagtaatactgagaaagatactggagtctgcaaagagtgaccgagttttgatgctcagattctgctggacttcctttgtcatgtctctcaccaccactgcgcttgcttgccatcggtttgtgatctcggtctctgaaggttacgtcaactacttatctctgtctgctccagtcgcacttcgtacctgattacctgaacatcctacaccaacacagaaccagaatcactaatgtatattgttgtcaagacccaaagcaaagggttccttagtaagagggatagattctacagaaagactaaatattttcgtgtatagagtcgttccatatctaatcctatcagacgatcaatgcctgtcgtaacgatatatgactaatcataatatccgagacct

SEQ ID NO: 102166 - protein, 374 aa, Arabidopsis thaliana
  peptide (1)..(374): Ceres Seq. ID no. 13609565
  misc_feature (256)..(372): Pfam Name: ABC1 family Pfam Description: ABC1 family
  misc_feature (1)..(374): Homolog of NCBI NO: 18404977 NR Description: ABC transporter -related [Arabidopsis thaliana] At2g39190/T16B24.17 [Arabidopsis thaliana] putative ABC transporter; alternative splicing isoform Structure
  misc_feature (75)..(361): Homolog of NCBI NO: 15451577 NR Description: Putative ABC transporter [Oryza sativa]
  misc_feature (144)..(357): Homolog of NCBI NO: 23129126 NR Description: hypothetical protein [Nostoc punctiforme]
  misc_feature (143)..(357): Homolog of NCBI NO: 17232452 NR Description: hypothetical protein [Nostoc sp. PCC 7120]
  misc_feature (146)..(357): Homolog of NCBI NO: 22298493 NR Description: ORF_ID:tll0950~hypothetical protein
  misc_feature (146)..(364): Homolog of NCBI NO: 16331408 NR Description: ABC1-like [Synechocystis sp. PCC 6803]
  misc_feature (119)..(358): Homolog of NCBI NO: 38344898 NR Description: OSJNBb0079B02.1 [Oryza sativa (japonica
  misc_feature (146)..(358): Homolog of NCBI NO: 23042448 NR Description: hypothetical protein [Trichodesmium erythraeum
  misc_feature (146)..(357): Homolog of NCBI NO: 16329739 NR Description: ABC1-like [Synechocystis sp. PCC 6803]
  misc_feature (142)..(373): Homolog of NCBI NO: 18404075 NR Description: expressed protein [Arabidopsis thaliana] gene_id:MUJ8.9~similar to unknown protein~sp|Q55680 [Arabidopsis >gi|15294250|gb|AAK95302.1|AF410316_1 AT3g24190/MUJ8_17
MASVSPSPSCSTIPIPLRRTSFAVAELRRLKQRRAIPPVSVGLGHFADVVRNDVDFLKNKIGIGLRWANEAFRVPEVTKSAEELFWLRHLEDHTSQNLKSQSWPQPSYSGLTGVDLFMADVKALETYAGYFYSLSKMWSRPLPEVYDSQAVADYFNCRPHVVAFRLLEVFSAFTIAAIRLRTSASVKGKSLEASEQIFGMVLKETMLHLGPTFIKVGQSLSTRPDIIGTEISKALSELHDRIPPFPWPEAVKILEGELGGPVESFFSQFSQETVAAASFGQVYRGRTLDGADVAVKVQRPDLRHAVLRDIYILRLGLGVLRKVAKRENDIRVYADELGMGLAGELDFTLEAANASEFQLTHDFPISGFQKYISI

SEQ ID NO: 102167 - protein, 257 aa, Arabidopsis thaliana
  peptide (1)..(257): Ceres Seq. ID no. 13609566
  misc_feature (139)..(255): Pfam Name: ABC1 family Pfam Description: ABC1 family
  misc_feature (1)..(257): Homolog of NCBI NO: 18404977 NR Description: ABC transporter -related [Arabidopsis thaliana] At2g39190/T16B24.17 [Arabidopsis thaliana] putative ABC transporter; alternative splicing isoform Structure
  misc_feature (1)..(244): Homolog of NCBI NO: 15451577 NR Description: Putative ABC transporter [Oryza sativa]
  misc_feature (27)..(240): Homolog of NCBI NO: 23129126 NR Description: hypothetical protein [Nostoc punctiforme]
  misc_feature (26)..(240): Homolog of NCBI NO: 17232452 NR Description: hypothetical protein [Nostoc sp. PCC 7120]
  misc_feature (29)..(240): Homolog of NCBI NO: 22298493 NR Description: ORF_ID:tll0950~hypothetical protein
  misc_feature (29)..(247): Homolog of NCBI NO: 16331408 NR Description: ABC1-like [Synechocystis sp. PCC 6803]
  misc_feature (2)..(241): Homolog of NCBI NO: 38344898 NR Description: OSJNBb0079B02.1 [Oryza sativa (japonica
  misc_feature (29)..(241): Homolog of NCBI NO: 23042448 NR Description: hypothetical protein [Trichodesmium erythraeum
  misc_feature (29)..(240): Homolog of NCBI NO: 16329739 NR Description: ABC1-like [Synechocystis sp. PCC 6803]
  misc_feature (25)..(256): Homolog of NCBI NO: 18404075 NR Description: expressed protein [Arabidopsis thaliana] gene_id:MUJ8.9~similar to unknown protein~sp|Q55680 [Arabidopsis >gi|15294250|gb|AAK95302.1|AF410316_1 AT3g24190/MUJ8_17
MADVKALETYAGYFYSLSKMWSRPLPEVYDSQAVADYFNCRPHVVAFRLLEVFSAFTIAAIRLRTSASVKGKSLEASEQIFGMVLKETMLHLGPTFIKVGQSLSTRPDIIGTEISKALSELHDRIPPFPWPEAVKILEGELGGPVESFFSQFSQETVAAASFGQVYRGRTLDGADVAVKVQRPDLRHAVLRDIYILRLGLGVLRKVAKRENDIRVYADELGMGLAGELDFTLEAANASEFQLTHDFPISGFQKYISI

SEQ ID NO: 102168 - protein, 238 aa, Arabidopsis thaliana
  peptide (1)..(238): Ceres Seq. ID no. 13609567
  misc_feature (1)..(221): Homolog of NCBI NO: 15451577 NR Description: Putative ABC transporter [Oryza sativa]
  misc_feature (1)..(233): Homolog of NCBI NO: 23129126 NR Description: hypothetical protein [Nostoc punctiforme]
  misc_feature (1)..(224): Homolog of NCBI NO: 17232452 NR Description: hypothetical protein [Nostoc sp. PCC 7120]
  misc_feature (1)..(224): Homolog of NCBI NO: 22298493 NR Description: ORF_ID:tll0950~hypothetical protein
  misc_feature (1)..(224): Homolog of NCBI NO: 16331408 NR Description: ABC1-like [Synechocystis sp. PCC 6803]
  misc_feature (41)..(224): Homolog of NCBI NO: 38344898 NR Description: OSJNBb0079B02.1 [Oryza sativa (japonica
  misc_feature (1)..(12): Homolog of NCBI NO: 38344898 NR Description: OSJNBb0079B02.1 [Oryza sativa (japonica
  misc_feature (1)..(229): Homolog of NCBI NO: 23042448 NR Description: hypothetical protein [Trichodesmium erythraeum
  misc_feature (1)..(220): Homolog of NCBI NO: 16329739 NR Description: ABC1-like [Synechocystis sp. PCC 6803]
  misc_feature (40)..(224): Homolog of NCBI NO: 18404075 NR Description: expressed protein [Arabidopsis thaliana] gene_id:MUJ8.9~similar to unknown protein~sp|Q55680 [Arabidopsis >gi|15294250|gb|AAK95302.1|AF410316_1 AT3g24190/MUJ8_17
MEWMVGESPTDLLAISSGYSDHDNESHEKQKIEARRRLLDLVNKGVEATLVQLLDTGILHADPHPGNLRYTTSRQIGFLDFGLVCRMQRKHQLAMLASIVHIVNGDWACLVESLIDMDVITPGVNTRRFTLDLEYALGEVKLINGIPDIEFTKVLSKIVNVALKYQLRMPPYFTLVLRSLACLEGLAAAGDPNFKTFEAAYPFVVQKLITENSAATRKILHSSLTERRNSDGKGLLFS

SEQ ID NO: 102169 - DNA, 995 bp, Arabidopsis thaliana
  misc_feature (1)..(995): Ceres Seq. ID no. 13609583
  misc_feature: MA Experiment ID: 108461 Result: Up-regulated in Transcription
  misc_feature: MA Experiment 108461 PARAMETER Experiment Name: At_Germinating_Seeds_cDNA_P Parameter: Age (day) Value: 1 vs. 0
  misc_feature: MA Experiment 108461 PARAMETER Experiment Name: At_Germinating_Seeds_cDNA_P Parameter: Tissue Value: Germinating Seeds
  misc_feature: MA Experiment ID: 20000180 Result: Up-regulated in Transcription
  misc_feature: MA Experiment 20000180 PARAMETER Experiment Name: At_Germinating_Seeds_P Parameter: Age (hr) Value: 24 vs. 0
  misc_feature: MA Experiment 20000180 PARAMETER Experiment Name: At_Germinating_Seeds_P Parameter: Tissue Value: Germinating Seeds
  misc_feature: MA Experiment ID: 20000227 Result: Up-regulated in Transcription
  misc_feature: MA Experiment 20000227 PARAMETER Experiment Name: At_Root-Tips-vs-Tops_P Parameter: Tissue Value: Root Tips vs. Root Tops
  misc_feature: MA Experiment ID: 20000234 Result: Up-regulated in Transcription
  misc_feature: MA Experiment 20000234 PARAMETER Experiment Name: At_Siliques_P Parameter: Age (day) Value: 21
  misc_feature: MA Experiment 20000234 PARAMETER Experiment Name: At_Siliques_P Parameter: Organism Value: A. thaliana
  misc_feature: MA Experiment 20000234 PARAMETER Experiment Name: At_Siliques_P Parameter: Plant Line Value: WS
  misc_feature: MA Experiment 20000234 PARAMETER Experiment Name: At_Siliques_P Parameter: Tissue Value: Less Than 5mm Siliques vs. Whole Plant
  misc_feature: MA Experiment ID: 20000235 Result: Up-regulated in Transcription
  misc_feature: MA Experiment 20000235 PARAMETER Experiment Name: At_Siliques_P Parameter: Age (day) Value: 21
  misc_feature: MA Experiment 20000235 PARAMETER Experiment Name: At_Siliques_P Parameter: Organism Value: A. thaliana
  misc_feature: MA Experiment 20000235 PARAMETER Experiment Name: At_Siliques_P Parameter: Plant Line Value: WS
  misc_feature: MA Experiment 20000235 PARAMETER Experiment Name: At_Siliques_P Parameter: Tissue Value: 5-10mm Siliques vs. Whole Plant
atttttaacgctcactggatttataagtagagattttttgtgtctcacaaaaacaaaaaaatcatcgtgaaacgttcgaaggccattttctttggacgaccatcggcgttaaggagagagcttagatctcgtgccgtcgtgcgacgttgttttccggcttgatcaaaatggggttgtcattcggaaagttgttcagcaggctctttgcgaagaaagagatgcgtattctgatggttggtctcgatgctgctggtaagacgactatcctctacaagctcaaacttggagagatcgtcaccactattccaaccattgggttcaacgttgagactgttgaatacaagaacatcagcttcaccgtgtgggatgttgggggtcaagacaagatccgtccattgtggagacattacttccagaacacacagggacttatctttgttgtggacagcaatgatcgtgaccgtgttgttgaagccagggacgagcttcacaggatgctgaatgaggatgaattgagggatgcagttctgcttgtatttgctaacaagcaagatcttcccaacgcgatgaacgctgctgagataactgacaagcttgggcttcattctcttcgtcaacgacactggtacattcagagcacatgtgccacctctggagaaggactctatgagggacttgactggctctccaacaacatcgcaagcaaggcatagatggaatgttagccagattcctcttctgcttgtttggtttacaaatcaaagacagaggtctgtttctctagtactaaaagatttattattatattcttcttcgtcacttatctcaaacgcagatcattttacactttgtacttccccttcaataacttgttacttctctcgtttgcttcctgaatttgagtatatcatttttacatctgcttttcatcaaagcataaagcatctttcgaaacaaaaattgaaccgaatttttctgtaaactgatcaaatgtg

SEQ ID NO: 102170 - protein, 181 aa, Arabidopsis thaliana; identical to SEQ ID NO: 22739
  peptide (1)..(181): Ceres Seq. ID no. 13609584
  misc_feature (4)..(177): Pfam Name: ADP-ribosylation factor family Pfam Description: ADP-ribosylation factor family
  misc_feature (1)..(181): Homolog of NCBI NO: 15226521 NR Description: ADP-ribosylation factor 1 (ARF1) [Arabidopsis
  misc_feature (1)..(181): Homolog of NCBI NO: 25294169 NR Description: ADP-ribosylation factor [imported] - pepper
  misc_feature (1)..(181): Homolog of NCBI NO: 15228723 NR Description: ADP-ribosylation factor [Arabidopsis thaliana]
  misc_feature (1)..(181): Homolog of NCBI NO: 30681825 NR Description: ADP-ribosylation factor, putative [Arabidopsis
  misc_feature (1)..(181): Homolog of NCBI NO: 15223164 NR Description: ADP-ribosylation factor 1 (ARF1), putative
  misc_feature (1)..(180): Homolog of NCBI NO: 6573751 NR Description: F20B24.7 [Arabidopsis thaliana]
  misc_feature (1)..(181): Homolog of NCBI NO: 39653273 NR Description: ADP-ribosylation factor [Medicago sativa]
  misc_feature (1)..(181): Homolog of NCBI NO: 34900342 NR Description: ADP-ribosylation factor 1 [Oryza sativa (japonica
  misc_feature (1)..(181): Homolog of NCBI NO: 11131026 NR Description: ADP-ribosylation factor
  misc_feature (1)..(180): Homolog of NCBI NO: 17154685 NR Description: ADP-ribosylation factor [Gossypium hirsutum]

SEQ ID NO: 102171 - protein, 164 aa, Arabidopsis thaliana; identical to SEQ ID NO: 22740
  peptide (1)..(164): Ceres Seq. ID no. 13609585
  misc_feature (1)..(160): Pfam Name: ADP-ribosylation factor family Pfam Description: ADP-ribosylation factor family
  misc_feature (1)..(164): Homolog of NCBI NO: 15226521 NR Description: ADP-ribosylation factor 1 (ARF1) [Arabidopsis
  misc_feature (1)..(164): Homolog of NCBI NO: 25294169 NR Description: ADP-ribosylation factor [imported] - pepper
  misc_feature (1)..(164): Homolog of NCBI NO: 15228723 NR Description: ADP-ribosylation factor [Arabidopsis thaliana]
  misc_feature (1)..(164): Homolog of NCBI NO: 30681825 NR Description: ADP-ribosylation factor, putative [Arabidopsis
  misc_feature (1)..(164): Homolog of NCBI NO: 15223164 NR Description: ADP-ribosylation factor 1 (ARF1), putative
  misc_feature (1)..(163): Homolog of NCBI NO: 6573751 NR Description: F20B24.7 [Arabidopsis thaliana]
  misc_feature (1)..(164): Homolog of NCBI NO: 39653273 NR Description: ADP-ribosylation factor [Medicago sativa]
  misc_feature (1)..(164): Homolog of NCBI NO: 34900342 NR Description: ADP-ribosylation factor 1 [Oryza sativa (japonica
  misc_feature (1)..(164): Homolog of NCBI NO: 11131026 NR Description: ADP-ribosylation factor
  misc_feature (1)..(163): Homolog of NCBI NO: 17154685 NR Description: ADP-ribosylation factor [Gossypium hirsutum]

SEQ ID NO: 102172 - protein, 160 aa, Arabidopsis thaliana; identical to SEQ ID NO: 22741
  peptide (1)..(160): Ceres Seq. ID no. 13609586
  misc_feature (1)..(156): Pfam Name: ADP-ribosylation factor family Pfam Description: ADP-ribosylation factor family
  misc_feature (1)..(160): Homolog of NCBI NO: 15226521 NR Description: ADP-ribosylation factor 1 (ARF1) [Arabidopsis
  misc_feature (1)..(160): Homolog of NCBI NO: 25294169 NR Description: ADP-ribosylation factor [imported] - pepper
  misc_feature (1)..(160): Homolog of NCBI NO: 15228723 NR Description: ADP-ribosylation factor [Arabidopsis thaliana]
  misc_feature (1)..(160): Homolog of NCBI NO: 30681825 NR Description: ADP-ribosylation factor, putative [Arabidopsis
  misc_feature (1)..(160): Homolog of NCBI NO: 15223164 NR Description: ADP-ribosylation factor 1 (ARF1), putative
  misc_feature (1)..(159): Homolog of NCBI NO: 6573751 NR Description: F20B24.7 [Arabidopsis thaliana]
  misc_feature (1)..(160): Homolog of NCBI NO: 39653273 NR Description: ADP-ribosylation factor [Medicago sativa]
  misc_feature (1)..(160): Homolog of NCBI NO: 34900342 NR Description: ADP-ribosylation factor 1 [Oryza sativa (japonica
  misc_feature (1)..(160): Homolog of NCBI NO: 11131026 NR Description: ADP-ribosylation factor
  misc_feature (1)..(159): Homolog of NCBI NO: 17154685 NR Description: ADP-ribosylation factor [Gossypium hirsutum]

SEQ ID NO: 102173 - DNA, 1295 bp, Arabidopsis thaliana
  misc_feature (1)..(1295): Ceres Seq. ID no. 13609587
  misc_feature: MA Experiment ID: 108435 Result: Down-regulated in Transcription
  misc_feature: MA Experiment 108435 PARAMETER Experiment Name: At_stm_Mutants_cDNA_P Parameter: Plant Line Value: wt Landsburg vs stm
  misc_feature: MA Experiment 108435 PARAMETER Experiment Name: At_stm_Mutants_cDNA_P Parameter: Tissue Value: Shoot Apical Meristem Region
  misc_feature: MA Experiment ID: 108462 Result: Up-regulated in Transcription
  misc_feature: MA Experiment 108462 PARAMETER Experiment Name: At_Germinating_Seeds_cDNA_P Parameter: Age (day) Value: 2 vs. 0
  misc_feature: MA Experiment 108462 PARAMETER Experiment Name: At_Germinating_Seeds_cDNA_P Parameter: Tissue Value: Germinating Seeds
  misc_feature: MA Experiment ID: 108463 Result: Up-regulated in Transcription
  misc_feature: MA Experiment 108463 PARAMETER Experiment Name: At_Germinating_Seeds_cDNA_P Parameter: Age (day) Value: 3 vs. 0
  misc_feature: MA Experiment 108463 PARAMETER Experiment Name: At_Germinating_Seeds_cDNA_P Parameter: Tissue Value: Germinating Seeds
  misc_feature: MA Experiment ID: 108464 Result: Up-regulated in Transcription
  misc_feature: MA Experiment 108464 PARAMETER Experiment Name: At_Germinating_Seeds_cDNA_P Parameter: Age (day) Value: 4 vs. 0
  misc_feature: MA Experiment 108464 PARAMETER Experiment Name: At_Germinating_Seeds_cDNA_P Parameter: Tissue Value: Germinating Seeds
  misc_feature: MA Experiment ID: 108488 Result: Down-regulated in Transcription
  misc_feature: MA Experiment ID: 108489 Result: Up-regulated in Transcription
  misc_feature: MA Experiment ID: 108501 Result: Up-regulated in Transcription
  misc_feature: MA Experiment 108501 PARAMETER Experiment Name: At_ap2_floral_buds_cDNA_P Parameter: Plant Line Value: ap2 (Ler.)
  misc_feature: MA Experiment 108501 PARAMETER Experiment Name: At_ap2_floral_buds_cDNA_P Parameter: Tissue Value: Closed Flower
  misc_feature: MA Experiment ID: 108573 Result: Up-regulated in Transcription
  misc_feature: MA Experiment 108573 PARAMETER Experiment Name: At_Drought_cDNA_P Parameter: Timepoint (hr) Value: 6
  misc_feature: MA Experiment 108573 PARAMETER Experiment Name: At_Drought_cDNA_P Parameter: Tissue Value: Aerial
  misc_feature: MA Experiment 108573 PARAMETER Experiment Name: At_Drought_cDNA_P Parameter: Treatment Value: Drought vs. No Drought
  misc_feature: MA Experiment ID: 108579 Result: Up-regulated in Transcription
  misc_feature: MA Experiment 108579 PARAMETER Experiment Name: At_4deg_Cold_cDNA_P Parameter: Temperature (deg C) Value: 4 vs. 22
  misc_feature: MA Experiment 108579 PARAMETER Experiment Name: At_4deg_Cold_cDNA_P Parameter: Timepoint (hr) Value: 6
  misc_feature: MA Experiment 108579 PARAMETER Experiment Name: At_4deg_Cold_cDNA_P Parameter: Tissue Value: Aerial
  misc_feature: MA Experiment ID: 108595 Result: Down-regulated in Transcription
  misc_feature: MA Experiment 108595 PARAMETER Experiment Name: At_Ler-pi_Ovule_cDNA_P Parameter: Plant Line Value: null
  misc_feature: MA Experiment ID: 20000030 Result: Up-regulated in Transcription
  misc_feature: MA Experiment 20000030 PARAMETER Experiment Name: At_CS6630_Roots_cDNA_P Parameter: Plant Line Value: CS6630 vs. WS
  misc_feature: MA Experiment 20000030 PARAMETER Experiment Name: At_CS6630_Roots_cDNA_P Parameter: Tissue Value: Roots
  misc_feature: MA Experiment ID: 20000069 Result: Down-regulated in Transcription
  misc_feature: MA Experiment 20000069 PARAMETER Experiment Name: At_100uM_ABA_Mutants_cDNA_P Parameter: Plant Line Value: CS23
  misc_feature: MA Experiment 20000069 PARAMETER Experiment Name: At_100uM_ABA_Mutants_cDNA_P Parameter: Timepoint (hr) Value: 6
  misc_feature: MA Experiment 20000069 PARAMETER Experiment Name: At_100uM_ABA_Mutants_cDNA_P Parameter: Tissue Value: Aerial
  misc_feature: MA Experiment 20000069 PARAMETER Experiment Name: At_100uM_ABA_Mutants_cDNA_P Parameter: Treatment Value: 100uM ABA vs. No Treatment
  misc_feature: MA Experiment ID: 20000070 Result: Down-regulated in Transcription
  misc_feature: MA Experiment 20000070 PARAMETER Experiment Name: At_100uM_ABA_Mutants_cDNA_P Parameter: Plant Line Value: CS24
  misc_feature: MA Experiment 20000070 PARAMETER Experiment Name: At_100uM_ABA_Mutants_cDNA_P Parameter: Timepoint (hr) Value: 6
  misc_feature: MA Experiment 20000070 PARAMETER Experiment Name: At_100uM_ABA_Mutants_cDNA_P Parameter: Tissue Value: Aerial
  misc_feature: MA Experiment 20000070 PARAMETER Experiment Name: At_100uM_ABA_Mutants_cDNA_P Parameter: Treatment Value: 100uM ABA vs. No Treatment
  misc_feature: MA Experiment ID: 20000071 Result: Down-regulated in Transcription
  misc_feature: MA Experiment 20000071 PARAMETER Experiment Name: At_100uM_ABA_Mutants_cDNA_P Parameter: Plant Line Value: CS8104
  misc_feature: MA Experiment 20000071 PARAMETER Experiment Name: At_100uM_ABA_Mutants_cDNA_P Parameter: Timepoint (hr) Value: 6
  misc_feature: MA Experiment 20000071 PARAMETER Experiment Name: At_100uM_ABA_Mutants_cDNA_P Parameter: Tissue Value: Aerial
  misc_feature: MA Experiment 20000071 PARAMETER Experiment Name: At_100uM_ABA_Mutants_cDNA_P Parameter: Treatment Value: 100uM ABA vs. No Treatment
  misc_feature: MA Experiment ID: 20000072 Result: Down-regulated in Transcription
  misc_feature: MA Experiment 20000072 PARAMETER Experiment Name: At_100uM_ABA_Mutants_cDNA_P Parameter: Plant Line Value: CS8105
  misc_feature: MA Experiment 20000072 PARAMETER Experiment Name: At_100uM_ABA_Mutants_cDNA_P Parameter: Timepoint (hr) Value: 6
  misc_feature: MA Experiment 20000072 PARAMETER Experiment Name: At_100uM_ABA_Mutants_cDNA_P Parameter: Tissue Value: Aerial
  misc_feature: MA Experiment 20000072 PARAMETER Experiment Name: At_100uM_ABA_Mutants_cDNA_P Parameter: Treatment Value: 100uM ABA vs. No Treatment
  misc_feature: MA Experiment ID: 20000086 Result: Down-regulated in Transcription
  misc_feature: MA Experiment 20000086 PARAMETER Experiment Name: At_100uM_ABA_Mutants_cDNA_P Parameter: Plant Line Value: CS22
  misc_feature: MA Experiment 20000086 PARAMETER Experiment Name: At_100uM_ABA_Mutants_cDNA_P Parameter: Timepoint (hr) Value: 6
  misc_feature: MA Experiment 20000086 PARAMETER Experiment Name: At_100uM_ABA_Mutants_cDNA_P Parameter: Tissue Value: Aerial
  misc_feature: MA Experiment 20000086 PARAMETER Experiment Name: At_100uM_ABA_Mutants_cDNA_P Parameter: Treatment Value: 100uM ABA vs. No Treatment
  misc_feature: MA Experiment ID: 20000087 Result: Down-regulated in Transcription
  misc_feature: MA Experiment 20000087 PARAMETER Experiment Name: At_100uM_ABA_Mutants_cDNA_P Parameter: Plant Line Value: WS
  misc_feature: MA Experiment 20000087 PARAMETER Experiment Name: At_100uM_ABA_Mutants_cDNA_P Parameter: Timepoint (hr) Value: 6
  misc_feature: MA Experiment 20000087 PARAMETER Experiment Name: At_100uM_ABA_Mutants_cDNA_P Parameter: Tissue Value: Aerial
  misc_feature: MA Experiment 20000087 PARAMETER Experiment Name: At_100uM_ABA_Mutants_cDNA_P Parameter: Treatment Value: 100uM ABA vs. No Treatment
  misc_feature: MA Experiment ID: 20000088 Result: Down-regulated in Transcription
  misc_feature: MA Experiment 20000088 PARAMETER Experiment Name: At_100uM_ABA_Mutants_cDNA_P Parameter: Plant Line Value: Landsberg
  misc_feature: MA Experiment 20000088 PARAMETER Experiment Name: At_100uM_ABA_Mutants_cDNA_P Parameter: Timepoint (hr) Value: 6
  misc_feature: MA Experiment 20000088 PARAMETER Experiment Name: At_100uM_ABA_Mutants_cDNA_P Parameter: Tissue Value: Aerial
  misc_feature: MA Experiment 20000088 PARAMETER Experiment Name: At_100uM_ABA_Mutants_cDNA_P Parameter: Treatment Value: 100uM ABA vs. No Treatment
  misc_feature: MA Experiment ID: 20000090 Result: Down-regulated in Transcription
  misc_feature: MA Experiment ID: 20000117 Result: Down-regulated in Transcription
  misc_feature: MA Experiment 20000117 PARAMETER Experiment Name: At_100uM_ABA_Mutants_cDNA_P Parameter: Plant Line Value: Columbia
  misc_feature: MA Experiment 20000117 PARAMETER Experiment Name: At_100uM_ABA_Mutants_cDNA_P Parameter: Timepoint (hr) Value: 6
  misc_feature: MA Experiment 20000117 PARAMETER Experiment Name: At_100uM_ABA_Mutants_cDNA_P Parameter: Tissue Value: Aerial
  misc_feature: MA Experiment 20000117 PARAMETER Experiment Name: At_100uM_ABA_Mutants_cDNA_P Parameter: Treatment Value: 100uM ABA vs. No Treatment
  misc_feature: MA Experiment ID: 20000144 Result: Down-regulated in Transcription
  misc_feature: MA Experiment 20000144 PARAMETER Experiment Name: At_42deg_Heat_cDNA_P Parameter: Temperature (deg C) Value: 42 vs. 22
  misc_feature: MA Experiment 20000144 PARAMETER Experiment Name: At_42deg_Heat_cDNA_P Parameter: Timepoint (hr) Value: 1
  misc_feature: MA Experiment 20000144 PARAMETER Experiment Name: At_42deg_Heat_cDNA_P Parameter: Tissue Value: Aerial
  misc_feature: MA Experiment ID: 20000171 Result: Up-regulated in Transcription
  misc_feature: MA Experiment 20000171 PARAMETER Experiment Name: At_42deg_Heat_P Parameter: Age (day) Value: 14
  misc_feature: MA Experiment 20000171 PARAMETER Experiment Name: At_42deg_Heat_P Parameter: Organism Value: A. thaliana
  misc_feature: MA Experiment 20000171 PARAMETER Experiment Name: At_42deg_Heat_P Parameter: Plant Line Value: WS
  misc_feature: MA Experiment 20000171 PARAMETER Experiment Name: At_42deg_Heat_P Parameter: Temperature (deg C) Value: 42 vs. 22
  misc_feature: MA Experiment 20000171 PARAMETER Experiment Name: At_42deg_Heat_P Parameter: Timepoint (hr) Value: 1
  misc_feature: MA Experiment 20000171 PARAMETER Experiment Name: At_42deg_Heat_P Parameter: Tissue Value: Aerial
  misc_feature: MA Experiment ID: 20000184 Result: Up-regulated in Transcription
  misc_feature: MA Experiment 20000184 PARAMETER Experiment Name: At_Shoots__P Parameter: Age (day) Value: 7
  misc_feature: MA Experiment 20000184 PARAMETER Experiment Name: At_Shoots__P Parameter: Tissue Value: Shoots vs. Whole Plant
  misc_feature: MA Experiment ID: 20000214 Result: Up-regulated in Transcription
  misc_feature: MA Experiment 20000214 PARAMETER Experiment Name: At_4deg_Cold_P Parameter: Timepoint (hr) Value: 6
  misc_feature: MA Experiment ID: 20000264 Result: Down-regulated in Transcription
  misc_feature: MA Experiment 20000264 PARAMETER Experiment Name: At_Open_Flower_P Parameter: Age (day) Value: 21
  misc_feature: MA Experiment 20000264 PARAMETER Experiment Name: At_Open_Flower_P Parameter: Plant Line Value: WS
  misc_feature: MA Experiment 20000264 PARAMETER Experiment Name: At_Open_Flower_P Parameter: Tissue Value: Open Flower vs. Whole Plant
  misc_feature: MA Experiment ID: 20000265 Result: Down-regulated in Transcription
  misc_feature: MA Experiment 20000265 PARAMETER Experiment Name: At_Open_Flower_P Parameter: Age (day) Value: 21
  misc_feature: MA Experiment 20000265 PARAMETER Experiment Name: At_Open_Flower_P Parameter: Plant Line Value: WS
  misc_feature: MA Experiment 20000265 PARAMETER Experiment Name: At_Open_Flower_P Parameter: Tissue Value: Closed Flower vs. Whole Plant
  misc_feature: MA Experiment ID: 20000286 Result: Down-regulated in Transcription
  misc_feature: MA Experiment 20000286 PARAMETER Experiment Name: At_Open_Flower_P Parameter: Age (day) Value: 21
  misc_feature: MA Experiment 20000286 PARAMETER Experiment Name: At_Open_Flower_P Parameter: Plant Line Value: WS
  misc_feature: MA Experiment 20000286 PARAMETER Experiment Name: At_Open_Flower_P Parameter: Tissue Value: Half Open vs. Whole Plant
  misc_feature: MA Experiment ID: 20000495 Result: Down-regulated in Transcription
  misc_feature: MA Experiment 20000495 PARAMETER Experiment Name: At_Guard_Cells_P Parameter: Harvest Date Value: 8/2/2002
  misc_feature: MA Experiment 20000495 PARAMETER Experiment Name: At_Guard_Cells_P Parameter: Organism Value: A. thaliana
  misc_feature: MA Experiment 20000495 PARAMETER Experiment Name: At_Guard_Cells_P Parameter: Tissue Value: Guard Cells vs. Leaves
  misc_feature: MA Experiment ID: 20001451 Result: Up-regulated in Transcription
  misc_feature: MA Experiment 20001451 PARAMETER Experiment Name: At_Far-red-induction_P Parameter: Age (day) Value: 7
  misc_feature: MA Experiment 20001451 PARAMETER Experiment Name: At_Far-red-induction_P Parameter: Light Value: Far-red vs. White
  misc_feature: MA Experiment 20001451 PARAMETER Experiment Name: At_Far-red-induction_P Parameter: Organism Value: A. thaliana
  misc_feature: MA Experiment 20001451 PARAMETER Experiment Name: At_Far-red-induction_P Parameter: Plant Line Value: Columbia
  misc_feature: MA Experiment 20001451 PARAMETER Experiment Name: At_Far-red-induction_P Parameter: Timepoint (hr) Value: 24
  misc_feature: MA Experiment 20001451 PARAMETER Experiment Name: At_Far-red-induction_P Parameter: Tissue Value: Whole Plant
  misc_feature: MA Experiment ID: 20001558 Result: Up-regulated in Transcription
  misc_feature: MA Experiment 20001558 PARAMETER Experiment Name: At_Drought_Soil_Dry_P Parameter: Age (day) Value: 27
  misc_feature: MA Experiment 20001558 PARAMETER Experiment Name: At_Drought_Soil_Dry_P Parameter: Organism Value: A. thaliana
  misc_feature: MA Experiment 20001558 PARAMETER Experiment Name: At_Drought_Soil_Dry_P Parameter: Plant Line Value: WS
  misc_feature: MA Experiment 20001558 PARAMETER Experiment Name: At_Drought_Soil_Dry_P Parameter: Post Timepoint (hr) Value: 6
  misc_feature: MA Experiment 20001558 PARAMETER Experiment Name: At_Drought_Soil_Dry_P Parameter: Post-Treatment Value: Re-Water vs. No Drought
  misc_feature: MA Experiment 20001558 PARAMETER Experiment Name: At_Drought_Soil_Dry_P Parameter: Timepoint (day) Value: 13
  misc_feature: MA Experiment 20001558 PARAMETER Experiment Name: At_Drought_Soil_Dry_P Parameter: Treatment Value: Drought vs. No Drought
  misc_feature: MA Experiment ID: 20001906 Result: Up-regulated in Transcription
  misc_feature: MA Experiment 20001906 PARAMETER Experiment Name: At_Drought_Reproduction_P Parameter: Age (day) Value: 35
  misc_feature: MA Experiment 20001906 PARAMETER Experiment Name: At_Drought_Reproduction_P Parameter: Organism Value: A. thaliana
  misc_feature: MA Experiment 20001906 PARAMETER Experiment Name: At_Drought_Reproduction_P Parameter: Plant Line Value: WS
  misc_feature: MA Experiment 20001906 PARAMETER Experiment Name: At_Drought_Reproduction_P Parameter: Timepoint (day) Value: 5
  misc_feature: MA Experiment 20001906 PARAMETER Experiment Name: At_Drought_Reproduction_P Parameter: Tissue Value: Siliques
  misc_feature: MA Experiment 20001906 PARAMETER Experiment Name: At_Drought_Reproduction_P Parameter: Treatment Value: Drought vs. No Drought
  misc_feature: MA Experiment ID: 20001911 Result: Up-regulated in Transcription
  misc_feature: MA Experiment 20001911 PARAMETER Experiment Name: At_Drought_Reproduction_P Parameter: Age (day) Value: 40
  misc_feature: MA Experiment 20001911 PARAMETER Experiment Name: At_Drought_Reproduction_P Parameter: Organism Value: A. thaliana
  misc_feature: MA Experiment 20001911 PARAMETER Experiment Name: At_Drought_Reproduction_P Parameter: Plant Line Value: WS
  misc_feature: MA Experiment 20001911 PARAMETER Experiment Name: At_Drought_Reproduction_P Parameter: Timepoint (day) Value: 10
  misc_feature: MA Experiment 20001911 PARAMETER Experiment Name: At_Drought_Reproduction_P Parameter: Tissue Value: Flowers
  misc_feature: MA Experiment 20001911 PARAMETER Experiment Name: At_Drought_Reproduction_P Parameter: Treatment Value: Drought vs. No Drought
aaaataaaagtttctataagaagaaatctcgtctctgtttaattctctctttaacgttttgatccgtttccataagaacataacagagcaagaaaaaaaagaaagcacaagctttgttgttctgaagagaaaacaaacaaaacagagagtttaagacagagagaagctcatggatgtttttgctttcaatgcttctttatccatgtgtaaagatgttgccggaatcgcaggcaacatatttgcatttggactcttcgtttcaccaatgccaacgtttaggaggatcatgaggaacaaatcgacggagcaattctccggtttaccatacatttacgctctcttaaactgcttgatctgcctttggtatggcacacctttcatatcacacagcaatgccatgcttatgactgtgaattccgttggagctacgtttcagctttgctacattatcctcttcatcatgcatacagacaagaagaacaagatgaagatgcttggtttgctttttgtggtgtttgctgtggttggagtgattgtagctggaagtttgcagatacctgaccagctcacacggtggtactttgtcgggttcttgagctgcggttctcttgtttcaatgtttgcctcgccgttgtttgttattaacctagtgattcggactaagagcgttgagtttatgccgttttatctctcgctatcgactttcttgatgagtgcttccttccttctttacgggttattcaacagcgatgcctttgtttatacaccaaatggaataggaacgattcttggcattgtgcagctggctttgtactgttactaccacaggaattctatagaagaagaaacaaaagagcctttgattgtttcttacgtgtgaggttcgcgcaaagaagcaaatttatagtggggaaattaaaagaaaccagaaaatgtggtgacatcaagattctttgttgttgttgttattgttgtctactctgtgtagctcattgtgactatctaccggctttcattctctcatggcgtgaagatgtttattctctctgcttctgtcatgatcgaaggatggaagtctttttcagttttgatggctcaattgctgaagattatgtgaagacacatgacagattcactggtgtacgtgggttttgtttttgtgtggtggaaatctcatggtgggtcgataacgtttgtccatatattgtttgttttttttgaagattactctatttttttgttcataagattttttttctttgatatggaaatctctggtgggttgatttgaagac

SEQ ID NO: 102174 - protein, 236 aa, Arabidopsis thaliana; identical to SEQ ID NO: 36395
  peptide (1)..(236): Ceres Seq. ID no. 13609588
  misc_feature (15)..(104): Pfam Name: MtN3/saliva family Pfam Description: MtN3/saliva family
  misc_feature (1)..(236): Homolog of NCBI NO: 18400517 NR Description: nodulin MtN3 family protein [Arabidopsis thaliana]
  misc_feature (17)..(190): Homolog of NCBI NO: 34911484 NR Description: putative MtN3 [Oryza sativa (japonica
  misc_feature (18)..(221): Homolog of NCBI NO: 34907420 NR Description: P0018C10.36 [Oryza sativa (japonica
  misc_feature (10)..(225): Homolog of NCBI NO: 18394992 NR Description: nodulin MtN3 family protein [Arabidopsis >gi|21594011|gb|AAM65929.1| unknown [Arabidopsis thaliana] unknown protein [Arabidopsis thaliana]
  misc_feature (14)..(234): Homolog of NCBI NO: 34912454 NR Description: P0681B11.31 [Oryza sativa (japonica
  misc_feature (18)..(218): Homolog of NCBI NO: 34146818 NR Description: At5g53190 [Arabidopsis thaliana]
  misc_feature (10)..(231): Homolog of NCBI NO: 15219732 NR Description: nodulin MtN3 family protein [Arabidopsis >gi|12597757|gb|AAG60070.1|AC013288_4 hypothetical protein
  misc_feature (14)..(228): Homolog of NCBI NO: 34912462 NR Description: MtN3-like protein [Oryza sativa (japonica
  misc_feature (8)..(236): Homolog of NCBI NO: 18413388 NR Description: nodulin MtN3 family protein [Arabidopsis >gi|21592843|gb|AAM64793.1| contains similarity to Medicago
  misc_feature (18)..(218): Homolog of NCBI NO: 15238678 NR Description: nodulin MtN3 family protein [Arabidopsis thaliana]

SEQ ID NO: 102175 - protein, 225 aa, Arabidopsis thaliana; identical to SEQ ID NO: 36396
  peptide (1)..(225): Ceres Seq. ID no. 13609589
  misc_feature (4)..(93): Pfam Name: MtN3/saliva family Pfam Description: MtN3/saliva family
  misc_feature (1)..(225): Homolog of NCBI NO: 18400517 NR Description: nodulin MtN3 family protein [Arabidopsis thaliana]
  misc_feature (6)..(179): Homolog of NCBI NO: 34911484 NR Description: putative MtN3 [Oryza sativa (japonica
  misc_feature (7)..(210): Homolog of NCBI NO: 34907420 NR Description: P0018C10.36 [Oryza sativa (japonica
  misc_feature (1)..(214): Homolog of NCBI NO: 18394992 NR Description: nodulin MtN3 family protein [Arabidopsis >gi|21594011|gb|AAM65929.1| unknown [Arabidopsis thaliana] unknown protein [Arabidopsis thaliana]
  misc_feature (3)..(223): Homolog of NCBI NO: 34912454 NR Description: P0681B11.31 [Oryza sativa (japonica
  misc_feature (7)..(207): Homolog of NCBI NO: 34146818 NR Description: At5g53190 [Arabidopsis thaliana]
  misc_feature (1)..(220): Homolog of NCBI NO: 15219732 NR Description: nodulin MtN3 family protein [Arabidopsis >gi|12597757|gb|AAG60070.1|AC013288_4 hypothetical protein
  misc_feature (3)..(217): Homolog of NCBI NO: 34912462 NR Description: MtN3-like protein [Oryza sativa (japonica
  misc_feature (1)..(225): Homolog of NCBI NO: 18413388 NR Description: nodulin MtN3 family protein [Arabidopsis >gi|21592843|gb|AAM64793.1| contains similarity to Medicago
  misc_feature (7)..(207): Homolog of NCBI NO: 15238678 NR Description: nodulin MtN3 family protein [Arabidopsis thaliana]

SEQ ID NO: 102176 - protein, 204 aa, Arabidopsis thaliana; identical to SEQ ID NO: 36397
  peptide (1)..(204): Ceres Seq. ID no. 13609590
  misc_feature (1)..(72): Pfam Name: MtN3/saliva family Pfam Description: MtN3/saliva family
  misc_feature (1)..(204): Homolog of NCBI NO: 18400517 NR Description: nodulin MtN3 family protein [Arabidopsis thaliana]
  misc_feature (1)..(158): Homolog of NCBI NO: 34911484 NR Description: putative MtN3 [Oryza sativa (japonica
  misc_feature (1)..(189): Homolog of NCBI NO: 34907420 NR Description: P0018C10.36 [Oryza sativa (japonica
  misc_feature (1)..(193): Homolog of NCBI NO: 18394992 NR Description: nodulin MtN3 family protein [Arabidopsis >gi|21594011|gb|AAM65929.1| unknown [Arabidopsis thaliana] unknown protein [Arabidopsis thaliana]
  misc_feature (1)..(202): Homolog of NCBI NO: 34912454 NR Description: P0681B11.31 [Oryza sativa (japonica
  misc_feature (1)..(186): Homolog of NCBI NO: 34146818 NR Description: At5g53190 [Arabidopsis thaliana]
  misc_feature (1)..(199): Homolog of NCBI NO: 15219732 NR Description: nodulin MtN3 family protein [Arabidopsis >gi|12597757|gb|AAG60070.1|AC013288_4 hypothetical protein
  misc_feature (1)..(196): Homolog of NCBI NO: 34912462 NR Description: MtN3-like protein [Oryza sativa (japonica
  misc_feature (1)..(204): Homolog of NCBI NO: 18413388 NR Description: nodulin MtN3 family protein [Arabidopsis >gi|21592843|gb|AAM64793.1| contains similarity to Medicago
  misc_feature (1)..(186): Homolog of NCBI NO: 15238678 NR Description: nodulin MtN3 family protein [Arabidopsis thaliana]

SEQ ID NO: 102177 - DNA, 1407 bp, Arabidopsis thaliana
  misc_feature (1)..(1407): Ceres Seq. ID no. 13609597
  misc_feature: MA Experiment ID: 108577 Result: Down-regulated in Transcription
  misc_feature: MA Experiment 108577 PARAMETER Experiment Name: At_42deg_Heat_cDNA_P Parameter: Temperature (deg C) Value: 42 vs. 22
  misc_feature: MA Experiment 108577 PARAMETER Experiment Name: At_42deg_Heat_cDNA_P Parameter: Timepoint (hr) Value: 6
  misc_feature: MA Experiment 108577 PARAMETER Experiment Name: At_42deg_Heat_cDNA_P Parameter: Tissue Value: Aerial
  misc_feature: MA Experiment ID: 108585 Result: Up-regulated in Transcription
  misc_feature: MA Experiment 108585 PARAMETER Experiment Name: At_5mM_NaNP_cDNA_P Parameter: Timepoint (hr) Value: 6
  misc_feature: MA Experiment 108585 PARAMETER Experiment Name: At_5mM_NaNP_cDNA_P Parameter: Tissue Value: Aerial
  misc_feature: MA Experiment 108585 PARAMETER Experiment Name: At_5mM_NaNP_cDNA_P Parameter: Treatment Value: null
  misc_feature: MA Experiment ID: 20000185 Result: Down-regulated in Transcription
  misc_feature: MA Experiment 20000185 PARAMETER Experiment Name: At_Roots__P Parameter: Age (day) Value: 7 vs. 21
  misc_feature: MA Experiment 20000185 PARAMETER Experiment Name: At_Roots__P Parameter: Organism Value: A. thaliana
  misc_feature: MA Experiment 20000185 PARAMETER Experiment Name: At_Roots__P Parameter: Tissue Value: Roots vs. Whole Plant
  misc_feature: MA Experiment ID: 20000437 Result: Down-regulated in Transcription
  misc_feature: MA Experiment 20000437 PARAMETER Experiment Name: At_Drought_P Parameter: Age (day) Value: 8
  misc_feature: MA Experiment 20000437 PARAMETER Experiment Name: At_Drought_P Parameter: Organism Value: A. thaliana
  misc_feature: MA Experiment 20000437 PARAMETER Experiment Name: At_Drought_P Parameter: Plant Line Value: WS
  misc_feature: MA Experiment 20000437 PARAMETER Experiment Name: At_Drought_P Parameter: Timepoint (hr) Value: 24
  misc_feature: MA Experiment 20000437 PARAMETER Experiment Name: At_Drought_P Parameter: Tissue Value: Whole Plant
  misc_feature: MA Experiment 20000437 PARAMETER Experiment Name: At_Drought_P Parameter: Treatment Value: Drought vs. No Drought
  misc_feature: MA Experiment ID: 20000439 Result: Down-regulated in Transcription
  misc_feature: MA Experiment 20000439 PARAMETER Experiment Name: At_Roots__P Parameter: Age (day) Value: 14 vs. 21
  misc_feature: MA Experiment 20000439 PARAMETER Experiment Name: At_Roots__P Parameter: Organism Value: A. thaliana
  misc_feature: MA Experiment 20000439 PARAMETER Experiment Name: At_Roots__P Parameter: Tissue Value: Roots vs. Whole Plant
  misc_feature: MA Experiment ID: 20000495 Result: Up-regulated in Transcription
  misc_feature: MA Experiment 20000495 PARAMETER Experiment Name: At_Guard_Cells_P Parameter: Harvest Date Value: 8/2/2002
  misc_feature: MA Experiment 20000495 PARAMETER Experiment Name: At_Guard_Cells_P Parameter: Organism Value: A. thaliana
  misc_feature: MA Experiment 20000495 PARAMETER Experiment Name: At_Guard_Cells_P Parameter: Tissue Value: Guard Cells vs. Leaves
  misc_feature: MA Experiment ID: 20000496 Result: Up-regulated in Transcription
  misc_feature: MA Experiment 20000496 PARAMETER Experiment Name: At_Guard_Cells_P Parameter: Harvest Date Value: 7/19/2002
  misc_feature: MA Experiment 20000496 PARAMETER Experiment Name: At_Guard_Cells_P Parameter: Organism Value: Canola
  misc_feature: MA Experiment 20000496 PARAMETER Experiment Name: At_Guard_Cells_P Parameter: Tissue Value: Guard Cells vs. Leaves
  misc_feature: MA Experiment ID: 20000574 Result: Down-regulated in Transcription
  misc_feature: MA Experiment 20000574 PARAMETER Experiment Name: At_100uM_ABA_Mutants__P Parameter: Organism Value: A. thaliana
  misc_feature: MA Experiment 20000574 PARAMETER Experiment Name: At_100uM_ABA_Mutants__P Parameter: Plant Line Value: CS23 vs. Ler wt
  misc_feature: MA Experiment 20000574 PARAMETER Experiment Name: At_100uM_ABA_Mutants__P Parameter: Timepoint (hr) Value: N/A
  misc_feature: MA Experiment 20000574 PARAMETER Experiment Name: At_100uM_ABA_Mutants__P Parameter: Tissue Value: Whole Plant
  misc_feature: MA Experiment 20000574 PARAMETER Experiment Name: At_100uM_ABA_Mutants__P Parameter: Treatment Value: None
  misc_feature: MA Experiment ID: 20001557 Result: Up-regulated in Transcription
  misc_feature: MA Experiment 20001557 PARAMETER Experiment Name: At_Drought_Soil_Dry_P Parameter: Age (day) Value: 27
  misc_feature: MA Experiment 20001557 PARAMETER Experiment Name: At_Drought_Soil_Dry_P Parameter: Organism Value: A. thaliana
  misc_feature: MA Experiment 20001557 PARAMETER Experiment Name: At_Drought_Soil_Dry_P Parameter: Plant Line Value: WS
  misc_feature: MA Experiment 20001557 PARAMETER Experiment Name: At_Drought_Soil_Dry_P Parameter: Post Timepoint (hr) Value: 3
  misc_feature: MA Experiment 20001557 PARAMETER Experiment Name: At_Drought_Soil_Dry_P Parameter: Post-Treatment Value: Re-Water vs. No Drought
  misc_feature: MA Experiment 20001557 PARAMETER Experiment Name: At_Drought_Soil_Dry_P Parameter: Timepoint (day) Value: 13
  misc_feature: MA Experiment 20001557 PARAMETER Experiment Name: At_Drought_Soil_Dry_P Parameter: Treatment Value: Drought vs. No Drought
  misc_feature: MA Experiment ID: 20001904 Result: Down-regulated in Transcription
  misc_feature: MA Experiment 20001904 PARAMETER Experiment Name: At_Drought_Reproduction_P Parameter: Age (day) Value: 37
  misc_feature: MA Experiment 20001904 PARAMETER Experiment Name: At_Drought_Reproduction_P Parameter: Organism Value: A. thaliana
  misc_feature: MA Experiment 20001904 PARAMETER Experiment Name: At_Drought_Reproduction_P Parameter: Plant Line Value: WS
  misc_feature: MA Experiment 20001904 PARAMETER Experiment Name: At_Drought_Reproduction_P Parameter: Timepoint (day) Value: 7
  misc_feature: MA Experiment 20001904 PARAMETER Experiment Name: At_Drought_Reproduction_P Parameter: Tissue Value: Rosettes
  misc_feature: MA Experiment 20001904 PARAMETER Experiment Name: At_Drought_Reproduction_P Parameter: Treatment Value: Drought vs. No Drought
  misc_feature: MA Experiment ID: 20001905 Result: Down-regulated in Transcription
  misc_feature: MA Experiment 20001905 PARAMETER Experiment Name: At_Drought_Reproduction_P Parameter: Age (day) Value: 40
  misc_feature: MA Experiment 20001905 PARAMETER Experiment Name: At_Drought_Reproduction_P Parameter: Organism Value: A. thaliana
  misc_feature: MA Experiment 20001905 PARAMETER Experiment Name: At_Drought_Reproduction_P Parameter: Plant Line Value: WS
  misc_feature: MA Experiment 20001905 PARAMETER Experiment Name: At_Drought_Reproduction_P Parameter: Timepoint (day) Value: 10
  misc_feature: MA Experiment 20001905 PARAMETER Experiment Name: At_Drought_Reproduction_P Parameter: Tissue Value: Rosettes
  misc_feature: MA Experiment 20001905 PARAMETER Experiment Name: At_Drought_Reproduction_P Parameter: Treatment Value: Drought vs. No Drought
  misc_feature: MA Experiment ID: 20001911 Result: Down-regulated in Transcription
  misc_feature: MA Experiment 20001911 PARAMETER Experiment Name: At_Drought_Reproduction_P Parameter: Age (day) Value: 40
  misc_feature: MA Experiment 20001911 PARAMETER Experiment Name: At_Drought_Reproduction_P Parameter: Organism Value: A. thaliana
  misc_feature: MA Experiment 20001911 PARAMETER Experiment Name: At_Drought_Reproduction_P Parameter: Plant Line Value: WS
  misc_feature: MA Experiment 20001911 PARAMETER Experiment Name: At_Drought_Reproduction_P Parameter: Timepoint (day) Value: 10
  misc_feature: MA Experiment 20001911 PARAMETER Experiment Name: At_Drought_Reproduction_P Parameter: Tissue Value: Flowers
  misc_feature: MA Experiment 20001911 PARAMETER Experiment Name: At_Drought_Reproduction_P Parameter: Treatment Value: Drought vs. No Drought
aattccttcctttgccccatttttattttcttcttcatccataataacttcactctctcccccccccccccccccaacatgttcctgtgacgacgatacactctttcactgacttacccctacctcaaaatcaccttcttcttcatcgtctcagctcaggaattgctaactacctgtttttgaatttgagatctgtttttgtttctagaagaaaacagcttgttttcaccgtctctgatcctctgatttgatcggaatctaatgggtaaaaccaccgggaacagagattggactcagatctacgctatttacggaatcgaacaatggcagacactcgtcttccttctcttccatgctttcttcttctctcttctctctcttctcttcctcatctacttcgatcagatttgcttcttcctcgattccttcttcctctccggcgccgccagattagccgcgggtttcaccggtgctgtaaccgctctctccgcggtttgtctactcttcgccgcagctaatttcgtttactcagatgttccgcttcagtacgagatggctcaacgcatggttagctccgtcggtgactggtcttgtgtcaaaactgctctcgatctcggttgtggccgtggtatcctcctcaatgccgtcgctacacagcttaagaaaaccggtagctccggtcgggtcgtcgggttagaccgctctaaacgcaccactctctccactctccgcaccgctaaactcgaaggtgtgcaagagtatgtgacatgccgtgaaggagatgtgaagacgttgccgtttggcgataattacttcgacgtggtggtctcgtcggtgttcgttcacacggtggggaaagagcatggtcagaagtcggtggaagctgcggcggagagaatgagagtgctcggagagattgtgagagttgtgaagccaggaggtttgtgtgtggtttgggatctcttacacgtgccggagtacgtgcgtcgtcttcaagagctaaagatggaagatatacgagtctcggagcgagtcacggcgtttatggccggaagtcacatcgtttcgttccggaaacccagtgaactcgtcgccgggccccgtgaagtccgcctcgattggagatgatgacgtggtgttcaaaacgacagtgatgtgtgtcggttcgttatataaaaaacggcacgtagttgaagaagtctggaggttcgacactataattgtaatatattaattacgaatctactactactacactagaaaatcaaaatgtatgtggcgtctggggaggcgaagcggaaccagatgctttgatgaagaggcataacgctgcgtttgcgtttttgtcttgtatttgtataacctatagtttttattaacatattaagctgaatcttaatatgtgat

SEQ ID NO: 102178 - protein, 288 aa, Arabidopsis thaliana; identical to SEQ ID NO: 29768
  peptide (1)..(288): Ceres Seq. ID no. 13609598
  misc_feature (1)..(288): Homolog of NCBI NO: 18400797 NR Description: expressed protein [Arabidopsis thaliana] expressed protein [Arabidopsis thaliana] unknown protein [Arabidopsis thaliana]
  misc_feature (1)..(288): Homolog of NCBI NO: 15239632 NR Description: expressed protein [Arabidopsis thaliana] gb|AAF35419.1~gene_id:F24B18.2~strong similarity to unknown
  misc_feature (64)..(273): Homolog of NCBI NO: 22971588 NR Description: hypothetical protein [Chloroflexus aurantiacus]

SEQ ID NO: 102179 - protein, 191 aa, Arabidopsis thaliana; identical to SEQ ID NO: 29769
  peptide (1)..(191): Ceres Seq. ID no. 13609599
  misc_feature (1)..(191): Homolog of NCBI NO: 18400797 NR Description: expressed protein [Arabidopsis thaliana] expressed protein [Arabidopsis thaliana] unknown protein [Arabidopsis thaliana]
  misc_feature (1)..(191): Homolog of NCBI NO: 15239632 NR Description: expressed protein [Arabidopsis thaliana] gb|AAF35419.1~gene_id:F24B18.2~strong similarity to unknown
  misc_feature (1)..(176): Homolog of NCBI NO: 22971588 NR Description: hypothetical protein [Chloroflexus aurantiacus]

SEQ ID NO: 102180 - protein, 187 aa, Arabidopsis thaliana; identical to SEQ ID NO: 29770
  peptide (1)..(187): Ceres Seq. ID no. 13609600
  misc_feature (1)..(187): Homolog of NCBI NO: 18400797 NR Description: expressed protein [Arabidopsis thaliana] expressed protein [Arabidopsis thaliana] unknown protein [Arabidopsis thaliana]
  misc_feature (1)..(187): Homolog of NCBI NO: 15239632 NR Description: expressed protein [Arabidopsis thaliana] gb|AAF35419.1~gene_id:F24B18.2~strong similarity to unknown
  misc_feature (1)..(172): Homolog of NCBI NO: 22971588 NR Description: hypothetical protein [Chloroflexus aurantiacus]

SEQ ID NO: 102181 - DNA, 879 bp, Arabidopsis thaliana
  misc_feature (1)..(879): Ceres Seq. ID no. 13609601
  misc_feature: MA Experiment ID: 108595 Result: Down-regulated in Transcription
  misc_feature: MA Experiment 108595 PARAMETER Experiment Name: At_Ler-pi_Ovule_cDNA_P Parameter: Plant Line Value: null
  misc_feature: MA Experiment ID: 20000072 Result: Down-regulated in Transcription
  misc_feature: MA Experiment 20000072 PARAMETER Experiment Name: At_100uM_ABA_Mutants_cDNA_P Parameter: Plant Line Value: CS8105
  misc_feature: MA Experiment 20000072 PARAMETER Experiment Name: At_100uM_ABA_Mutants_cDNA_P Parameter: Timepoint (hr) Value: 6
  misc_feature: MA Experiment 20000072 PARAMETER Experiment Name: At_100uM_ABA_Mutants_cDNA_P Parameter: Tissue Value: Aerial
  misc_feature: MA Experiment 20000072 PARAMETER Experiment Name: At_100uM_ABA_Mutants_cDNA_P Parameter: Treatment Value: 100uM ABA vs. No Treatment
  misc_feature: MA Experiment ID: 20000117 Result: Down-regulated in Transcription
  misc_feature: MA Experiment 20000117 PARAMETER Experiment Name: At_100uM_ABA_Mutants_cDNA_P Parameter: Plant Line Value: Columbia
  misc_feature: MA Experiment 20000117 PARAMETER Experiment Name: At_100uM_ABA_Mutants_cDNA_P Parameter: Timepoint (hr) Value: 6
  misc_feature: MA Experiment 20000117 PARAMETER Experiment Name: At_100uM_ABA_Mutants_cDNA_P Parameter: Tissue Value: Aerial
  misc_feature: MA Experiment 20000117 PARAMETER Experiment Name: At_100uM_ABA_Mutants_cDNA_P Parameter: Treatment Value: 100uM ABA vs. No Treatment
  misc_feature: MA Experiment ID: 20000180 Result: Up-regulated in Transcription
  misc_feature: MA Experiment 20000180 PARAMETER Experiment Name: At_Germinating_Seeds_P Parameter: Age (hr) Value: 24 vs. 0
  misc_feature: MA Experiment 20000180 PARAMETER Experiment Name: At_Germinating_Seeds_P Parameter: Tissue Value: Germinating Seeds
  misc_feature: MA Experiment ID: 20000185 Result: Down-regulated in Transcription
  misc_feature: MA Experiment 20000185 PARAMETER Experiment Name: At_Roots__P Parameter: Age (day) Value: 7 vs. 21
  misc_feature: MA Experiment 20000185 PARAMETER Experiment Name: At_Roots__P Parameter: Organism Value: A. thaliana
  misc_feature: MA Experiment 20000185 PARAMETER Experiment Name: At_Roots__P Parameter: Tissue Value: Roots vs. Whole Plant
  misc_feature: MA Experiment ID: 20000794 Result: Down-regulated in Transcription
  misc_feature: MA Experiment 20000794 PARAMETER Experiment Name: At_Petals_P Parameter: Age (day) Value: 23-25 days
  misc_feature: MA Experiment 20000794 PARAMETER Experiment Name: At_Petals_P Parameter: Plant Line Value: WS
  misc_feature: MA Experiment 20000794 PARAMETER Experiment Name: At_Petals_P Parameter: Tissue Value: Petals vs. Whole plant
  misc_feature: MA Experiment ID: 20001247 Result: Up-regulated in Transcription
  misc_feature: MA Experiment 20001247 PARAMETER Experiment Name: At_Far-red-induction_P Parameter: Age (day) Value: 7
  misc_feature: MA Experiment 20001247 PARAMETER Experiment Name: At_Far-red-induction_P Parameter: Light Value: Far-red vs. White
  misc_feature: MA Experiment 20001247 PARAMETER Experiment Name: At_Far-red-induction_P Parameter: Organism Value: A. thaliana
  misc_feature: MA Experiment 20001247 PARAMETER Experiment Name: At_Far-red-induction_P Parameter: Plant Line Value: Columbia
  misc_feature: MA Experiment 20001247 PARAMETER Experiment Name: At_Far-red-induction_P Parameter: Timepoint (hr) Value: 1
  misc_feature: MA Experiment 20001247 PARAMETER Experiment Name: At_Far-red-induction_P Parameter: Tissue Value: Whole Plant
  misc_feature: MA Experiment ID: 20001451 Result: Down-regulated in Transcription
  misc_feature: MA Experiment 20001451 PARAMETER Experiment Name: At_Far-red-induction_P Parameter: Age (day) Value: 7
  misc_feature: MA Experiment 20001451 PARAMETER Experiment Name: At_Far-red-induction_P Parameter: Light Value: Far-red vs. White
  misc_feature: MA Experiment 20001451 PARAMETER Experiment Name: At_Far-red-induction_P Parameter: Organism Value: A. thaliana
  misc_feature: MA Experiment 20001451 PARAMETER Experiment Name: At_Far-red-induction_P Parameter: Plant Line Value: Columbia
  misc_feature: MA Experiment 20001451 PARAMETER Experiment Name: At_Far-red-induction_P Parameter: Timepoint (hr) Value: 24
  misc_feature: MA Experiment 20001451 PARAMETER Experiment Name: At_Far-red-induction_P Parameter: Tissue Value: Whole Plant
  misc_feature: MA Experiment ID: 20001905 Result: Down-regulated in Transcription
  misc_feature: MA Experiment 20001905 PARAMETER Experiment Name: At_Drought_Reproduction_P Parameter: Age (day) Value: 40
  misc_feature: MA Experiment 20001905 PARAMETER Experiment Name: At_Drought_Reproduction_P Parameter: Organism Value: A. thaliana
  misc_feature: MA Experiment 20001905 PARAMETER Experiment Name: At_Drought_Reproduction_P Parameter: Plant Line Value: WS
  misc_feature: MA Experiment 20001905 PARAMETER Experiment Name: At_Drought_Reproduction_P Parameter: Timepoint (day) Value: 10
  misc_feature: MA Experiment 20001905 PARAMETER Experiment Name: At_Drought_Reproduction_P Parameter: Tissue Value: Rosettes
  misc_feature: MA Experiment 20001905 PARAMETER Experiment Name: At_Drought_Reproduction_P Parameter: Treatment Value: Drought vs. No Drought
  misc_feature: MA Experiment ID: 20001911 Result: Down-regulated in Transcription
  misc_feature: MA Experiment 20001911 PARAMETER Experiment Name: At_Drought_Reproduction_P Parameter: Age (day) Value: 40
  misc_feature: MA Experiment 20001911 PARAMETER Experiment Name: At_Drought_Reproduction_P Parameter: Organism Value: A. thaliana
  misc_feature: MA Experiment 20001911 PARAMETER Experiment Name: At_Drought_Reproduction_P Parameter: Plant Line Value: WS
  misc_feature: MA Experiment 20001911 PARAMETER Experiment Name: At_Drought_Reproduction_P Parameter: Timepoint (day) Value: 10
  misc_feature: MA Experiment 20001911 PARAMETER Experiment Name: At_Drought_Reproduction_P Parameter: Tissue Value: Flowers
  misc_feature: MA Experiment 20001911 PARAMETER Experiment Name: At_Drought_Reproduction_P Parameter: Treatment Value: Drought vs. No Drought
gtctctttgacttcatcgtcgattaagggagaaagagagagagagtgagagctgagaaaatcaccagaaagctacttgagagagagagatagagataagtgagctctgagaaaatccagcaatggcttcgaagcttgtagtgataattgtgtttatcctcgatctcatcgccgttgggttagccattgccgccgagcagagaagaagtgtcggcaaggttgaaacagacagagacaagcaatatgattactgtgtgtatggtactgacattgctacaagttatggagctggtgcatttgttcttctctttgtaagccaagtccttattatggctgctagtcgttgcttctgttgtggaaagtctcttaaccctggcggttcaagagcttgtgccattattctcttcctcatttgctgggtgtttttcttgatcgctgagatgtgtttgcttgcggcatcaatcagaaatgcgtaccacacacagtatagaaagatgtggaaagttgaagatccaccaagctgtgaagttataaggaaaggagtttttgcagctggtgctgcattcacactcttcaccgccattgtctctcagttctactacgtttgctactctcgtgctagagatgcgtaccagaatccctcctactaaaaatgtcaacttccacagcaagcaaacgtttaagcatcaagagttggaatttgtctttttgtgtttgtttagtattgtccagtgtttagttatcctatcaggatgtttaggttttatgttgtctcttaagcaaacactgatatgttatattctaagattcgtatattgttatgttctctgttgtaatgtgtgaatgaatactaaagaatagaaaaccatgatttgttgtg

SEQ ID NO: 102182 - protein, 175 aa, Arabidopsis thaliana; identical to SEQ ID NO: 35281
  peptide (1)..(175): Ceres Seq. ID no. 13609602
  misc_feature (1)..(175): Homolog of NCBI NO: 18400781 NR Description: expressed protein [Arabidopsis thaliana] unknown protein [Arabidopsis thaliana] gb|AAF30339.1~gene_id:MJK13.14~similar to unknown protein
  misc_feature (1)..(175): Homolog of NCBI NO: 18404242 NR Description: expressed protein [Arabidopsis thaliana]
  misc_feature (1)..(168): Homolog of NCBI NO: 38016521 NR Description: fiber protein Fb34 [Gossypium barbadense]
  misc_feature (1)..(175): Homolog of NCBI NO: 34394069 NR Description: unknown protein [Oryza sativa (japonica
  misc_feature (1)..(173): Homolog of NCBI NO: 18416991 NR Description: expressed protein [Arabidopsis thaliana] At4g27438 [Arabidopsis thaliana]
  misc_feature (1)..(174): Homolog of NCBI NO: 18407003 NR Description: expressed protein [Arabidopsis thaliana] unknown protein [Arabidopsis thaliana]
  misc_feature (1)..(174): Homolog of NCBI NO: 21554630 NR Description: unknown [Arabidopsis thaliana]
  misc_feature (3)..(170): Homolog of NCBI NO: 22748411 NR Description: hypothetical protein [Oryza sativa (japonica
  misc_feature (1)..(173): Homolog of NCBI NO: 38344206 NR Description: OSJNBa0064G10.22 [Oryza sativa (japonica
  misc_feature (2)..(166): Homolog of NCBI NO: 18391509 NR Description: expressed protein [Arabidopsis thaliana] Unknown Protein [Arabidopsis thaliana] unknown [Arabidopsis thaliana] >gi|22531211|gb|AAM97109.1|

SEQ ID NO: 102183 - protein, 106 aa, Arabidopsis thaliana; identical to SEQ ID NO: 35282
  peptide (1)..(106): Ceres Seq. ID no. 13609603
  misc_feature (1)..(106): Homolog of NCBI NO: 18400781 NR Description: expressed protein [Arabidopsis thaliana] unknown protein [Arabidopsis thaliana] gb|AAF30339.1~gene_id:MJK13.14~similar to unknown protein
  misc_feature (1)..(106): Homolog of NCBI NO: 18404242 NR Description: expressed protein [Arabidopsis thaliana]
  misc_feature (1)..(99): Homolog of NCBI NO: 38016521 NR Description: fiber protein Fb34 [Gossypium barbadense]
  misc_feature (1)..(106): Homolog of NCBI NO: 34394069 NR Description: unknown protein [Oryza sativa (japonica
  misc_feature (1)..(104): Homolog of NCBI NO: 18416991 NR Description: expressed protein [Arabidopsis thaliana] At4g27438 [Arabidopsis thaliana]
  misc_feature (1)..(105): Homolog of NCBI NO: 18407003 NR Description: expressed protein [Arabidopsis thaliana] unknown protein [Arabidopsis thaliana]
  misc_feature (1)..(105): Homolog of NCBI NO: 21554630 NR Description: unknown [Arabidopsis thaliana]
  misc_feature (1)..(101): Homolog of NCBI NO: 22748411 NR Description: hypothetical protein [Oryza sativa (japonica
  misc_feature (1)..(104): Homolog of NCBI NO: 38344206 NR Description: OSJNBa0064G10.22 [Oryza sativa (japonica
  misc_feature (1)..(97): Homolog of NCBI NO: 18391509 NR Description: expressed protein [Arabidopsis thaliana] Unknown Protein [Arabidopsis thaliana] unknown [Arabidopsis thaliana] >gi|22531211|gb|AAM97109.1|

SEQ ID NO: 102184 - DNA, 1068 bp, Arabidopsis thaliana
  misc_feature (1)..(1068): Ceres Seq. ID no. 13609604
  misc_feature: MA Experiment ID: 108434 Result: Up-regulated in Transcription
  misc_feature: MA Experiment 108434 PARAMETER Experiment Name: At_Root_Tips_cDNA_P Parameter: Tissue Value: Root Tips
  misc_feature: MA Experiment ID: 108463 Result: Down-regulated in Transcription
  misc_feature: MA Experiment 108463 PARAMETER Experiment Name: At_Germinating_Seeds_cDNA_P Parameter: Age (day) Value: 3 vs. 0
  misc_feature: MA Experiment 108463 PARAMETER Experiment Name: At_Germinating_Seeds_cDNA_P Parameter: Tissue Value: Germinating Seeds
  misc_feature: MA Experiment ID: 20000184 Result: Up-regulated in Transcription
  misc_feature: MA Experiment 20000184 PARAMETER Experiment Name: At_Shoots__P Parameter: Age (day) Value: 7
  misc_feature: MA Experiment 20000184 PARAMETER Experiment Name: At_Shoots__P Parameter: Tissue Value: Shoots vs. Whole Plant
  misc_feature: MA Experiment ID: 20001911 Result: Down-regulated in Transcription
  misc_feature: MA Experiment 20001911 PARAMETER Experiment Name: At_Drought_Reproduction_P Parameter: Age (day) Value: 40
  misc_feature: MA Experiment 20001911 PARAMETER Experiment Name: At_Drought_Reproduction_P Parameter: Organism Value: A. thaliana
  misc_feature: MA Experiment 20001911 PARAMETER Experiment Name: At_Drought_Reproduction_P Parameter: Plant Line Value: WS
  misc_feature: MA Experiment 20001911 PARAMETER Experiment Name: At_Drought_Reproduction_P Parameter: Timepoint (day) Value: 10
  misc_feature: MA Experiment 20001911 PARAMETER Experiment Name: At_Drought_Reproduction_P Parameter: Tissue Value: Flowers
  misc_feature: MA Experiment 20001911 PARAMETER Experiment Name: At_Drought_Reproduction_P Parameter: Treatment Value: Drought vs. No Drought
aattctaaattaagaatctctctaatctcttcccaaagaagaatcatcactgaggaagaataaaacatttggggagtttcttcgctaatccttcaaggtgtgacctgagaatcacaacacaaaacaatctcactcgaaattcctttgactcatcatcatcaccatgtggagaagaatcgtctcctctcagctcaaaaccctagccgccgatgtcgtcgctgcttctcctcgtcgatcgatagccgccaccaccagacctgtcggtttctatctcgccgccaatcgatcagccatttccgcatcttctttcgttatccctcgtcgtttcagctccgattcagtagagactcctgcgacgaagaaggtggaggatgtaatgcccattgcgactggacacgagaaggaagagcttgaagctgaacttgagggaaggaggctggatgatattgacttccctgaaggtccttttggaactaaggaagctcctgctattgtgaagtcctactatgacaagcgaattgtgggctgccctggtggtgaaggcgaggacgagcacgatgttgtctggttctggctggagaaaggaaagtcctttgaatgcccggtttgcactcagtactttgagctggaagtggttggtcctggtggtcctccggatggtcacggtgacgaagacgatgagcaccaccactgattccggcctctcccttgccgcaaatttttctttttttatttgcacattttcatatctttaaaaattttatgaatggaataaaacaaaatatctaccgttttggtgaaacacagttgaaaatgttttttgatctttttagaacaagactcggcatcagagtttcccaagtgccaaaactcttatgaccgttgtttttatttttgtaacactcttgaatcagaatcagaatcattcttggcttttgcttattatatgattcaccttttatttatttttatggttcgatgtcttttcatatagggacgttttgatcgtgtccttgattccttgtgaacggtcatataattcaatagattatagaaattccaattttc

SEQ ID NO: 102185 - protein, 176 aa, Arabidopsis thaliana; identical to SEQ ID NO: 22693
  peptide (1)..(176): Ceres Seq. ID no. 13609605
  misc_feature (66)..(161): Pfam Name: Cytochrome c oxidase subunit Vb Pfam Description: Cytochrome c oxidase subunit Vb
  misc_feature (1)..(176): Homolog of NCBI NO: 15232644 NR Description: cytochrome c oxidase subunit Vb -related thaliana] >gi|11994336|dbj|BAB02295.1| cytochrome c oxidase
  misc_feature (1)..(175): Homolog of NCBI NO: 21592567 NR Description: cytochrome c oxidase subunit, putative
  misc_feature (1)..(175): Homolog of NCBI NO: 15220092 NR Description: cytochrome c oxidase subunit -related
  misc_feature (38)..(176): Homolog of NCBI NO: 5803264 NR Description: ESTs AU057456(S21460),AU057455(S21460) correspond a region of the predicted gene.~Similar to cytochrome c oxidase
  misc_feature (1)..(176): Homolog of NCBI NO: 34912592 NR Description: cytochrome c oxidase subunit Vb precursor [Oryza
  misc_feature (128)..(175): Homolog of NCBI NO: 5903035 NR Description: Similar to gb|D85381 cytochrome c oxidase subunit precursor from Oryza sativa. ESTs gb|R30504 and gb|AA598195 come
  misc_feature (1)..(114): Homolog of NCBI NO: 7484634 NR Description: probable cytochrome-c oxidase (EC 1.9.3.1) Vb
  misc_feature (75)..(155): Homolog of NCBI NO: 223590 NR Description: oxidase IV,cytochrome
  misc_feature (75)..(155): Homolog of NCBI NO: 117102 NR Description: CYTOCHROME C OXIDASE POLYPEPTIDE VB (VI)
  misc_feature (75)..(155): Homolog of NCBI NO: 17017988 NR Description: cytochrome c oxidase subunit Vb precursor; c oxidase polypeptide VB, mitochondrial precursor [Homo sapiens] Cytochrome c oxidase polypeptide cytochrome c oxidase subunit Vb

SEQ ID NO: 102186 - protein, 105 aa, Arabidopsis thaliana; identical to SEQ ID NO: 22694
  peptide (1)..(105): Ceres Seq. ID no. 13609606
  misc_feature (1)..(90): Pfam Name: Cytochrome c oxidase subunit Vb Pfam Description: Cytochrome c oxidase subunit Vb
  misc_feature (1)..(105): Homolog of NCBI NO: 15232644 NR Description: cytochrome c oxidase subunit Vb -related thaliana] >gi|11994336|dbj|BAB02295.1| cytochrome c oxidase
  misc_feature (1)..(104): Homolog of NCBI NO: 21592567 NR Description: cytochrome c oxidase subunit, putative
  misc_feature (1)..(104): Homolog of NCBI NO: 15220092 NR Description: cytochrome c oxidase subunit -related
  misc_feature (1)..(105): Homolog of NCBI NO: 5803264 NR Description: ESTs AU057456(S21460),AU057455(S21460) correspond a region of the predicted gene.~Similar to cytochrome c oxidase
  misc_feature (1)..(105): Homolog of NCBI NO: 34912592 NR Description: cytochrome c oxidase subunit Vb precursor [Oryza
  misc_feature (57)..(104): Homolog of NCBI NO: 5903035 NR Description: Similar to gb|D85381 cytochrome c oxidase subunit precursor from Oryza sativa. ESTs gb|R30504 and gb|AA598195 come
  misc_feature (1)..(43): Homolog of NCBI NO: 7484634 NR Description: probable cytochrome-c oxidase (EC 1.9.3.1) Vb
  misc_feature (4)..(84): Homolog of NCBI NO: 223590 NR Description: oxidase IV,cytochrome
  misc_feature (4)..(84): Homolog of NCBI NO: 117102 NR Description: CYTOCHROME C OXIDASE POLYPEPTIDE VB (VI)
  misc_feature (4)..(84): Homolog of NCBI NO: 17017988 NR Description: cytochrome c oxidase subunit Vb precursor; c oxidase polypeptide VB, mitochondrial precursor [Homo sapiens] Cytochrome c oxidase polypeptide cytochrome c oxidase subunit Vb

SEQ ID NO: 102187 - DNA, 1169 bp, Arabidopsis thaliana
  misc_feature (1)..(1169): Ceres Seq. ID no. 13609620
  misc_feature: MA Experiment ID: 108573 Result: Up-regulated in Transcription
  misc_feature: MA Experiment 108573 PARAMETER Experiment Name: At_Drought_cDNA_P Parameter: Timepoint (hr) Value: 6
  misc_feature: MA Experiment 108573 PARAMETER Experiment Name: At_Drought_cDNA_P Parameter: Tissue Value: Aerial
  misc_feature: MA Experiment 108573 PARAMETER Experiment Name: At_Drought_cDNA_P Parameter: Treatment Value: Drought vs. No Drought
  misc_feature: MA Experiment ID: 108595 Result: Down-regulated in Transcription
  misc_feature: MA Experiment 108595 PARAMETER Experiment Name: At_Ler-pi_Ovule_cDNA_P Parameter: Plant Line Value: null
  misc_feature: MA Experiment ID: 20000069 Result: Down-regulated in Transcription
  misc_feature: MA Experiment 20000069 PARAMETER Experiment Name: At_100uM_ABA_Mutants_cDNA_P Parameter: Plant Line Value: CS23
  misc_feature: MA Experiment 20000069 PARAMETER Experiment Name: At_100uM_ABA_Mutants_cDNA_P Parameter: Timepoint (hr) Value: 6
  misc_feature: MA Experiment 20000069 PARAMETER Experiment Name: At_100uM_ABA_Mutants_cDNA_P Parameter: Tissue Value: Aerial
  misc_feature: MA Experiment 20000069 PARAMETER Experiment Name: At_100uM_ABA_Mutants_cDNA_P Parameter: Treatment Value: 100uM ABA vs. No Treatment
  misc_feature: MA Experiment ID: 20000087 Result: Down-regulated in Transcription
  misc_feature: MA Experiment 20000087 PARAMETER Experiment Name: At_100uM_ABA_Mutants_cDNA_P Parameter: Plant Line Value: WS
  misc_feature: MA Experiment 20000087 PARAMETER Experiment Name: At_100uM_ABA_Mutants_cDNA_P Parameter: Timepoint (hr) Value: 6
  misc_feature: MA Experiment 20000087 PARAMETER Experiment Name: At_100uM_ABA_Mutants_cDNA_P Parameter: Tissue Value: Aerial
  misc_feature: MA Experiment 20000087 PARAMETER Experiment Name: At_100uM_ABA_Mutants_cDNA_P Parameter: Treatment Value: 100uM ABA vs. No Treatment
  misc_feature: MA Experiment ID: 20000180 Result: Up-regulated in Transcription
  misc_feature: MA Experiment 20000180 PARAMETER Experiment Name: At_Germinating_Seeds_P Parameter: Age (hr) Value: 24 vs. 0
  misc_feature: MA Experiment 20000180 PARAMETER Experiment Name: At_Germinating_Seeds_P Parameter: Tissue Value: Germinating Seeds
  misc_feature: MA Experiment ID: 20000185 Result: Down-regulated in Transcription
  misc_feature: MA Experiment 20000185 PARAMETER Experiment Name: At_Roots__P Parameter: Age (day) Value: 7 vs. 21
  misc_feature: MA Experiment 20000185 PARAMETER Experiment Name: At_Roots__P Parameter: Organism Value: A. thaliana
  misc_feature: MA Experiment 20000185 PARAMETER Experiment Name: At_Roots__P Parameter: Tissue Value: Roots vs. Whole Plant
  misc_feature: MA Experiment ID: 20000439 Result: Down-regulated in Transcription
  misc_feature: MA Experiment 20000439 PARAMETER Experiment Name: At_Roots__P Parameter: Age (day) Value: 14 vs. 21
  misc_feature: MA Experiment 20000439 PARAMETER Experiment Name: At_Roots__P Parameter: Organism Value: A. thaliana
  misc_feature: MA Experiment 20000439 PARAMETER Experiment Name: At_Roots__P Parameter: Tissue Value: Roots vs. Whole Plant
  misc_feature: MA Experiment ID: 20001451 Result: Down-regulated in Transcription
  misc_feature: MA Experiment 20001451 PARAMETER Experiment Name: At_Far-red-induction_P Parameter: Age (day) Value: 7
  misc_feature: MA Experiment 20001451 PARAMETER Experiment Name: At_Far-red-induction_P Parameter: Light Value: Far-red vs. White
  misc_feature: MA Experiment 20001451 PARAMETER Experiment Name: At_Far-red-induction_P Parameter: Organism Value: A. thaliana
  misc_feature: MA Experiment 20001451 PARAMETER Experiment Name: At_Far-red-induction_P Parameter: Plant Line Value: Columbia
  misc_feature: MA Experiment 20001451 PARAMETER Experiment Name: At_Far-red-induction_P Parameter: Timepoint (hr) Value: 24
  misc_feature: MA Experiment 20001451 PARAMETER Experiment Name: At_Far-red-induction_P Parameter: Tissue Value: Whole Plant
aagaacaacagaaaatttcaaaatggtttctcagataatctcgtgtttatctcaatcttcgtctcttctatgtttatccgattcaaggaggttaattcttccgaagacttgtacttacggcggtttgagccggttttctccaggatttgctagccgccggttatttacggttaatcggaagaaatggagatcggcctgcattttcaactctggaaaggaacctggaggagagggaaagttacaaggaggtagctcagagtggccgatacttcagagatgggaagttccatggggatggcagacagtttcgttaacttcgtttgcttgtgcactaagttttgttttgacaggattaaccgagatggcagtcataccgtttttaggaatcgacgttgagaaactgaccttggacgataaggcggagattttgttcctggatcaaggcctaacaaccgcggtggtacttgctgtcatattcactgttgccaaaaccttcgacccacttcctgaagatattcttcgctatgatttgagacaacccgtcaacctgcaaaaaggatggcttgtgtggggtggaatcggtctggttggtgctgttggtgctattgcgttaacaggtgttgttttatccgtgttcaggacagaagcacctgaaagggaggtagactctttgatgaagcttcttccattaattggatcctcaaacataagcaccttaagcttagtgggcataactggaatccttgctccacttctggaggagaccgtgtttcgcggattcttcatggtctctcttaccaaatgggtcccgaccccaatagcgatcatcatcagctcagctgcgtttgcccttgcccatttcacacctggtgaattcccgcagctgtttattctaggaagtgttttgggattatcatatgcacaaacccgcaatctcattaccccaatggtcatacacggtttctggaactcgggagttattttgctactcacttttcttcagatccaagggtatgacattaaggagctattgcaggcaaactagctctgagccatgctctttgtgctgtccgcatttaacatcaaaaagcttcattatgtgctcgatgttagtaagatattttgtattcgagaacagatttcatacttaatgcaatttgggttttggt

SEQ ID NO: 102188 - protein, 347 aa, Arabidopsis thaliana
  peptide (1)..(347): Ceres Seq. ID no. 13609621
  misc_feature (241)..(330): Pfam Name: CAAX amino terminal protease family Pfam Description: CAAX amino terminal protease family
  misc_feature (1)..(347): Homolog of NCBI NO: 30683693 NR Description: CAAX amino terminal protease family [Arabidopsis
  misc_feature (8)..(347): Homolog of NCBI NO: 21593106 NR Description: unknown [Arabidopsis thaliana]
  misc_feature (8)..(347): Homolog of NCBI NO: 25518680 NR Description: hypothetical protein F14L17.3 - Arabidopsis >gi|7262668|gb|AAF43926.1|AC012188_3 Contains similarity to a protein from Synechocystis sp. gb|D90914.1. [Arabidopsis
  misc_feature (121)..(347): Homolog of NCBI NO: 20259411 NR Description: unknown protein [Arabidopsis thaliana]
  misc_feature (92)..(333): Homolog of NCBI NO: 16331018 NR Description: unknown protein [Synechocystis sp. PCC 6803]
  misc_feature (93)..(333): Homolog of NCBI NO: 17231277 NR Description: hypothetical protein [Nostoc sp. PCC 7120]
  misc_feature (92)..(330): Homolog of NCBI NO: 9759339 NR Description: gene_id:MUP24.17~pir||S76167~similar to unknown
  misc_feature (93)..(333): Homolog of NCBI NO: 23130090 NR Description: hypothetical protein [Nostoc punctiforme]
  misc_feature (92)..(330): Homolog of NCBI NO: 18424393 NR Description: CAAX amino terminal protease family [Arabidopsis >gi|17528994|gb|AAL38707.1| unknown protein [Arabidopsis >gi|20465443|gb|AAM20181.1| unknown protein [Arabidopsis
  misc_feature (93)..(333): Homolog of NCBI NO: 37522744 NR Description: hypothetical protein gll3175 [Gloeobacter
RTTENFKMVSQIISCLSQSSSLLCLSDSRRLILPKTCTYGGLSRFSPGFASRRLFTVNRKKWRSACIFNSGKEPGGEGKLQGGSSEWPILQRWEVPWGWQTVSLTSFACALSFVLTGLTEMAVIPFLGIDVEKLTLDDKAEILFLDQGLTTAVVLAVIFTVAKTFDPLPEDILRYDLRQPVNLQKGWLVWGGIGLVGAVGAIALTGVVLSVFRTEAPEREVDSLMKLLPLIGSSNISTLSLVGITGILAPLLEETVFRGFFMVSLTKWVPTPIAIIISSAAFALAHFTPGEFPQLFILGSVLGLSYAQTRNLITPMVIHGFWNSGVILLLTFLQIQGYDIKELLQAN

SEQ ID NO: 102189 - protein, 340 aa, Arabidopsis thaliana
  peptide (1)..(340): Ceres Seq. ID no. 13609622
  misc_feature (234)..(323): Pfam Name: CAAX amino terminal protease family Pfam Description: CAAX amino terminal protease family
  misc_feature (1)..(340): Homolog of NCBI NO: 30683693 NR Description: CAAX amino terminal protease family [Arabidopsis
  misc_feature (1)..(340): Homolog of NCBI NO: 21593106 NR Description: unknown [Arabidopsis thaliana]
  misc_feature (1)..(340): Homolog of NCBI NO: 25518680 NR Description: hypothetical protein F14L17.3 - Arabidopsis >gi|7262668|gb|AAF43926.1|AC012188_3 Contains similarity to a protein from Synechocystis sp. gb|D90914.1. [Arabidopsis
  misc_feature (114)..(340): Homolog of NCBI NO: 20259411 NR Description: unknown protein [Arabidopsis thaliana]
  misc_feature (85)..(326): Homolog of NCBI NO: 16331018 NR Description: unknown protein [Synechocystis sp. PCC 6803]
  misc_feature (86)..(326): Homolog of NCBI NO: 17231277 NR Description: hypothetical protein [Nostoc sp. PCC 7120]
  misc_feature (85)..(323): Homolog of NCBI NO: 9759339 NR Description: gene_id:MUP24.17~pir||S76167~similar to unknown
  misc_feature (86)..(326): Homolog of NCBI NO: 23130090 NR Description: hypothetical protein [Nostoc punctiforme]
  misc_feature (85)..(323): Homolog of NCBI NO: 18424393 NR Description: CAAX amino terminal protease family [Arabidopsis >gi|17528994|gb|AAL38707.1| unknown protein [Arabidopsis >gi|20465443|gb|AAM20181.1| unknown protein [Arabidopsis
  misc_feature (86)..(326): Homolog of NCBI NO: 37522744 NR Description: hypothetical protein gll3175 [Gloeobacter
MVSQIISCLSQSSSLLCLSDSRRLILPKTCTYGGLSRFSPGFASRRLFTVNRKKWRSACIFNSGKEPGGEGKLQGGSSEWPILQRWEVPWGWQTVSLTSFACALSFVLTGLTEMAVIPFLGIDVEKLTLDDKAEILFLDQGLTTAVVLAVIFTVAKTFDPLPEDILRYDLRQPVNLQKGWLVWGGIGLVGAVGAIALTGVVLSVFRTEAPEREVDSLMKLLPLIGSSNISTLSLVGITGILAPLLEETVFRGFFMVSLTKWVPTPIAIIISSAAFALAHFTPGEFPQLFILGSVLGLSYAQTRNLITPMVIHGFWNSGVILLLTFLQIQGYDIKELLQAN

SEQ ID NO: 102190 - protein, 227 aa, Arabidopsis thaliana; identical to SEQ ID NO: 23346
  peptide (1)..(227): Ceres Seq. ID no. 13609623
  misc_feature (121)..(210): Pfam Name: CAAX amino terminal protease family Pfam Description: CAAX amino terminal protease family
  misc_feature (1)..(227): Homolog of NCBI NO: 30683693 NR Description: CAAX amino terminal protease family [Arabidopsis
  misc_feature (1)..(227): Homolog of NCBI NO: 21593106 NR Description: unknown [Arabidopsis thaliana]
  misc_feature (1)..(227): Homolog of NCBI NO: 25518680 NR Description: hypothetical protein F14L17.3 - Arabidopsis >gi|7262668|gb|AAF43926.1|AC012188_3 Contains similarity to a protein from Synechocystis sp. gb|D90914.1. [Arabidopsis
  misc_feature (1)..(227): Homolog of NCBI NO: 20259411 NR Description: unknown protein [Arabidopsis thaliana]
  misc_feature (1)..(213): Homolog of NCBI NO: 16331018 NR Description: unknown protein [Synechocystis sp. PCC 6803]
  misc_feature (1)..(213): Homolog of NCBI NO: 17231277 NR Description: hypothetical protein [Nostoc sp. PCC 7120]
  misc_feature (1)..(210): Homolog of NCBI NO: 9759339 NR Description: gene_id:MUP24.17~pir||S76167~similar to unknown
  misc_feature (1)..(213): Homolog of NCBI NO: 23130090 NR Description: hypothetical protein [Nostoc punctiforme]
  misc_feature (1)..(210): Homolog of NCBI NO: 18424393 NR Description: CAAX amino terminal protease family [Arabidopsis >gi|17528994|gb|AAL38707.1| unknown protein [Arabidopsis >gi|20465443|gb|AAM20181.1| unknown protein [Arabidopsis
  misc_feature (1)..(213): Homolog of NCBI NO: 37522744 NR Description: hypothetical protein gll3175 [Gloeobacter

SEQ ID NO: 102191 - DNA, 1042 bp, Arabidopsis thaliana
  misc_feature (1)..(1042): Ceres Seq. ID no. 13609632
  misc_feature: MA Experiment ID: 108461 Result: Down-regulated in Transcription
  misc_feature: MA Experiment 108461 PARAMETER Experiment Name: At_Germinating_Seeds_cDNA_P Parameter: Age (day) Value: 1 vs. 0
  misc_feature: MA Experiment 108461 PARAMETER Experiment Name: At_Germinating_Seeds_cDNA_P Parameter: Tissue Value: Germinating Seeds
  misc_feature: MA Experiment ID: 108462 Result: Down-regulated in Transcription
  misc_feature: MA Experiment 108462 PARAMETER Experiment Name: At_Germinating_Seeds_cDNA_P Parameter: Age (day) Value: 2 vs. 0
  misc_feature: MA Experiment 108462 PARAMETER Experiment Name: At_Germinating_Seeds_cDNA_P Parameter: Tissue Value: Germinating Seeds
  misc_feature: MA Experiment ID: 108463 Result: Down-regulated in Transcription
  misc_feature: MA Experiment 108463 PARAMETER Experiment Name: At_Germinating_Seeds_cDNA_P Parameter: Age (day) Value: 3 vs. 0
  misc_feature: MA Experiment 108463 PARAMETER Experiment Name: At_Germinating_Seeds_cDNA_P Parameter: Tissue Value: Germinating Seeds
  misc_feature: MA Experiment ID: 108464 Result: Down-regulated in Transcription
  misc_feature: MA Experiment 108464 PARAMETER Experiment Name: At_Germinating_Seeds_cDNA_P Parameter: Age (day) Value: 4 vs. 0
  misc_feature: MA Experiment 108464 PARAMETER Experiment Name: At_Germinating_Seeds_cDNA_P Parameter: Tissue Value: Germinating Seeds
  misc_feature: MA Experiment ID: 108561 Result: Down-regulated in Transcription
  misc_feature: MA Experiment 108561 PARAMETER Experiment Name: At_100uM_ABA_cDNA_P Parameter: Timepoint (hr) Value: 6
  misc_feature: MA Experiment 108561 PARAMETER Experiment Name: At_100uM_ABA_cDNA_P Parameter: Tissue Value: Aerial
  misc_feature: MA Experiment 108561 PARAMETER Experiment Name: At_100uM_ABA_cDNA_P Parameter: Treatment Value: 100uM ABA vs. No Treatment
  misc_feature: MA Experiment ID: 108579 Result: Up-regulated in Transcription
  misc_feature: MA Experiment 108579 PARAMETER Experiment Name: At_4deg_Cold_cDNA_P Parameter: Temperature (deg C) Value: 4 vs. 22
  misc_feature: MA Experiment 108579 PARAMETER Experiment Name: At_4deg_Cold_cDNA_P Parameter: Timepoint (hr) Value: 6
  misc_feature: MA Experiment 108579 PARAMETER Experiment Name: At_4deg_Cold_cDNA_P Parameter: Tissue Value: Aerial
  misc_feature: MA Experiment ID: 108594 Result: Up-regulated in Transcription
  misc_feature: MA Experiment 108594 PARAMETER Experiment Name: At_Ler-rhl_Root_cDNA_P Parameter: Plant Line Value: null
  misc_feature: MA Experiment ID: 108608 Result: Down-regulated in Transcription
  misc_feature: MA Experiment 108608 PARAMETER Experiment Name: At_100uM_ABA_cDNA_P Parameter: Timepoint (hr) Value: 1
  misc_feature: MA Experiment 108608 PARAMETER Experiment Name: At_100uM_ABA_cDNA_P Parameter: Tissue Value: Aerial
  misc_feature: MA Experiment 108608 PARAMETER Experiment Name: At_100uM_ABA_cDNA_P Parameter: Treatment Value: 100uM ABA vs. No Treatment
  misc_feature: MA Experiment ID: 20000166 Result: Down-regulated in Transcription
  misc_feature: MA Experiment 20000166 PARAMETER Experiment Name: At_100uM_ABA_P Parameter: Age (day) Value: 14
  misc_feature: MA Experiment 20000166 PARAMETER Experiment Name: At_100uM_ABA_P Parameter: Organism Value: A. thaliana
  misc_feature: MA Experiment 20000166 PARAMETER Experiment Name: At_100uM_ABA_P Parameter: Plant Line Value: WS
  misc_feature: MA Experiment 20000166 PARAMETER Experiment Name: At_100uM_ABA_P Parameter: Timepoint (hr) Value: 1
  misc_feature: MA Experiment 20000166 PARAMETER Experiment Name: At_100uM_ABA_P Parameter: Tissue Value: Aerial
  misc_feature: MA Experiment 20000166 PARAMETER Experiment Name: At_100uM_ABA_P Parameter: Treatment Value: 100uM ABA vs. No Treatment
  misc_feature: MA Experiment ID: 20000171 Result: Down-regulated in Transcription
  misc_feature: MA Experiment 20000171 PARAMETER Experiment Name: At_42deg_Heat_P Parameter: Age (day) Value: 14
  misc_feature: MA Experiment 20000171 PARAMETER Experiment Name: At_42deg_Heat_P Parameter: Organism Value: A. thaliana
  misc_feature: MA Experiment 20000171 PARAMETER Experiment Name: At_42deg_Heat_P Parameter: Plant Line Value: WS
  misc_feature: MA Experiment 20000171 PARAMETER Experiment Name: At_42deg_Heat_P Parameter: Temperature (deg C) Value: 42 vs. 22
  misc_feature: MA Experiment 20000171 PARAMETER Experiment Name: At_42deg_Heat_P Parameter: Timepoint (hr) Value: 1
  misc_feature: MA Experiment 20000171 PARAMETER Experiment Name: At_42deg_Heat_P Parameter: Tissue Value: Aerial
  misc_feature: MA Experiment ID: 20000180 Result: Down-regulated in Transcription
  misc_feature: MA Experiment 20000180 PARAMETER Experiment Name: At_Germinating_Seeds_P Parameter: Age (hr) Value: 24 vs. 0
  misc_feature: MA Experiment 20000180 PARAMETER Experiment Name: At_Germinating_Seeds_P Parameter: Tissue Value: Germinating Seeds
  misc_feature: MA Experiment ID: 20000182 Result: Down-regulated in Transcription
  misc_feature: MA Experiment 20000182 PARAMETER Experiment Name: At_2mM_SA_P Parameter: Age (day) Value: 14
  misc_feature: MA Experiment 20000182 PARAMETER Experiment Name: At_2mM_SA_P Parameter: Organism Value: A. thaliana
  misc_feature: MA Experiment 20000182 PARAMETER Experiment Name: At_2mM_SA_P Parameter: Plant Line Value: WS
  misc_feature: MA Experiment 20000182 PARAMETER Experiment Name: At_2mM_SA_P Parameter: Timepoint (hr) Value: 6
  misc_feature: MA Experiment 20000182 PARAMETER Experiment Name: At_2mM_SA_P Parameter: Tissue Value: Aerial
  misc_feature: MA Experiment 20000182 PARAMETER Experiment Name: At_2mM_SA_P Parameter: Treatment Value: 2mM SA vs. No Treatment
  misc_feature: MA Experiment ID: 20000184 Result: Up-regulated in Transcription
  misc_feature: MA Experiment 20000184 PARAMETER Experiment Name: At_Shoots__P Parameter: Age (day) Value: 7
  misc_feature: MA Experiment 20000184 PARAMETER Experiment Name: At_Shoots__P Parameter: Tissue Value: Shoots vs. Whole Plant
  misc_feature: MA Experiment ID: 20000213 Result: Up-regulated in Transcription
  misc_feature: MA Experiment 20000213 PARAMETER Experiment Name: At_4deg_Cold_P Parameter: Timepoint (hr) Value: 2
  misc_feature: MA Experiment ID: 20000224 Result: Down-regulated in Transcription
  misc_feature: MA Experiment ID: 20000265 Result: Down-regulated in Transcription
  misc_feature: MA Experiment 20000265 PARAMETER Experiment Name: At_Open_Flower_P Parameter: Age (day) Value: 21
  misc_feature: MA Experiment 20000265 PARAMETER Experiment Name: At_Open_Flower_P Parameter: Plant Line Value: WS
  misc_feature: MA Experiment 20000265 PARAMETER Experiment Name: At_Open_Flower_P Parameter: Tissue Value: Closed Flower vs. Whole Plant
  misc_feature: MA Experiment ID: 20000438 Result: Down-regulated in Transcription
  misc_feature: MA Experiment 20000438 PARAMETER Experiment Name: At_Shoots__P Parameter: Age (day) Value: 14
  misc_feature: MA Experiment 20000438 PARAMETER Experiment Name: At_Shoots__P Parameter: Tissue Value: Shoots vs. Whole Plant
  misc_feature: MA Experiment ID: 20000444 Result: Up-regulated in Transcription
  misc_feature: MA Experiment 20000444 PARAMETER Experiment Name: At_100uM_NAA__P Parameter: Age (day) Value: 14
  misc_feature: MA Experiment 20000444 PARAMETER Experiment Name: At_100uM_NAA__P Parameter: Organism Value: A. thaliana
  misc_feature: MA Experiment 20000444 PARAMETER Experiment Name: At_100uM_NAA__P Parameter: Plant Line Value: WS
  misc_feature: MA Experiment 20000444 PARAMETER Experiment Name: At_100uM_NAA__P Parameter: Timepoint (hr) Value: 1
  misc_feature: MA Experiment 20000444 PARAMETER Experiment Name: At_100uM_NAA__P Parameter: Tissue Value: Aerial
  misc_feature: MA Experiment 20000444 PARAMETER Experiment Name: At_100uM_NAA__P Parameter: Treatment Value: 100uM NAA vs. No Treatment
  misc_feature: MA Experiment ID: 20000451 Result: Down-regulated in Transcription
  misc_feature: MA Experiment 20000451 PARAMETER Experiment Name: At_CS6879_Shoots-Roots_P Parameter: Age (day) Value: 14
  misc_feature: MA Experiment 20000451 PARAMETER Experiment Name: At_CS6879_Shoots-Roots_P Parameter: Organism Value: A. thaliana
  misc_feature: MA Experiment 20000451 PARAMETER Experiment Name: At_CS6879_Shoots-Roots_P Parameter: Plant Line Value: CS6879 vs. WS
  misc_feature: MA Experiment 20000451 PARAMETER Experiment Name: At_CS6879_Shoots-Roots_P Parameter: Tissue Value: Roots
  misc_feature: MA Experiment ID: 20000452 Result: Up-regulated in Transcription
  misc_feature: MA Experiment 20000452 PARAMETER Experiment Name: At_CS6879_Shoots-Roots_P Parameter: Age (day) Value: 14
  misc_feature: MA Experiment 20000452 PARAMETER Experiment Name: At_CS6879_Shoots-Roots_P Parameter: Organism Value: A. thaliana
  misc_feature: MA Experiment 20000452 PARAMETER Experiment Name: At_CS6879_Shoots-Roots_P Parameter: Plant Line Value: CS6879 vs. WS
  misc_feature: MA Experiment 20000452 PARAMETER Experiment Name: At_CS6879_Shoots-Roots_P Parameter: Tissue Value: Shoots
  misc_feature: MA Experiment ID: 20000455 Result: Down-regulated in Transcription
  misc_feature: MA Experiment 20000455 PARAMETER Experiment Name: At_100uM_ABA_P Parameter: Age (day) Value: 16
  misc_feature: MA Experiment 20000455 PARAMETER Experiment Name: At_100uM_ABA_P Parameter: Organism Value: A. thaliana
  misc_feature: MA Experiment 20000455 PARAMETER Experiment Name: At_100uM_ABA_P Parameter: Plant Line Value: WS
  misc_feature: MA Experiment 20000455 PARAMETER Experiment Name: At_100uM_ABA_P Parameter: Timepoint (hr) Value: 48
  misc_feature: MA Experiment 20000455 PARAMETER Experiment Name: At_100uM_ABA_P Parameter: Tissue Value: Aerial
  misc_feature: MA Experiment 20000455 PARAMETER Experiment Name: At_100uM_ABA_P Parameter: Treatment Value: 100uM ABA vs. No Treatment
  misc_feature: MA Experiment ID: 20000460 Result: Up-regulated in Transcription
  misc_feature: MA Experiment 20000460 PARAMETER Experiment Name: At_10percent_PEG_P Parameter: Age (day) Value: 12
  misc_feature: MA Experiment 20000460 PARAMETER Experiment Name: At_10percent_PEG_P Parameter: Organism Value: A. thaliana
  misc_feature: MA Experiment 20000460 PARAMETER Experiment Name: At_10percent_PEG_P Parameter: Plant Line Value: WS
  misc_feature: MA Experiment 20000460 PARAMETER Experiment Name: At_10percent_PEG_P Parameter: Timepoint (day) Value: 12
  misc_feature: MA Experiment 20000460 PARAMETER Experiment Name: At_10percent_PEG_P Parameter: Tissue Value: Whole Plant
  misc_feature: MA Experiment 20000460 PARAMETER Experiment Name: At_10percent_PEG_P Parameter: Treatment Value: 10percent PEG vs. No Treatment
  misc_feature: MA Experiment ID: 20000495 Result: Down-regulated in Transcription
  misc_feature: MA Experiment 20000495 PARAMETER Experiment Name: At_Guard_Cells_P Parameter: Harvest Date Value: 8/2/2002
  misc_feature: MA Experiment 20000495 PARAMETER Experiment Name: At_Guard_Cells_P Parameter: Organism Value: A. thaliana
  misc_feature: MA Experiment 20000495 PARAMETER Experiment Name: At_Guard_Cells_P Parameter: Tissue Value: Guard Cells vs. Leaves
  misc_feature: MA Experiment ID: 20000573 Result: Up-regulated in Transcription
  misc_feature: MA Experiment 20000573 PARAMETER Experiment Name: At_100uM_ABA_Mutants__P Parameter: Organism Value: A. thaliana
  misc_feature: MA Experiment 20000573 PARAMETER Experiment Name: At_100uM_ABA_Mutants__P Parameter: Plant Line Value: CS22 vs. Ler wt
  misc_feature: MA Experiment 20000573 PARAMETER Experiment Name: At_100uM_ABA_Mutants__P Parameter: Timepoint (hr) Value: N/A
  misc_feature: MA Experiment 20000573 PARAMETER Experiment Name: At_100uM_ABA_Mutants__P Parameter: Tissue Value: Whole Plant
  misc_feature: MA Experiment 20000573 PARAMETER Experiment Name: At_100uM_ABA_Mutants__P Parameter: Treatment Value: None
  misc_feature: MA Experiment ID: 20000574 Result: Up-regulated in Transcription
  misc_feature: MA Experiment 20000574 PARAMETER Experiment Name: At_100uM_ABA_Mutants__P Parameter: Organism Value: A. thaliana
  misc_feature: MA Experiment 20000574 PARAMETER Experiment Name: At_100uM_ABA_Mutants__P Parameter: Plant Line Value: CS23 vs. Ler wt
  misc_feature: MA Experiment 20000574 PARAMETER Experiment Name: At_100uM_ABA_Mutants__P Parameter: Timepoint (hr) Value: N/A
  misc_feature: MA Experiment 20000574 PARAMETER Experiment Name: At_100uM_ABA_Mutants__P Parameter: Tissue Value: Whole Plant
  misc_feature: MA Experiment 20000574 PARAMETER Experiment Name: At_100uM_ABA_Mutants__P Parameter: Treatment Value: None
  misc_feature: MA Experiment ID: 20000794 Result: Up-regulated in Transcription
  misc_feature: MA Experiment 20000794 PARAMETER Experiment Name: At_Petals_P Parameter: Age (day) Value: 23-25 days
  misc_feature: MA Experiment 20000794 PARAMETER Experiment Name: At_Petals_P Parameter: Plant Line Value: WS
  misc_feature: MA Experiment 20000794 PARAMETER Experiment Name: At_Petals_P Parameter: Tissue Value: Petals vs. Whole plant
  misc_feature: MA Experiment ID: 20001247 Result: Up-regulated in Transcription
  misc_feature: MA Experiment 20001247 PARAMETER Experiment Name: At_Far-red-induction_P Parameter: Age (day) Value: 7
  misc_feature: MA Experiment 20001247 PARAMETER Experiment Name: At_Far-red-induction_P Parameter: Light Value: Far-red vs. White
  misc_feature: MA Experiment 20001247 PARAMETER Experiment Name: At_Far-red-induction_P Parameter: Organism Value: A. thaliana
  misc_feature: MA Experiment 20001247 PARAMETER Experiment Name: At_Far-red-induction_P Parameter: Plant Line Value: Columbia
  misc_feature: MA Experiment 20001247 PARAMETER Experiment Name: At_Far-red-induction_P Parameter: Timepoint (hr) Value: 1
  misc_feature: MA Experiment 20001247 PARAMETER Experiment Name: At_Far-red-induction_P Parameter: Tissue Value: Whole Plant
  misc_feature: MA Experiment ID: 20001248 Result: Up-regulated in Transcription
  misc_feature: MA Experiment 20001248 PARAMETER Experiment Name: At_Far-red-induction_P Parameter: Age (day) Value: 7
  misc_feature: MA Experiment 20001248 PARAMETER Experiment Name: At_Far-red-induction_P Parameter: Light Value: Far-red vs. White
  misc_feature: MA Experiment 20001248 PARAMETER Experiment Name: At_Far-red-induction_P Parameter: Organism Value: A. thaliana
  misc_feature: MA Experiment 20001248 PARAMETER Experiment Name: At_Far-red-induction_P Parameter: Plant Line Value: Columbia
  misc_feature: MA Experiment 20001248 PARAMETER Experiment Name: At_Far-red-induction_P Parameter: Timepoint (hr) Value: 4
  misc_feature: MA Experiment 20001248 PARAMETER Experiment Name: At_Far-red-induction_P Parameter: Tissue Value: Whole Plant
  misc_feature: MA Experiment ID: 20001450 Result: Up-regulated in Transcription
  misc_feature: MA Experiment 20001450 PARAMETER Experiment Name: At_Far-red-induction_P Parameter: Age (day) Value: 7
  misc_feature: MA Experiment 20001450 PARAMETER Experiment Name: At_Far-red-induction_P Parameter: Light Value: Far-red vs. White
  misc_feature: MA Experiment 20001450 PARAMETER Experiment Name: At_Far-red-induction_P Parameter: Organism Value: A. thaliana
  misc_feature: MA Experiment 20001450 PARAMETER Experiment Name: At_Far-red-induction_P Parameter: Plant Line Value: Columbia
  misc_feature: MA Experiment 20001450 PARAMETER Experiment Name: At_Far-red-induction_P Parameter: Timepoint (hr) Value: 8
  misc_feature: MA Experiment 20001450 PARAMETER Experiment Name: At_Far-red-induction_P Parameter: Tissue Value: Whole Plant
  misc_feature: MA Experiment ID: 20001451 Result: Up-regulated in Transcription
  misc_feature: MA Experiment 20001451 PARAMETER Experiment Name: At_Far-red-induction_P Parameter: Age (day) Value: 7
  misc_feature: MA Experiment 20001451 PARAMETER Experiment Name: At_Far-red-induction_P Parameter: Light Value: Far-red vs. White
  misc_feature: MA Experiment 20001451 PARAMETER Experiment Name: At_Far-red-induction_P Parameter: Organism Value: A. thaliana
  misc_feature: MA Experiment 20001451 PARAMETER Experiment Name: At_Far-red-induction_P Parameter: Plant Line Value: Columbia
  misc_feature: MA Experiment 20001451 PARAMETER Experiment Name: At_Far-red-induction_P Parameter: Timepoint (hr) Value: 24
  misc_feature: MA Experiment 20001451 PARAMETER Experiment Name: At_Far-red-induction_P Parameter: Tissue Value: Whole Plant
  misc_feature: MA Experiment ID: 20001554 Result: Down-regulated in Transcription
  misc_feature: MA Experiment 20001554 PARAMETER Experiment Name: At_Drought_Soil_Dry_P Parameter: Age (day) Value: 21
  misc_feature: MA Experiment 20001554 PARAMETER Experiment Name: At_Drought_Soil_Dry_P Parameter: Organism Value: A. thaliana
  misc_feature: MA Experiment 20001554 PARAMETER Experiment Name: At_Drought_Soil_Dry_P Parameter: Plant Line Value: WS
  misc_feature: MA Experiment 20001554 PARAMETER Experiment Name: At_Drought_Soil_Dry_P Parameter: Post Timepoint (hr) Value: None
  misc_feature: MA Experiment 20001554 PARAMETER Experiment Name: At_Drought_Soil_Dry_P Parameter: Post-Treatment Value: None
  misc_feature: MA Experiment 20001554 PARAMETER Experiment Name: At_Drought_Soil_Dry_P Parameter: Timepoint (day) Value: 7
  misc_feature: MA Experiment 20001554 PARAMETER Experiment Name: At_Drought_Soil_Dry_P Parameter: Treatment Value: Drought vs. No Drought
  misc_feature: MA Experiment ID: 20001556 Result: Down-regulated in Transcription
  misc_feature: MA Experiment 20001556 PARAMETER Experiment Name: At_Drought_Soil_Dry_P Parameter: Age (day) Value: 26
  misc_feature: MA Experiment 20001556 PARAMETER Experiment Name: At_Drought_Soil_Dry_P Parameter: Organism Value: A. thaliana
  misc_feature: MA Experiment 20001556 PARAMETER Experiment Name: At_Drought_Soil_Dry_P Parameter: Plant Line Value: WS
  misc_feature: MA Experiment 20001556 PARAMETER Experiment Name: At_Drought_Soil_Dry_P Parameter: Post Timepoint (hr) Value: None
  misc_feature: MA Experiment 20001556 PARAMETER Experiment Name: At_Drought_Soil_Dry_P Parameter: Post-Treatment Value: None
  misc_feature: MA Experiment 20001556 PARAMETER Experiment Name: At_Drought_Soil_Dry_P Parameter: Timepoint (day) Value: 12
  misc_feature: MA Experiment 20001556 PARAMETER Experiment Name: At_Drought_Soil_Dry_P Parameter: Treatment Value: Drought vs. No Drought
  misc_feature: MA Experiment ID: 20001557 Result: Up-regulated in Transcription
  misc_feature: MA Experiment 20001557 PARAMETER Experiment Name: At_Drought_Soil_Dry_P Parameter: Age (day) Value: 27
  misc_feature: MA Experiment 20001557 PARAMETER Experiment Name: At_Drought_Soil_Dry_P Parameter: Organism Value: A. thaliana
  misc_feature: MA Experiment 20001557 PARAMETER Experiment Name: At_Drought_Soil_Dry_P Parameter: Plant Line Value: WS
  misc_feature: MA Experiment 20001557 PARAMETER Experiment Name: At_Drought_Soil_Dry_P Parameter: Post Timepoint (hr) Value: 3
  misc_feature: MA Experiment 20001557 PARAMETER Experiment Name: At_Drought_Soil_Dry_P Parameter: Post-Treatment Value: Re-Water vs. No Drought
  misc_feature: MA Experiment 20001557 PARAMETER Experiment Name: At_Drought_Soil_Dry_P Parameter: Timepoint (day) Value: 13
  misc_feature: MA Experiment 20001557 PARAMETER Experiment Name: At_Drought_Soil_Dry_P Parameter: Treatment Value: Drought vs. No Drought
  misc_feature: MA Experiment ID: 20001558 Result: Up-regulated in Transcription
  misc_feature: MA Experiment 20001558 PARAMETER Experiment Name: At_Drought_Soil_Dry_P Parameter: Age (day) Value: 27
  misc_feature: MA Experiment 20001558 PARAMETER Experiment Name: At_Drought_Soil_Dry_P Parameter: Organism Value: A. thaliana
  misc_feature: MA Experiment 20001558 PARAMETER Experiment Name: At_Drought_Soil_Dry_P Parameter: Plant Line Value: WS
  misc_feature: MA Experiment 20001558 PARAMETER Experiment Name: At_Drought_Soil_Dry_P Parameter: Post Timepoint (hr) Value: 6
  misc_feature: MA Experiment 20001558 PARAMETER Experiment Name: At_Drought_Soil_Dry_P Parameter: Post-Treatment Value: Re-Water vs. No Drought
  misc_feature: MA Experiment 20001558 PARAMETER Experiment Name: At_Drought_Soil_Dry_P Parameter: Timepoint (day) Value: 13
  misc_feature: MA Experiment 20001558 PARAMETER Experiment Name: At_Drought_Soil_Dry_P Parameter: Treatment Value: Drought vs. No Drought
  misc_feature: MA Experiment ID: 20001560 Result: Up-regulated in Transcription
  misc_feature: MA Experiment 20001560 PARAMETER Experiment Name: At_Drought_Soil_Dry_P Parameter: Age (day) Value: 28
  misc_feature: MA Experiment 20001560 PARAMETER Experiment Name: At_Drought_Soil_Dry_P Parameter: Organism Value: A. thaliana
  misc_feature: MA Experiment 20001560 PARAMETER Experiment Name: At_Drought_Soil_Dry_P Parameter: Plant Line Value: WS
  misc_feature: MA Experiment 20001560 PARAMETER Experiment Name: At_Drought_Soil_Dry_P Parameter: Post Timepoint (hr) Value: None
  misc_feature: MA Experiment 20001560 PARAMETER Experiment Name: At_Drought_Soil_Dry_P Parameter: Post-Treatment Value: None
  misc_feature: MA Experiment 20001560 PARAMETER Experiment Name: At_Drought_Soil_Dry_P Parameter: Timepoint (day) Value: 14
  misc_feature: MA Experiment 20001560 PARAMETER Experiment Name: At_Drought_Soil_Dry_P Parameter: Treatment Value: Drought vs. No Drought
  misc_feature: MA Experiment ID: 20001770 Result: Up-regulated in Transcription
  misc_feature: MA Experiment 20001770 PARAMETER Experiment Name: At_Far-red-enriched-adult_P Parameter: Age (day) Value: 28
  misc_feature: MA Experiment 20001770 PARAMETER Experiment Name: At_Far-red-enriched-adult_P Parameter: Light Value: Far-red enriched vs. White
  misc_feature: MA Experiment 20001770 PARAMETER Experiment Name: At_Far-red-enriched-adult_P Parameter: Organism Value: A. thaliana
  misc_feature: MA Experiment 20001770 PARAMETER Experiment Name: At_Far-red-enriched-adult_P Parameter: Plant Line Value: Columbia
  misc_feature: MA Experiment 20001770 PARAMETER Experiment Name: At_Far-red-enriched-adult_P Parameter: Timepoint (hr) Value: 8
  misc_feature: MA Experiment 20001770 PARAMETER Experiment Name: At_Far-red-enriched-adult_P Parameter: Tissue Value: Aerial
aaaacacaacatgaagattatgtgggaaacagcagttgtgttttgtctctgttcgttgtctttggtttcttcacacagcaggaaattcacaacaccaaacgtgacacgcctcacagatcaattcagtaagatcgccattgaaaatggcttctccagacgtttcggagctcacaatattcaggtcaatggctccctcgctaagctcactctcgacaaatcctccggagctgggttggtgtcaaagaacaagtatcactatggtttcttcagtgcaagactcaagcttcccgctggatttgcctctggtgttgtggttgctttctatttatcaaacgcagagacttatccgaaaagccacgacgagatagacatagaattgttgggtagaagtaggagagatgattggacgatccagacgaatgtatatgcaaatggaagtactagaacgggaagagaagagaagttttatttttggttcgatccaacgcaagcctttcacgactataccctcatttggaactcccaccatactgtatttttggtagacaacattccggttaggcagtttccaaaccggggagccttcacaagcgcgtacccgtctaaaccgatgtctctatacgtcaccgtttgggacggttcagagtgggccactaaaggtggtaagtaccccgtcaactacaagtacgcccctttcgtggtttccgttgctgacgtggagttaagtggctgttccgttaacaacggctcctctaccgggtccgggccatgtaccaagtcgggcgggtcgatttcgagtctggaccctgttgatggtcaggattttgccacgttgtcgaagaatcagatcaatgccatggattgggctaggagaaagctgatgttctattcttattgcagtgataagccaagatacaaagtcatgcctgctgagtgcaactgatttttttttttgttaaaacacacattgttactttctattgttttatgatataattttacgtaggatattagaggtttaaagtatgtttcaaacttcgcc

SEQ ID NO: 102192 - protein, 313 aa, Arabidopsis thaliana
  peptide (1)..(313): Ceres Seq. ID no. 13609633
  misc_feature (46)..(229): Pfam Name: Glycosyl hydrolases family 16 Pfam Description: Glycosyl hydrolases family 16
  misc_feature (4)..(313): Homolog of NCBI NO: 15218558 NR Description: xyloglucan endotransglycosylase, putative
  misc_feature (7)..(313): Homolog of NCBI NO: 21555405 NR Description: putative endoxyloglucan transferase [Arabidopsis
  misc_feature (45)..(312): Homolog of NCBI NO: 5533313 NR Description: endoxyloglucan transferase [Arabidopsis thaliana]
  misc_feature (45)..(312): Homolog of NCBI NO: 15226364 NR Description: xyloglucan endotransglycosylase (EXGT-A3)
  misc_feature (44)..(312): Homolog of NCBI NO: 15223878 NR Description: xyloglucan endotransglycosylase (XTR2)
  misc_feature (45)..(312): Homolog of NCBI NO: 21553969 NR Description: putative xyloglucan-specific glucanase
  misc_feature (44)..(312): Homolog of NCBI NO: 13560781 NR Description: endoxyloglucan transferase [Daucus carota]
  misc_feature (34)..(312): Homolog of NCBI NO: 6681351 NR Description: ETAG-A3 [Lycopersicon esculentum]
  misc_feature (33)..(312): Homolog of NCBI NO: 32470643 NR Description: putative xyloglucan endotransglycosylase-related
  misc_feature (44)..(312): Homolog of NCBI NO: 2129774 NR Description: xyloglucan endo-1,4-beta-D-glucanase (EC 3.2.1.-) - Arabidopsis thaliana (fragment) >gi|1244754|gb|AAB18365.1|
KHNMKIMWETAVVFCLCSLSLVSSHSRKFTTPNVTRLTDQFSKIAIENGFSRRFGAHNIQVNGSLAKLTLDKSSGAGLVSKNKYHYGFFSARLKLPAGFASGVVVAFYLSNAETYPKSHDEIDIELLGRSRRDDWTIQTNVYANGSTRTGREEKFYFWFDPTQAFHDYTLIWNSHHTVFLVDNIPVRQFPNRGAFTSAYPSKPMSLYVTVWDGSEWATKGGKYPVNYKYAPFVVSVADVELSGCSVNNGSSTGSGPCTKSGGSISSLDPVDGQDFATLSKNQINAMDWARRKLMFYSYCSDKPRYKVMPAECN

SEQ ID NO: 102193 - protein, 310 aa, Arabidopsis thaliana
  peptide (1)..(310): Ceres Seq. ID no. 13609634
  misc_feature (43)..(226): Pfam Name: Glycosyl hydrolases family 16 Pfam Description: Glycosyl hydrolases family 16
  misc_feature (1)..(310): Homolog of NCBI NO: 15218558 NR Description: xyloglucan endotransglycosylase, putative
  misc_feature (4)..(310): Homolog of NCBI NO: 21555405 NR Description: putative endoxyloglucan transferase [Arabidopsis
  misc_feature (42)..(309): Homolog of NCBI NO: 5533313 NR Description: endoxyloglucan transferase [Arabidopsis thaliana]
  misc_feature (42)..(309): Homolog of NCBI NO: 15226364 NR Description: xyloglucan endotransglycosylase (EXGT-A3)
  misc_feature (41)..(309): Homolog of NCBI NO: 15223878 NR Description: xyloglucan endotransglycosylase (XTR2)
  misc_feature (42)..(309): Homolog of NCBI NO: 21553969 NR Description: putative xyloglucan-specific glucanase
  misc_feature (41)..(309): Homolog of NCBI NO: 13560781 NR Description: endoxyloglucan transferase [Daucus carota]
  misc_feature (31)..(309): Homolog of NCBI NO: 6681351 NR Description: ETAG-A3 [Lycopersicon esculentum]
  misc_feature (30)..(309): Homolog of NCBI NO: 32470643 NR Description: putative xyloglucan endotransglycosylase-related
  misc_feature (41)..(309): Homolog of NCBI NO: 2129774 NR Description: xyloglucan endo-1,4-beta-D-glucanase (EC 3.2.1.-) - Arabidopsis thaliana (fragment) >gi|1244754|gb|AAB18365.1|
MKIMWETAVVFCLCSLSLVSSHSRKFTTPNVTRLTDQFSKIAIENGFSRRFGAHNIQVNGSLAKLTLDKSSGAGLVSKNKYHYGFFSARLKLPAGFASGVVVAFYLSNAETYPKSHDEIDIELLGRSRRDDWTIQTNVYANGSTRTGREEKFYFWFDPTQAFHDYTLIWNSHHTVFLVDNIPVRQFPNRGAFTSAYPSKPMSLYVTVWDGSEWATKGGKYPVNYKYAPFVVSVADVELSGCSVNNGSSTGSGPCTKSGGSISSLDPVDGQDFATLSKNQINAMDWARRKLMFYSYCSDKPRYKVMPAECN

SEQ ID NO: 102194 - protein, 307 aa, Arabidopsis thaliana
  peptide (1)..(307): Ceres Seq. ID no. 13609635
  misc_feature (40)..(223): Pfam Name: Glycosyl hydrolases family 16 Pfam Description: Glycosyl hydrolases family 16
  misc_feature (1)..(307): Homolog of NCBI NO: 15218558 NR Description: xyloglucan endotransglycosylase, putative
  misc_feature (1)..(307): Homolog of NCBI NO: 21555405 NR Description: putative endoxyloglucan transferase [Arabidopsis
  misc_feature (39)..(306): Homolog of NCBI NO: 5533313 NR Description: endoxyloglucan transferase [Arabidopsis thaliana]
  misc_feature (39)..(306): Homolog of NCBI NO: 15226364 NR Description: xyloglucan endotransglycosylase (EXGT-A3)
  misc_feature (38)..(306): Homolog of NCBI NO: 15223878 NR Description: xyloglucan endotransglycosylase (XTR2)
  misc_feature (39)..(306): Homolog of NCBI NO: 21553969 NR Description: putative xyloglucan-specific glucanase
  misc_feature (38)..(306): Homolog of NCBI NO: 13560781 NR Description: endoxyloglucan transferase [Daucus carota]
  misc_feature (28)..(306): Homolog of NCBI NO: 6681351 NR Description: ETAG-A3 [Lycopersicon esculentum]
  misc_feature (27)..(306): Homolog of NCBI NO: 32470643 NR Description: putative xyloglucan endotransglycosylase-related
  misc_feature (38)..(306): Homolog of NCBI NO: 2129774 NR Description: xyloglucan endo-1,4-beta-D-glucanase (EC 3.2.1.-) - Arabidopsis thaliana (fragment) >gi|1244754|gb|AAB18365.1|
MWETAVVFCLCSLSLVSSHSRKFTTPNVTRLTDQFSKIAIENGFSRRFGAHNIQVNGSLAKLTLDKSSGAGLVSKNKYHYGFFSARLKLPAGFASGVVVAFYLSNAETYPKSHDEIDIELLGRSRRDDWTIQTNVYANGSTRTGREEKFYFWFDPTQAFHDYTLIWNSHHTVFLVDNIPVRQFPNRGAFTSAYPSKPMSLYVTVWDGSEWATKGGKYPVNYKYAPFVVSVADVELSGCSVNNGSSTGSGPCTKSGGSISSLDPVDGQDFATLSKNQINAMDWARRKLMFYSYCSDKPRYKVMPAECN

SEQ ID NO: 102195 - DNA, 1578 bp, Arabidopsis thaliana
  misc_feature (1)..(1578): Ceres Seq. ID no. 13609636
  misc_feature: MA Experiment ID: 108434 Result: Down-regulated in Transcription
  misc_feature: MA Experiment 108434 PARAMETER Experiment Name: At_Root_Tips_cDNA_P Parameter: Tissue Value: Root Tips
  misc_feature: MA Experiment ID: 108488 Result: Down-regulated in Transcription
  misc_feature: MA Experiment ID: 20000184 Result: Down-regulated in Transcription
  misc_feature: MA Experiment 20000184 PARAMETER Experiment Name: At_Shoots__P Parameter: Age (day) Value: 7
  misc_feature: MA Experiment 20000184 PARAMETER Experiment Name: At_Shoots__P Parameter: Tissue Value: Shoots vs. Whole Plant
aaatcaatcataatgttttcgaattttttggaaagcttatacgatggaatcggagacgatgacgccgccgacgacgacgaagacaacaacaacgacgagaaaaccccgaaagcctcaacggaaagacacgatttctcgagaaacgccgttcgtttgtcaccggaagaggaggctcaagcgcgtggggttaaagatgatttgacggaacttggtcataccctcacgcgtcaatttcgtggtgtggctaactttctcgctccgttacctgatggatcttcttcttcttcctccgatctatcgaaccatcccaggtttaaccaatctcggtcttcagatcctggattgaatcaatcgcgttcttcagatcgggacgaatcgtgtgttggaagtgatacgccggagactggaattaggtttaggagctgggatttagaagaaaaattggcagaaggcaatgatccggaggatgaggaagaagaagaagaggaaacagatgaagaagaagaagaagaagaagagatcgctgcggttgctcttacagacgaagtgctagcatttgcgaggaacatagcaatgcatccagaaacttggttggattttcctcttgatcctgacgaagatcttgatgatttggaaatgagtgatgctcaaagaggtcatgctttagctattgagcgtcttgctccgaggttagctgcattgagaatagagctttgtccatgtcatatgagtgttggttacttctggaaagtctattttgttcttcttctttcaaggctcaataaacacgatgctcatcttttgtcttctccacaggtgatggaagctagagcattgtggatgaaagagcttcagaatcagacacattcttcaaaagaaagtagagatatgattcttgaggaagaagatattacaccatcaacttctaattactacaaccatgctcctcctgagtttctttctccaagaatatatgcttttgaacctccttcgattatgtatcgcgattttgaacacgggtttgaaaacgctcagttcatcgataaagctgttattgaggaaaaaccaatccagaagaacgacaaaaatagtgcaagccttagccaaacatctaaagatgttgttgatgatgatgatgatgattggccagaagaagaagattctgctaattcttgggctccaatgtttacagtgaatgaggatgatgtttctttcagtgatcttgaaggagacgacgatataagtagcttagcactcaagtctaagattacatcaaagggcacagaccaaaaaggaacatgaaacatcatctggcttgttgctttgccctgcctcacgagatcgaatcaatagaattgaacataagtactgtgtgctgagtcaaatcgtggaagtcttttgggtgagtttgattgttttgtggatttatgatgtttgctctcaaagagaaggaagaaagaaagaaaaaggttttgattgaaacatgtacagaagatttactttgacactgcaatttcattgtaatgttctctctcgccaaatgtaatgaaatattgaaaagcactatttcattcgcgt

SEQ ID NO: 102196 - protein, 433 aa, Arabidopsis thaliana
  peptide (1)..(433): Ceres Seq. ID no. 13609637
  misc_feature (210)..(256): Pfam Name: BSD domain Pfam Description: BSD domain
  misc_feature (5)..(433): Homolog of NCBI NO: 18391195 NR Description: expressed protein [Arabidopsis thaliana]
  misc_feature (5)..(433): Homolog of NCBI NO: 21555533 NR Description: unknown [Arabidopsis thaliana]
  misc_feature (26)..(433): Homolog of NCBI NO: 6573740 NR Description: F20B24.15 [Arabidopsis thaliana]
  misc_feature (5)..(209): Homolog of NCBI NO: 6573740 NR Description: F20B24.15 [Arabidopsis thaliana]
  misc_feature (122)..(412): Homolog of NCBI NO: 28273391 NR Description: putative BSD domain containing protein [Oryza
  misc_feature (53)..(433): Homolog of NCBI NO: 18425006 NR Description: expressed protein [Arabidopsis thaliana] gene_id:K14B20.8~unknown protein [Arabidopsis thaliana] unknown protein [Arabidopsis thaliana]
  misc_feature (26)..(391): Homolog of NCBI NO: 15229611 NR Description: expressed protein [Arabidopsis thaliana]
  misc_feature (210)..(433): Homolog of NCBI NO: 7486518 NR Description: hypothetical protein F6H11.10 - Arabidopsis >gi|2827699|emb|CAA16672.1| predicted protein [Arabidopsis
  misc_feature (53)..(212): Homolog of NCBI NO: 7486518 NR Description: hypothetical protein F6H11.10 - Arabidopsis >gi|2827699|emb|CAA16672.1| predicted protein [Arabidopsis
  misc_feature (62)..(430): Homolog of NCBI NO: 34909848 NR Description: OSJNBb0053G03.5 [Oryza sativa (japonica
KSIIMFSNFLESLYDGIGDDDAADDDEDNNNDEKTPKASTERHDFSRNAVRLSPEEEAQARGVKDDLTELGHTLTRQFRGVANFLAPLPDGSSSSSSDLSNHPRFNQSRSSDPGLNQSRSSDRDESCVGSDTPETGIRFRSWDLEEKLAEGNDPEDEEEEEEETDEEEEEEEEIAAVALTDEVLAFARNIAMHPETWLDFPLDPDEDLDDLEMSDAQRGHALAIERLAPRLAALRIELCPCHMSVGYFWKVYFVLLLSRLNKHDAHLLSSPQVMEARALWMKELQNQTHSSKESRDMILEEEDITPSTSNYYNHAPPEFLSPRIYAFEPPSIMYRDFEHGFENAQFIDKAVIEEKPIQKNDKNSASLSQTSKDVVDDDDDDWPEEEDSANSWAPMFTVNEDDVSFSDLEGDDDISSLALKSKITSKGTDQKGT

SEQ ID NO: 102197 - protein, 429 aa, Arabidopsis thaliana; identical to SEQ ID NO: 21038
  peptide (1)..(429): Ceres Seq. ID no. 13609638
  misc_feature (206)..(252): Pfam Name: BSD domain Pfam Description: BSD domain
  misc_feature (1)..(429): Homolog of NCBI NO: 18391195 NR Description: expressed protein [Arabidopsis thaliana]
  misc_feature (1)..(429): Homolog of NCBI NO: 21555533 NR Description: unknown [Arabidopsis thaliana]
  misc_feature (22)..(429): Homolog of NCBI NO: 6573740 NR Description: F20B24.15 [Arabidopsis thaliana]
  misc_feature (1)..(205): Homolog of NCBI NO: 6573740 NR Description: F20B24.15 [Arabidopsis thaliana]
  misc_feature (118)..(408): Homolog of NCBI NO: 28273391 NR Description: putative BSD domain containing protein [Oryza
  misc_feature (49)..(429): Homolog of NCBI NO: 18425006 NR Description: expressed protein [Arabidopsis thaliana] gene_id:K14B20.8~unknown protein [Arabidopsis thaliana] unknown protein [Arabidopsis thaliana]
  misc_feature (22)..(387): Homolog of NCBI NO: 15229611 NR Description: expressed protein [Arabidopsis thaliana]
  misc_feature (206)..(429): Homolog of NCBI NO: 7486518 NR Description: hypothetical protein F6H11.10 - Arabidopsis >gi|2827699|emb|CAA16672.1| predicted protein [Arabidopsis
  misc_feature (49)..(208): Homolog of NCBI NO: 7486518 NR Description: hypothetical protein F6H11.10 - Arabidopsis >gi|2827699|emb|CAA16672.1| predicted protein [Arabidopsis
  misc_feature (58)..(426): Homolog of NCBI NO: 34909848 NR Description: OSJNBb0053G03.5 [Oryza sativa (japonica

SEQ ID NO: 102198 - protein, 242 aa, Arabidopsis thaliana; identical to SEQ ID NO: 21039
  peptide (1)..(242): Ceres Seq. ID no. 13609639
  misc_feature (19)..(65): Pfam Name: BSD domain Pfam Description: BSD domain
  misc_feature (1)..(242): Homolog of NCBI NO: 18391195 NR Description: expressed protein [Arabidopsis thaliana]
  misc_feature (1)..(242): Homolog of NCBI NO: 21555533 NR Description: unknown [Arabidopsis thaliana]
  misc_feature (1)..(242): Homolog of NCBI NO: 6573740 NR Description: F20B24.15 [Arabidopsis thaliana]
  misc_feature (1)..(18): Homolog of NCBI NO: 6573740 NR Description: F20B24.15 [Arabidopsis thaliana]
  misc_feature (1)..(221): Homolog of NCBI NO: 28273391 NR Description: putative BSD domain containing protein [Oryza
  misc_feature (1)..(242): Homolog of NCBI NO: 18425006 NR Description: expressed protein [Arabidopsis thaliana] gene_id:K14B20.8~unknown protein [Arabidopsis thaliana] unknown protein [Arabidopsis thaliana]
  misc_feature (1)..(200): Homolog of NCBI NO: 15229611 NR Description: expressed protein [Arabidopsis thaliana]
  misc_feature (19)..(242): Homolog of NCBI NO: 7486518 NR Description: hypothetical protein F6H11.10 - Arabidopsis >gi|2827699|emb|CAA16672.1| predicted protein [Arabidopsis
  misc_feature (1)..(21): Homolog of NCBI NO: 7486518 NR Description: hypothetical protein F6H11.10 - Arabidopsis >gi|2827699|emb|CAA16672.1| predicted protein [Arabidopsis
  misc_feature (1)..(239): Homolog of NCBI NO: 34909848 NR Description: OSJNBb0053G03.5 [Oryza sativa (japonica

SEQ ID NO: 102199 - DNA, 1404 bp, Arabidopsis thaliana
  misc_feature (1)..(1404): Ceres Seq. ID no. 13609659
  misc_feature: MA Experiment ID: 108569 Result: Up-regulated in Transcription
  misc_feature: MA Experiment 108569 PARAMETER Experiment Name: At_0.001%_MeJA__cDNA_P Parameter: Timepoint (hr) Value: 6
  misc_feature: MA Experiment 108569 PARAMETER Experiment Name: At_0.001%_MeJA__cDNA_P Parameter: Tissue Value: Aerial
  misc_feature: MA Experiment 108569 PARAMETER Experiment Name: At_0.001%_MeJA__cDNA_P Parameter: Treatment Value: 0.001% MeJA vs. No Treatment
  misc_feature: MA Experiment ID: 108573 Result: Up-regulated in Transcription
  misc_feature: MA Experiment 108573 PARAMETER Experiment Name: At_Drought_cDNA_P Parameter: Timepoint (hr) Value: 6
  misc_feature: MA Experiment 108573 PARAMETER Experiment Name: At_Drought_cDNA_P Parameter: Tissue Value: Aerial
  misc_feature: MA Experiment 108573 PARAMETER Experiment Name: At_Drought_cDNA_P Parameter: Treatment Value: Drought vs. No Drought
atttccctttttctctgtaattttcaattcccaaaataaagaagctttcgtttctctctcgcattgacccttcttctccagttttatgttttgcctctctcccacttctgtaaataatcttctcacatccccgcacgattattctctagccgatcaacgaacacagagacgctaatgtatttgactcgattcgaatcattagtcctctaatcacaccgattgatttccacccacagatttcttgtctgaaatttagggttagcgaaggtttggatcaatgatgcaaggtgaagtacaattgcagccaccggattcacagaaactaagtgattccgctcctttgttaggagatcacaccaattcttcttcggcgtctccttctgctgcgtctgtggtggcaggaaatagcgatgagataaaggctgaagaagatttagagaacgatgcttcttcagctccttgttgtcgtatttgtttggaggacgatagtgaattgttaggcgatgaattgatttcaccttgtatgtgtaaaggcactcaacaattcgtgcatcgctcatgtctcgatcattggcgatcggttaaagaaggttttgctttctctcactgtactacttgcaaagcacagtttcatctgagagtcgaaccctttgaggataacaattcgtggcgtagaaaagctaaattcagactctttgtcgcaagagatgtgcttttggttttcttagctgtgcagactgttatcgctgtgatggccggattcgcatatatgatggacaaagacggagagtttcgcaactctttcaacgatgattgggatcgtattttgtcgaaacatcccatcccgttttattactgcattggggttatatccttctttgtgctgactggatttcttggaatcattctacattgctctgctctcaacggtaatgacccgaggatggctggatgccagaactgctgttatggatggggtgtcttggattgtttccctgcttcaatggaagcttgtttcgctcttgttgttgtttttgtcgtcatctttgccattcttggtttagcgtatgggtttcttgctgcaactatggctatccaaaggatatggcagagacattaccatattctcaccaagcgagagctcacaaaggagtacattgtggaggatcttcacggaagttacactcccccgaagctggatgcagagcacgaaggaagactgaaaatgctgaaacttctgtgaccgtgttttttaactgtcaaataaaggttgtaaggagtttcgggcacatgagagagacgagttcatacgtatatgttcacagagtgtctttcttttctttatcatgcgatgaaaagtacctaatggatattttgtcttatatatatttattataattatgg

SEQ ID NO: 102200 - protein, 321 aa, Arabidopsis thaliana; identical to SEQ ID NO: 25506
  peptide (1)..(321): Ceres Seq. ID no. 13609660
  misc_feature (63)..(114): Pfam Name: Zinc finger, C3HC4 type (RING finger) Pfam Description: Zinc finger, C3HC4 type (RING finger)
  misc_feature (1)..(321): Homolog of NCBI NO: 18391230 NR Description: zinc finger (C3HC4-type RING finger) protein [Arabidopsis thaliana] >gi|26449897|dbj|BAC42070.1| unknown [Arabidopsis thaliana] >gi|28827244|gb|AAO50466.1| unknown
  misc_feature (2)..(321): Homolog of NCBI NO: 21593635 NR Description: unknown [Arabidopsis thaliana]
  misc_feature (1)..(162): Homolog of NCBI NO: 25402638 NR Description: hypothetical protein [imported] - Arabidopsis
  misc_feature (195)..(321): Homolog of NCBI NO: 25402638 NR Description: hypothetical protein [imported] - Arabidopsis
  misc_feature (17)..(321): Homolog of NCBI NO: 40253895 NR Description: zinc finger (C3HC4-type RING finger) protein
  misc_feature (200)..(321): Homolog of NCBI NO: 34912564 NR Description: P0410E03.20 [Oryza sativa (japonica
  misc_feature (46)..(155): Homolog of NCBI NO: 34912564 NR Description: P0410E03.20 [Oryza sativa (japonica
  misc_feature (195)..(321): Homolog of NCBI NO: 15227153 NR Description: zinc finger (C3HC4-type RING finger) protein [Arabidopsis thaliana] >gi|25371329|pir||B84609 hypothetical
  misc_feature (49)..(159): Homolog of NCBI NO: 15227153 NR Description: zinc finger (C3HC4-type RING finger) protein [Arabidopsis thaliana] >gi|25371329|pir||B84609 hypothetical
  misc_feature (49)..(238): Homolog of NCBI NO: 28393273 NR Description: unknown protein [Arabidopsis thaliana]

SEQ ID NO: 102201 - protein, 320 aa, Arabidopsis thaliana; identical to SEQ ID NO: 25507
  peptide (1)..(320): Ceres Seq. ID no. 13609661
  misc_feature (62)..(113): Pfam Name: Zinc finger, C3HC4 type (RING finger) Pfam Description: Zinc finger, C3HC4 type (RING finger)
  misc_feature (1)..(320): Homolog of NCBI NO: 18391230 NR Description: zinc finger (C3HC4-type RING finger) protein [Arabidopsis thaliana] >gi|26449897|dbj|BAC42070.1| unknown [Arabidopsis thaliana] >gi|28827244|gb|AAO50466.1| unknown
  misc_feature (1)..(320): Homolog of NCBI NO: 21593635 NR Description: unknown [Arabidopsis thaliana]
  misc_feature (1)..(161): Homolog of NCBI NO: 25402638 NR Description: hypothetical protein [imported] - Arabidopsis
  misc_feature (194)..(320): Homolog of NCBI NO: 25402638 NR Description: hypothetical protein [imported] - Arabidopsis
  misc_feature (16)..(320): Homolog of NCBI NO: 40253895 NR Description: zinc finger (C3HC4-type RING finger) protein
  misc_feature (199)..(320): Homolog of NCBI NO: 34912564 NR Description: P0410E03.20 [Oryza sativa (japonica
  misc_feature (45)..(154): Homolog of NCBI NO: 34912564 NR Description: P0410E03.20 [Oryza sativa (japonica
  misc_feature (194)..(320): Homolog of NCBI NO: 15227153 NR Description: zinc finger (C3HC4-type RING finger) protein [Arabidopsis thaliana] >gi|25371329|pir||B84609 hypothetical
  misc_feature (48)..(158): Homolog of NCBI NO: 15227153 NR Description: zinc finger (C3HC4-type RING finger) protein [Arabidopsis thaliana] >gi|25371329|pir||B84609 hypothetical
  misc_feature (48)..(237): Homolog of NCBI NO: 28393273 NR Description: unknown protein [Arabidopsis thaliana]

SEQ ID NO: 102202 - protein, 239 aa, Arabidopsis thaliana; identical to SEQ ID NO: 25508
  peptide (1)..(239): Ceres Seq. ID no. 13609662
  misc_feature (1)..(239): Homolog of NCBI NO: 18391230 NR Description: zinc finger (C3HC4-type RING finger) protein [Arabidopsis thaliana] >gi|26449897|dbj|BAC42070.1| unknown [Arabidopsis thaliana] >gi|28827244|gb|AAO50466.1| unknown
  misc_feature (1)..(239): Homolog of NCBI NO: 21593635 NR Description: unknown [Arabidopsis thaliana]
  misc_feature (1)..(80): Homolog of NCBI NO: 25402638 NR Description: hypothetical protein [imported] - Arabidopsis
  misc_feature (113)..(239): Homolog of NCBI NO: 25402638 NR Description: hypothetical protein [imported] - Arabidopsis
  misc_feature (1)..(239): Homolog of NCBI NO: 40253895 NR Description: zinc finger (C3HC4-type RING finger) protein
  misc_feature (118)..(239): Homolog of NCBI NO: 34912564 NR Description: P0410E03.20 [Oryza sativa (japonica
  misc_feature (1)..(73): Homolog of NCBI NO: 34912564 NR Description: P0410E03.20 [Oryza sativa (japonica
  misc_feature (113)..(239): Homolog of NCBI NO: 15227153 NR Description: zinc finger (C3HC4-type RING finger) protein [Arabidopsis thaliana] >gi|25371329|pir||B84609 hypothetical
  misc_feature (1)..(77): Homolog of NCBI NO: 15227153 NR Description: zinc finger (C3HC4-type RING finger) protein [Arabidopsis thaliana] >gi|25371329|pir||B84609 hypothetical
  misc_feature (1)..(156): Homolog of NCBI NO: 28393273 NR Description: unknown protein [Arabidopsis thaliana]

SEQ ID NO: 102203 - DNA, 1824 bp, Arabidopsis thaliana
  misc_feature (1)..(1824): Ceres Seq. ID no. 13609682
  misc_feature: MA Experiment ID: 108434 Result: Down-regulated in Transcription
  misc_feature: MA Experiment 108434 PARAMETER Experiment Name: At_Root_Tips_cDNA_P Parameter: Tissue Value: Root Tips
  misc_feature: MA Experiment ID: 108435 Result: Up-regulated in Transcription
  misc_feature: MA Experiment 108435 PARAMETER Experiment Name: At_stm_Mutants_cDNA_P Parameter: Plant Line Value: wt Landsburg vs stm
  misc_feature: MA Experiment 108435 PARAMETER Experiment Name: At_stm_Mutants_cDNA_P Parameter: Tissue Value: Shoot Apical Meristem Region
  misc_feature: MA Experiment ID: 20000069 Result: Down-regulated in Transcription
  misc_feature: MA Experiment 20000069 PARAMETER Experiment Name: At_100uM_ABA_Mutants_cDNA_P Parameter: Plant Line Value: CS23
  misc_feature: MA Experiment 20000069 PARAMETER Experiment Name: At_100uM_ABA_Mutants_cDNA_P Parameter: Timepoint (hr) Value: 6
  misc_feature: MA Experiment 20000069 PARAMETER Experiment Name: At_100uM_ABA_Mutants_cDNA_P Parameter: Tissue Value: Aerial
  misc_feature: MA Experiment 20000069 PARAMETER Experiment Name: At_100uM_ABA_Mutants_cDNA_P Parameter: Treatment Value: 100uM ABA vs. No Treatment
  misc_feature: MA Experiment ID: 20000070 Result: Down-regulated in Transcription
  misc_feature: MA Experiment 20000070 PARAMETER Experiment Name: At_100uM_ABA_Mutants_cDNA_P Parameter: Plant Line Value: CS24
  misc_feature: MA Experiment 20000070 PARAMETER Experiment Name: At_100uM_ABA_Mutants_cDNA_P Parameter: Timepoint (hr) Value: 6
  misc_feature: MA Experiment 20000070 PARAMETER Experiment Name: At_100uM_ABA_Mutants_cDNA_P Parameter: Tissue Value: Aerial
  misc_feature: MA Experiment 20000070 PARAMETER Experiment Name: At_100uM_ABA_Mutants_cDNA_P Parameter: Treatment Value: 100uM ABA vs. No Treatment
  misc_feature: MA Experiment ID: 20000071 Result: Down-regulated in Transcription
  misc_feature: MA Experiment 20000071 PARAMETER Experiment Name: At_100uM_ABA_Mutants_cDNA_P Parameter: Plant Line Value: CS8104
  misc_feature: MA Experiment 20000071 PARAMETER Experiment Name: At_100uM_ABA_Mutants_cDNA_P Parameter: Timepoint (hr) Value: 6
  misc_feature: MA Experiment 20000071 PARAMETER Experiment Name: At_100uM_ABA_Mutants_cDNA_P Parameter: Tissue Value: Aerial
  misc_feature: MA Experiment 20000071 PARAMETER Experiment Name: At_100uM_ABA_Mutants_cDNA_P Parameter: Treatment Value: 100uM ABA vs. No Treatment
  misc_feature: MA Experiment ID: 20000117 Result: Down-regulated in Transcription
  misc_feature: MA Experiment 20000117 PARAMETER Experiment Name: At_100uM_ABA_Mutants_cDNA_P Parameter: Plant Line Value: Columbia
  misc_feature: MA Experiment 20000117 PARAMETER Experiment Name: At_100uM_ABA_Mutants_cDNA_P Parameter: Timepoint (hr) Value: 6
  misc_feature: MA Experiment 20000117 PARAMETER Experiment Name: At_100uM_ABA_Mutants_cDNA_P Parameter: Tissue Value: Aerial
  misc_feature: MA Experiment 20000117 PARAMETER Experiment Name: At_100uM_ABA_Mutants_cDNA_P Parameter: Treatment Value: 100uM ABA vs. No Treatment
  misc_feature: MA Experiment ID: 20000224 Result: Up-regulated in Transcription
  misc_feature: MA Experiment ID: 20000306 Result: Up-regulated in Transcription
  misc_feature: MA Experiment 20000306 PARAMETER Experiment Name: At_Germinating_Seeds_Sub_P Parameter: Age (hr) Value: 6 vs. 0
  misc_feature: MA Experiment 20000306 PARAMETER Experiment Name: At_Germinating_Seeds_Sub_P Parameter: Organism Value: A. thaliana
  misc_feature: MA Experiment 20000306 PARAMETER Experiment Name: At_Germinating_Seeds_Sub_P Parameter: Plant Line Value: WS
  misc_feature: MA Experiment 20000306 PARAMETER Experiment Name: At_Germinating_Seeds_Sub_P Parameter: Tissue Value: Germinating Seeds
  misc_feature: MA Experiment ID: 20000307 Result: Up-regulated in Transcription
  misc_feature: MA Experiment 20000307 PARAMETER Experiment Name: At_Germinating_Seeds_Sub_P Parameter: Age (hr) Value: 24 vs. 0
  misc_feature: MA Experiment 20000307 PARAMETER Experiment Name: At_Germinating_Seeds_Sub_P Parameter: Organism Value: A. thaliana
  misc_feature: MA Experiment 20000307 PARAMETER Experiment Name: At_Germinating_Seeds_Sub_P Parameter: Plant Line Value: WS
  misc_feature: MA Experiment 20000307 PARAMETER Experiment Name: At_Germinating_Seeds_Sub_P Parameter: Tissue Value: Germinating Seeds
  misc_feature: MA Experiment ID: 20000314 Result: Up-regulated in Transcription
  misc_feature: MA Experiment 20000314 PARAMETER Experiment Name: At_14day_Shoots-Roots_Sub_P Parameter: Age (day) Value: 14
  misc_feature: MA Experiment 20000314 PARAMETER Experiment Name: At_14day_Shoots-Roots_Sub_P Parameter: Organism Value: A. thaliana
  misc_feature: MA Experiment 20000314 PARAMETER Experiment Name: At_14day_Shoots-Roots_Sub_P Parameter: Plant Line Value: WS
  misc_feature: MA Experiment 20000314 PARAMETER Experiment Name: At_14day_Shoots-Roots_Sub_P Parameter: Tissue Value: Roots vs. Whole Plant
  misc_feature: MA Experiment ID: 20000327 Result: Down-regulated in Transcription
  misc_feature: MA Experiment 20000327 PARAMETER Experiment Name: At_42deg_Heat_Sub_P Parameter: Age (day) Value: 14
  misc_feature: MA Experiment 20000327 PARAMETER Experiment Name: At_42deg_Heat_Sub_P Parameter: Organism Value: A. thaliana
  misc_feature: MA Experiment 20000327 PARAMETER Experiment Name: At_42deg_Heat_Sub_P Parameter: Plant Line Value: WS
  misc_feature: MA Experiment 20000327 PARAMETER Experiment Name: At_42deg_Heat_Sub_P Parameter: Temperature (deg C) Value: 42 vs. 22
  misc_feature: MA Experiment 20000327 PARAMETER Experiment Name: At_42deg_Heat_Sub_P Parameter: Timepoint (hr) Value: 1
  misc_feature: MA Experiment 20000327 PARAMETER Experiment Name: At_42deg_Heat_Sub_P Parameter: Tissue Value: Aerial
  misc_feature: MA Experiment ID: 20000328 Result: Down-regulated in Transcription
  misc_feature: MA Experiment 20000328 PARAMETER Experiment Name: At_42deg_Heat_Sub_P Parameter: Age (day) Value: 14
  misc_feature: MA Experiment 20000328 PARAMETER Experiment Name: At_42deg_Heat_Sub_P Parameter: Organism Value: A. thaliana
  misc_feature: MA Experiment 20000328 PARAMETER Experiment Name: At_42deg_Heat_Sub_P Parameter: Plant Line Value: WS
  misc_feature: MA Experiment 20000328 PARAMETER Experiment Name: At_42deg_Heat_Sub_P Parameter: Temperature (deg C) Value: 42 vs. 22
  misc_feature: MA Experiment 20000328 PARAMETER Experiment Name: At_42deg_Heat_Sub_P Parameter: Timepoint (hr) Value: 6
  misc_feature: MA Experiment 20000328 PARAMETER Experiment Name: At_42deg_Heat_Sub_P Parameter: Tissue Value: Aerial
  misc_feature: MA Experiment ID: 20000329 Result: Up-regulated in Transcription
  misc_feature: MA Experiment 20000329 PARAMETER Experiment Name: At_4deg_Cold_Sub_P Parameter: Age (day) Value: 14
  misc_feature: MA Experiment 20000329 PARAMETER Experiment Name: At_4deg_Cold_Sub_P Parameter: Organism Value: A. thaliana
  misc_feature: MA Experiment 20000329 PARAMETER Experiment Name: At_4deg_Cold_Sub_P Parameter: Plant Line Value: WS
  misc_feature: MA Experiment 20000329 PARAMETER Experiment Name: At_4deg_Cold_Sub_P Parameter: Temperature (deg C) Value: 4 vs. 22
  misc_feature: MA Experiment 20000329 PARAMETER Experiment Name: At_4deg_Cold_Sub_P Parameter: Timepoint (hr) Value: 6
  misc_feature: MA Experiment 20000329 PARAMETER Experiment Name: At_4deg_Cold_Sub_P Parameter: Tissue Value: Aerial
  misc_feature: MA Experiment ID: 20000355 Result: Down-regulated in Transcription
  misc_feature: MA Experiment 20000355 PARAMETER Experiment Name: At_Siliques_Sub_P Parameter: Age (day) Value: 21
  misc_feature: MA Experiment 20000355 PARAMETER Experiment Name: At_Siliques_Sub_P Parameter: Organism Value: A. thaliana
  misc_feature: MA Experiment 20000355 PARAMETER Experiment Name: At_Siliques_Sub_P Parameter: Plant Line Value: WS
  misc_feature: MA Experiment 20000355 PARAMETER Experiment Name: At_Siliques_Sub_P Parameter: Tissue Value: Less Than 5mm Siliques vs. Whole Plant
aaagaatcattttacctctaaagccaaagaccaacatgtctaattcaaaccaaccacttctttccaaaccaaagtctcttaagcacaagaatctatgccttgtcctctccttcgtagccattcttggctctgtggctttcttcacagcccaattaatctccgttaacaccaacaataatgatgattccttattaactacgagccagatttgccatggagctcacgaccaagactcatgccaagctctcttgtccgaattcacgacgttgtcgctctcaaagctcaaccgccttgacctattgcacgtgtttttgaagaactcggtgtggcggcttgagagcacgatgaccatggtgagcgaggctaggatccgctcgaacggtgttagagacaaggcaggttttgctgactgcgaggagatgatggacgtatcaaaggatcggatgatgagttcgatggaggaacttcgcggaggaaactataatcttgagtcatactcaaacgttcatacttggctgagcagtgtgcttacaaactacatgacatgtttagaaagtattagtgatgtctccgtcaactctaagcaaatagtcaagccacaactcgaggacttggtttctagggcaagagtggctctagccatctttgtctccgtcttgcctgccagagacgatctcaaaatgatcatttccaatcgcttcccgtcgtggctaactgctcttgacagaaagcttttagaatcttctcccaagacacttaaggtgaccgcgaacgttgtggtggcaaaagacggcaccggaaagttcaaaacagtgaatgaggcagtggcggcagcaccggagaacagcaatacaagatacgttatatacgtaaagaaaggggtttacaaagaaactattgacataggaaagaaaaagaagaacttaatgcttgttggtgatggcaaagacgcaacgatcataaccggtagtttgaatgtcattgatggatccaccaccttcagatcagccactgttgctgccaatggagacgggtttatggcacaagacatatggttccaaaacactgcagggccggcaaagcaccaggctgtggctctacgagtgagtgctgatcaaactgttataaatcgttgtcgcatagatgcgtatcaagacacgctctacactcacacgttgagacaattctaccgcgacagctacatcaccggtaccgtagatttcatcttcggaaactctgctgtggtattccagaactgcgacatcgtggcacgaaatcctggagctgggcaaaagaacatgttaacggctcaaggacgggaggatcagaaccagaacaccgccatttcgatccaaaaatgtaagataacggctagttcggatcttgctcctgtaaaaggatctgtgaaaacgttccttggtcgaccgtggaagttgtactcaagaacagtgatcatgcagtctttcattgacaaccacattgacccggctggttggttcccatgggatggtgagtttgcgctctccacattgtattatggagagtatgcaaataccggtcctggagcggatacgagtaagagagtgaattggaagggatttaaagttattaaagactcaaaagaggccgaacaattcactgtggcgaagcttattcaaggaggattatggttgaaacccactggagttactttccaagagtggctttgattttaatgtctacttgttcttgtactttgtgttgtgttacctctgttttagtttgatgtattttttctggtttgttttgtatgacttacccaataaataacatgctctgtttcgc

SEQ ID NO: 102204 - protein, 568 aa, Arabidopsis thaliana
  peptide (1)..(568): Ceres Seq. ID no. 13609683
  misc_feature (257)..(554): Pfam Name: Pectinesterase Pfam Description: Pectinesterase
  misc_feature (12)..(568): Homolog of NCBI NO: 15220424 NR Description: pectin methylesterase, putative [Arabidopsis
  misc_feature (12)..(568): Homolog of NCBI NO: 14334992 NR Description: At1g11580/T23J18_33 [Arabidopsis thaliana]
  misc_feature (1)..(338): Homolog of NCBI NO: 6554190 NR Description: T23J18.23 [Arabidopsis thaliana]
  misc_feature (15)..(568): Homolog of NCBI NO: 20269071 NR Description: pectin methylesterase [Sesbania rostrata]
  misc_feature (17)..(568): Homolog of NCBI NO: 7447372 NR Description: pectinesterase (EC 3.1.1.11) precursor - garden
  misc_feature (17)..(568): Homolog of NCBI NO: 29539385 NR Description: pectin methylesterase [Pisum sativum]
  misc_feature (17)..(568): Homolog of NCBI NO: 7447371 NR Description: probable pectinesterase (EC 3.1.1.11) precursor - pea >gi|3088646|gb|AAC14742.1| pectin methylesterase [Pisum
  misc_feature (15)..(568): Homolog of NCBI NO: 29539387 NR Description: pectin methylesterase [Pisum sativum]
  misc_feature (12)..(301): Homolog of NCBI NO: 15081650 NR Description: At1g11580/T23J18_33 [Arabidopsis thaliana]
  misc_feature (12)..(568): Homolog of NCBI NO: 6093734 NR Description: Pectinesterase 2 precursor (Pectin methylesterase (PE 2) >gi|1617584|gb|AAB38792.1| pectin methylesterase
RIILPLKPKTNMSNSNQPLLSKPKSLKHKNLCLVLSFVAILGSVAFFTAQLISVNTNNNDDSLLTTSQICHGAHDQDSCQALLSEFTTLSLSKLNRLDLLHVFLKNSVWRLESTMTMVSEARIRSNGVRDKAGFADCEEMMDVSKDRMMSSMEELRGGNYNLESYSNVHTWLSSVLTNYMTCLESISDVSVNSKQIVKPQLEDLVSRARVALAIFVSVLPARDDLKMIISNRFPSWLTALDRKLLESSPKTLKVTANVVVAKDGTGKFKTVNEAVAAAPENSNTRYVIYVKKGVYKETIDIGKKKKNLMLVGDGKDATIITGSLNVIDGSTTFRSATVAANGDGFMAQDIWFQNTAGPAKHQAVALRVSADQTVINRCRIDAYQDTLYTHTLRQFYRDSYITGTVDFIFGNSAVVFQNCDIVARNPGAGQKNMLTAQGREDQNQNTAISIQKCKITASSDLAPVKGSVKTFLGRPWKLYSRTVIMQSFIDNHIDPAGWFPWDGEFALSTLYYGEYANTGPGADTSKRVNWKGFKVIKDSKEAEQFTVAKLIQGGLWLKPTGVTFQEWL

SEQ ID NO: 102205 - protein, 557 aa, Arabidopsis thaliana; identical to SEQ ID NO: 22605
  peptide (1)..(557): Ceres Seq. ID no. 13609684
  misc_feature (246)..(543): Pfam Name: Pectinesterase Pfam Description: Pectinesterase
  misc_feature (1)..(557): Homolog of NCBI NO: 15220424 NR Description: pectin methylesterase, putative [Arabidopsis
  misc_feature (1)..(557): Homolog of NCBI NO: 14334992 NR Description: At1g11580/T23J18_33 [Arabidopsis thaliana]
  misc_feature (1)..(327): Homolog of NCBI NO: 6554190 NR Description: T23J18.23 [Arabidopsis thaliana]
  misc_feature (4)..(557): Homolog of NCBI NO: 20269071 NR Description: pectin methylesterase [Sesbania rostrata]
  misc_feature (6)..(557): Homolog of NCBI NO: 7447372 NR Description: pectinesterase (EC 3.1.1.11) precursor - garden
  misc_feature (6)..(557): Homolog of NCBI NO: 29539385 NR Description: pectin methylesterase [Pisum sativum]
  misc_feature (6)..(557): Homolog of NCBI NO: 7447371 NR Description: probable pectinesterase (EC 3.1.1.11) precursor - pea >gi|3088646|gb|AAC14742.1| pectin methylesterase [Pisum
  misc_feature (4)..(557): Homolog of NCBI NO: 29539387 NR Description: pectin methylesterase [Pisum sativum]
  misc_feature (1)..(290): Homolog of NCBI NO: 15081650 NR Description: At1g11580/T23J18_33 [Arabidopsis thaliana]
  misc_feature (1)..(557): Homolog of NCBI NO: 6093734 NR Description: Pectinesterase 2 precursor (Pectin methylesterase (PE 2) >gi|1617584|gb|AAB38792.1| pectin methylesterase

SEQ ID NO: 102206 - protein, 454 aa, Arabidopsis thaliana; identical to SEQ ID NO: 22606
  peptide (1)..(454): Ceres Seq. ID no. 13609685
  misc_feature (143)..(440): Pfam Name: Pectinesterase Pfam Description: Pectinesterase
  misc_feature (1)..(454): Homolog of NCBI NO: 15220424 NR Description: pectin methylesterase, putative [Arabidopsis
  misc_feature (1)..(454): Homolog of NCBI NO: 14334992 NR Description: At1g11580/T23J18_33 [Arabidopsis thaliana]
  misc_feature (1)..(224): Homolog of NCBI NO: 6554190 NR Description: T23J18.23 [Arabidopsis thaliana]
  misc_feature (1)..(454): Homolog of NCBI NO: 20269071 NR Description: pectin methylesterase [Sesbania rostrata]
  misc_feature (1)..(454): Homolog of NCBI NO: 7447372 NR Description: pectinesterase (EC 3.1.1.11) precursor - garden
  misc_feature (1)..(454): Homolog of NCBI NO: 29539385 NR Description: pectin methylesterase [Pisum sativum]
  misc_feature (1)..(454): Homolog of NCBI NO: 7447371 NR Description: probable pectinesterase (EC 3.1.1.11) precursor - pea >gi|3088646|gb|AAC14742.1| pectin methylesterase [Pisum
  misc_feature (1)..(454): Homolog of NCBI NO: 29539387 NR Description: pectin methylesterase [Pisum sativum]
  misc_feature (1)..(187): Homolog of NCBI NO: 15081650 NR Description: At1g11580/T23J18_33 [Arabidopsis thaliana]
  misc_feature (1)..(454): Homolog of NCBI NO: 6093734 NR Description: Pectinesterase 2 precursor (Pectin methylesterase (PE 2) >gi|1617584|gb|AAB38792.1| pectin methylesterase

SEQ ID NO: 102207 - DNA, 1771 bp, Arabidopsis thaliana
  misc_feature (1)..(1771): Ceres Seq. ID no. 13609686
  misc_feature: MA Experiment ID: 108461 Result: Up-regulated in Transcription
  misc_feature: MA Experiment 108461 PARAMETER Experiment Name: At_Germinating_Seeds_cDNA_P Parameter: Age (day) Value: 1 vs. 0
  misc_feature: MA Experiment 108461 PARAMETER Experiment Name: At_Germinating_Seeds_cDNA_P Parameter: Tissue Value: Germinating Seeds
  misc_feature: MA Experiment ID: 108462 Result: Up-regulated in Transcription
  misc_feature: MA Experiment 108462 PARAMETER Experiment Name: At_Germinating_Seeds_cDNA_P Parameter: Age (day) Value: 2 vs. 0
  misc_feature: MA Experiment 108462 PARAMETER Experiment Name: At_Germinating_Seeds_cDNA_P Parameter: Tissue Value: Germinating Seeds
  misc_feature: MA Experiment ID: 108463 Result: Up-regulated in Transcription
  misc_feature: MA Experiment 108463 PARAMETER Experiment Name: At_Germinating_Seeds_cDNA_P Parameter: Age (day) Value: 3 vs. 0
  misc_feature: MA Experiment 108463 PARAMETER Experiment Name: At_Germinating_Seeds_cDNA_P Parameter: Tissue Value: Germinating Seeds
  misc_feature: MA Experiment ID: 108569 Result: Up-regulated in Transcription
  misc_feature: MA Experiment 108569 PARAMETER Experiment Name: At_0.001%_MeJA__cDNA_P Parameter: Timepoint (hr) Value: 6
  misc_feature: MA Experiment 108569 PARAMETER Experiment Name: At_0.001%_MeJA__cDNA_P Parameter: Tissue Value: Aerial
  misc_feature: MA Experiment 108569 PARAMETER Experiment Name: At_0.001%_MeJA__cDNA_P Parameter: Treatment Value: 0.001% MeJA vs. No Treatment
  misc_feature: MA Experiment ID: 108572 Result: Up-regulated in Transcription
  misc_feature: MA Experiment 108572 PARAMETER Experiment Name: At_Drought_cDNA_P Parameter: Timepoint (hr) Value: 1
  misc_feature: MA Experiment 108572 PARAMETER Experiment Name: At_Drought_cDNA_P Parameter: Tissue Value: Aerial
  misc_feature: MA Experiment 108572 PARAMETER Experiment Name: At_Drought_cDNA_P Parameter: Treatment Value: Drought vs. No Drought
  misc_feature: MA Experiment ID: 108573 Result: Up-regulated in Transcription
  misc_feature: MA Experiment 108573 PARAMETER Experiment Name: At_Drought_cDNA_P Parameter: Timepoint (hr) Value: 6
  misc_feature: MA Experiment 108573 PARAMETER Experiment Name: At_Drought_cDNA_P Parameter: Tissue Value: Aerial
  misc_feature: MA Experiment 108573 PARAMETER Experiment Name: At_Drought_cDNA_P Parameter: Treatment Value: Drought vs. No Drought
  misc_feature: MA Experiment ID: 108595 Result: Up-regulated in Transcription
  misc_feature: MA Experiment 108595 PARAMETER Experiment Name: At_Ler-pi_Ovule_cDNA_P Parameter: Plant Line Value: null
  misc_feature: MA Experiment ID: 20000171 Result: Down-regulated in Transcription
  misc_feature: MA Experiment 20000171 PARAMETER Experiment Name: At_42deg_Heat_P Parameter: Age (day) Value: 14
  misc_feature: MA Experiment 20000171 PARAMETER Experiment Name: At_42deg_Heat_P Parameter: Organism Value: A. thaliana
  misc_feature: MA Experiment 20000171 PARAMETER Experiment Name: At_42deg_Heat_P Parameter: Plant Line Value: WS
  misc_feature: MA Experiment 20000171 PARAMETER Experiment Name: At_42deg_Heat_P Parameter: Temperature (deg C) Value: 42 vs. 22
  misc_feature: MA Experiment 20000171 PARAMETER Experiment Name: At_42deg_Heat_P Parameter: Timepoint (hr) Value: 1
  misc_feature: MA Experiment 20000171 PARAMETER Experiment Name: At_42deg_Heat_P Parameter: Tissue Value: Aerial
  misc_feature: MA Experiment ID: 20000180 Result: Up-regulated in Transcription
  misc_feature: MA Experiment 20000180 PARAMETER Experiment Name: At_Germinating_Seeds_P Parameter: Age (hr) Value: 24 vs. 0
  misc_feature: MA Experiment 20000180 PARAMETER Experiment Name: At_Germinating_Seeds_P Parameter: Tissue Value: Germinating Seeds
  misc_feature: MA Experiment ID: 20000184 Result: Up-regulated in Transcription
  misc_feature: MA Experiment 20000184 PARAMETER Experiment Name: At_Shoots__P Parameter: Age (day) Value: 7
  misc_feature: MA Experiment 20000184 PARAMETER Experiment Name: At_Shoots__P Parameter: Tissue Value: Shoots vs. Whole Plant
  misc_feature: MA Experiment ID: 20000234 Result: Down-regulated in Transcription
  misc_feature: MA Experiment 20000234 PARAMETER Experiment Name: At_Siliques_P Parameter: Age (day) Value: 21
  misc_feature: MA Experiment 20000234 PARAMETER Experiment Name: At_Siliques_P Parameter: Organism Value: A. thaliana
  misc_feature: MA Experiment 20000234 PARAMETER Experiment Name: At_Siliques_P Parameter: Plant Line Value: WS
  misc_feature: MA Experiment 20000234 PARAMETER Experiment Name: At_Siliques_P Parameter: Tissue Value: Less Than 5mm Siliques vs. Whole Plant
  misc_feature: MA Experiment ID: 20000235 Result: Down-regulated in Transcription
  misc_feature: MA Experiment 20000235 PARAMETER Experiment Name: At_Siliques_P Parameter: Age (day) Value: 21
  misc_feature: MA Experiment 20000235 PARAMETER Experiment Name: At_Siliques_P Parameter: Organism Value: A. thaliana
  misc_feature: MA Experiment 20000235 PARAMETER Experiment Name: At_Siliques_P Parameter: Plant Line Value: WS
  misc_feature: MA Experiment 20000235 PARAMETER Experiment Name: At_Siliques_P Parameter: Tissue Value: 5-10mm Siliques vs. Whole Plant
  misc_feature: MA Experiment ID: 20000265 Result: Up-regulated in Transcription
  misc_feature: MA Experiment 20000265 PARAMETER Experiment Name: At_Open_Flower_P Parameter: Age (day) Value: 21
  misc_feature: MA Experiment 20000265 PARAMETER Experiment Name: At_Open_Flower_P Parameter: Plant Line Value: WS
  misc_feature: MA Experiment 20000265 PARAMETER Experiment Name: At_Open_Flower_P Parameter: Tissue Value: Closed Flower vs. Whole Plant
  misc_feature: MA Experiment ID: 20000286 Result: Up-regulated in Transcription
  misc_feature: MA Experiment 20000286 PARAMETER Experiment Name: At_Open_Flower_P Parameter: Age (day) Value: 21
  misc_feature: MA Experiment 20000286 PARAMETER Experiment Name: At_Open_Flower_P Parameter: Plant Line Value: WS
  misc_feature: MA Experiment 20000286 PARAMETER Experiment Name: At_Open_Flower_P Parameter: Tissue Value: Half Open vs. Whole Plant
  misc_feature: MA Experiment ID: 20000438 Result: Up-regulated in Transcription
  misc_feature: MA Experiment 20000438 PARAMETER Experiment Name: At_Shoots__P Parameter: Age (day) Value: 14
  misc_feature: MA Experiment 20000438 PARAMETER Experiment Name: At_Shoots__P Parameter: Tissue Value: Shoots vs. Whole Plant
  misc_feature: MA Experiment ID: 20000573 Result: Down-regulated in Transcription
  misc_feature: MA Experiment 20000573 PARAMETER Experiment Name: At_100uM_ABA_Mutants__P Parameter: Organism Value: A. thaliana
  misc_feature: MA Experiment 20000573 PARAMETER Experiment Name: At_100uM_ABA_Mutants__P Parameter: Plant Line Value: CS22 vs. Ler wt
  misc_feature: MA Experiment 20000573 PARAMETER Experiment Name: At_100uM_ABA_Mutants__P Parameter: Timepoint (hr) Value: N/A
  misc_feature: MA Experiment 20000573 PARAMETER Experiment Name: At_100uM_ABA_Mutants__P Parameter: Tissue Value: Whole Plant
  misc_feature: MA Experiment 20000573 PARAMETER Experiment Name: At_100uM_ABA_Mutants__P Parameter: Treatment Value: None
  misc_feature: MA Experiment ID: 20000574 Result: Down-regulated in Transcription
  misc_feature: MA Experiment 20000574 PARAMETER Experiment Name: At_100uM_ABA_Mutants__P Parameter: Organism Value: A. thaliana
  misc_feature: MA Experiment 20000574 PARAMETER Experiment Name: At_100uM_ABA_Mutants__P Parameter: Plant Line Value: CS23 vs. Ler wt
  misc_feature: MA Experiment 20000574 PARAMETER Experiment Name: At_100uM_ABA_Mutants__P Parameter: Timepoint (hr) Value: N/A
  misc_feature: MA Experiment 20000574 PARAMETER Experiment Name: At_100uM_ABA_Mutants__P Parameter: Tissue Value: Whole Plant
  misc_feature: MA Experiment 20000574 PARAMETER Experiment Name: At_100uM_ABA_Mutants__P Parameter: Treatment Value: None
  misc_feature: MA Experiment ID: 20001248 Result: Down-regulated in Transcription
  misc_feature: MA Experiment 20001248 PARAMETER Experiment Name: At_Far-red-induction_P Parameter: Age (day) Value: 7
  misc_feature: MA Experiment 20001248 PARAMETER Experiment Name: At_Far-red-induction_P Parameter: Light Value: Far-red vs. White
  misc_feature: MA Experiment 20001248 PARAMETER Experiment Name: At_Far-red-induction_P Parameter: Organism Value: A. thaliana
  misc_feature: MA Experiment 20001248 PARAMETER Experiment Name: At_Far-red-induction_P Parameter: Plant Line Value: Columbia
  misc_feature: MA Experiment 20001248 PARAMETER Experiment Name: At_Far-red-induction_P Parameter: Timepoint (hr) Value: 4
  misc_feature: MA Experiment 20001248 PARAMETER Experiment Name: At_Far-red-induction_P Parameter: Tissue Value: Whole Plant
  misc_feature: MA Experiment ID: 20001451 Result: Down-regulated in Transcription
  misc_feature: MA Experiment 20001451 PARAMETER Experiment Name: At_Far-red-induction_P Parameter: Age (day) Value: 7
  misc_feature: MA Experiment 20001451 PARAMETER Experiment Name: At_Far-red-induction_P Parameter: Light Value: Far-red vs. White
  misc_feature: MA Experiment 20001451 PARAMETER Experiment Name: At_Far-red-induction_P Parameter: Organism Value: A. thaliana
  misc_feature: MA Experiment 20001451 PARAMETER Experiment Name: At_Far-red-induction_P Parameter: Plant Line Value: Columbia
  misc_feature: MA Experiment 20001451 PARAMETER Experiment Name: At_Far-red-induction_P Parameter: Timepoint (hr) Value: 24
  misc_feature: MA Experiment 20001451 PARAMETER Experiment Name: At_Far-red-induction_P Parameter: Tissue Value: Whole Plant
  misc_feature: MA Experiment ID: 20001557 Result: Up-regulated in Transcription
  misc_feature: MA Experiment 20001557 PARAMETER Experiment Name: At_Drought_Soil_Dry_P Parameter: Age (day) Value: 27
  misc_feature: MA Experiment 20001557 PARAMETER Experiment Name: At_Drought_Soil_Dry_P Parameter: Organism Value: A. thaliana
  misc_feature: MA Experiment 20001557 PARAMETER Experiment Name: At_Drought_Soil_Dry_P Parameter: Plant Line Value: WS
  misc_feature: MA Experiment 20001557 PARAMETER Experiment Name: At_Drought_Soil_Dry_P Parameter: Post Timepoint (hr) Value: 3
  misc_feature: MA Experiment 20001557 PARAMETER Experiment Name: At_Drought_Soil_Dry_P Parameter: Post-Treatment Value: Re-Water vs. No Drought
  misc_feature: MA Experiment 20001557 PARAMETER Experiment Name: At_Drought_Soil_Dry_P Parameter: Timepoint (day) Value: 13
  misc_feature: MA Experiment 20001557 PARAMETER Experiment Name: At_Drought_Soil_Dry_P Parameter: Treatment Value: Drought vs. No Drought
actctaaacttgttcaaaactctgactaacattcttcttcacttatctcccatctttctctcttcaataataataaacatggatctcaccgacgtaatcatattcttgttcgctctctatttcatcaacctatggtggcgccggtacttttccgccggaagcagccagtgtagcttgaacattccaccgggaccaaaaggatggccactagtcggaaacctactccaagtcatattccaacgtcgccatttcgtcttcttaatgcgtgacctacgtaaaaagtatggtccaatattcaccatgcagatgggacaacgtacgatgattatcatcacggacgaaaaactcatccacgaggcactagtccaacgcggccctacattcgcttcccggcctccggactcgccgatccggctcatgtttagtgttgggaaatgcgctataaactcggcggagtacggatctttgtggaggactctgaggaggaactttgtgacagagctagtgaccgcgccgagagtgaagcagtgctcgtggataaggagttgggctatgcagaatcatatgaagaggattaaaacggagaatgttgagaaaggtttcgtggaggttatgagccaatgtaggctaacgatttgtagtatcttgatctgtctttgtttcggtgccaagatcagcgaggaaaagattaagaacattgagaatgttcttaaggacgttatgcttataacttctccgacgttacctgactttttgccggttttcactccgttgtttcggcgtcaagttagagaagctagagagctgaggaagacgcagctcgagtgtctcgtgccgttgataagaaaccgtcgtaagttcgttgatgcaaaggagaatcctaacgaagagatggttagtccgattggtgcagcttatgtggattctttgtttcgtttgaacttgatcgagagaggtggtgagcttggagatgaagagattgtgactttgtgctcggagattgtctctgccggtacggacacgagtgcaacgacgcttgaatgggcgttatttcatctagtgactgaccaaaacattcaagagaagttatatgaggaagttgttggagttgttggcaaaaacggcgtcgttgaagaggatgacgtggcgaaaatgccttatttagaagccatcgtgaaagagactctccgacgacatcctccgggacattttcttctctctcacgccgccgtgaaagacacggagctaggagggtatgatattccggcaggggcgtatgtggaaatttacactgcttgggttactgagaacccggatatttggtcggatcctggtaagtttcgacccgagaggtttttaaccggtggggacggggttgatgctgactggacggggacacgtggtgttacaatgttgccttttggtgcgggtcgtaggatctgcccggcttggtctttagggattctgcacatcaacttgatgcttgcaaggatgatccattcgtttaaatggatcccggttccggattctccacccgacccgactgagacgtacgccttcacggtcgttatgaaaaattctctcaaagcgcaaatcaggtcaaggacctaacggatatgtttagtttttgtaagcgtgtggggtaattaaaagttataattccttagtacgtcacattaatctttgctatttttaatgttgtttatgtctatctttatctattctcaaggagtgtaaaatatatataatcatatgcagtttctgttccttc

SEQ ID NO: 102208 - protein, 536 aa, Arabidopsis thaliana; identical to SEQ ID NO: 40997
  peptide (1)..(536): Ceres Seq. ID no. 13609687
  misc_feature (62)..(534): Pfam Name: Cytochrome P450 Pfam Description: Cytochrome P450
  misc_feature (27)..(536): Homolog of NCBI NO: 15221065 NR Description: cytochrome P450, putative [Arabidopsis thaliana]

SEQ ID NO: 102209 - protein, 510 aa, Arabidopsis thaliana; identical to SEQ ID NO: 40998
  peptide (1)..(510): Ceres Seq. ID no. 13609688
  misc_feature (36)..(508): Pfam Name: Cytochrome P450 Pfam Description: Cytochrome P450
  misc_feature (1)..(510): Homolog of NCBI NO: 15221065 NR Description: cytochrome P450, putative [Arabidopsis thaliana]

SEQ ID NO: 102210 - protein, 449 aa, Arabidopsis thaliana; identical to SEQ ID NO: 40999
  peptide (1)..(449): Ceres Seq. ID no. 13609689
  misc_feature (1)..(447): Pfam Name: Cytochrome P450 Pfam Description: Cytochrome P450
  misc_feature (1)..(449): Homolog of NCBI NO: 15221065 NR Description: cytochrome P450, putative [Arabidopsis thaliana]

SEQ ID NO: 102211 - DNA, 1173 bp, Arabidopsis thaliana
  misc_feature (1)..(1173): Ceres Seq. ID no. 13609694
  misc_feature: MA Experiment ID: 20000179 Result: Down-regulated in Transcription
  misc_feature: MA Experiment 20000179 PARAMETER Experiment Name: At_Germinating_Seeds_P Parameter: Age (hr) Value: 6 vs. 0
  misc_feature: MA Experiment 20000179 PARAMETER Experiment Name: At_Germinating_Seeds_P Parameter: Tissue Value: Germinating Seeds
  misc_feature: MA Experiment ID: 20000180 Result: Down-regulated in Transcription
  misc_feature: MA Experiment 20000180 PARAMETER Experiment Name: At_Germinating_Seeds_P Parameter: Age (hr) Value: 24 vs. 0
  misc_feature: MA Experiment 20000180 PARAMETER Experiment Name: At_Germinating_Seeds_P Parameter: Tissue Value: Germinating Seeds
  misc_feature: MA Experiment ID: 20000184 Result: Down-regulated in Transcription
  misc_feature: MA Experiment 20000184 PARAMETER Experiment Name: At_Shoots__P Parameter: Age (day) Value: 7
  misc_feature: MA Experiment 20000184 PARAMETER Experiment Name: At_Shoots__P Parameter: Tissue Value: Shoots vs. Whole Plant
  misc_feature: MA Experiment ID: 20000264 Result: Down-regulated in Transcription
  misc_feature: MA Experiment 20000264 PARAMETER Experiment Name: At_Open_Flower_P Parameter: Age (day) Value: 21
  misc_feature: MA Experiment 20000264 PARAMETER Experiment Name: At_Open_Flower_P Parameter: Plant Line Value: WS
  misc_feature: MA Experiment 20000264 PARAMETER Experiment Name: At_Open_Flower_P Parameter: Tissue Value: Open Flower vs. Whole Plant
  misc_feature: MA Experiment ID: 20000286 Result: Down-regulated in Transcription
  misc_feature: MA Experiment 20000286 PARAMETER Experiment Name: At_Open_Flower_P Parameter: Age (day) Value: 21
  misc_feature: MA Experiment 20000286 PARAMETER Experiment Name: At_Open_Flower_P Parameter: Plant Line Value: WS
  misc_feature: MA Experiment 20000286 PARAMETER Experiment Name: At_Open_Flower_P Parameter: Tissue Value: Half Open vs. Whole Plant
  misc_feature: MA Experiment ID: 20000527 Result: Up-regulated in Transcription
  misc_feature: MA Experiment 20000527 PARAMETER Experiment Name: At_10percent_PEG_P Parameter: Age (day) Value: 20
  misc_feature: MA Experiment 20000527 PARAMETER Experiment Name: At_10percent_PEG_P Parameter: Organism Value: A. thaliana
  misc_feature: MA Experiment 20000527 PARAMETER Experiment Name: At_10percent_PEG_P Parameter: Plant Line Value: WS
  misc_feature: MA Experiment 20000527 PARAMETER Experiment Name: At_10percent_PEG_P Parameter: Timepoint (day) Value: 20
  misc_feature: MA Experiment 20000527 PARAMETER Experiment Name: At_10percent_PEG_P Parameter: Tissue Value: Whole Plant
  misc_feature: MA Experiment 20000527 PARAMETER Experiment Name: At_10percent_PEG_P Parameter: Treatment Value: 10percent PEG vs. No Treatment
atgacggcggatcaagaactacaaatcattgttcggcagggaaaagaaccaaatccaacagttcaagatgaaagaaattcagtcagtagcagccaagcagaagtatctcactctaacacatacaaacggtggctcagggtgactttatatacattctttgtcatttcaggccaaacagttgctacaattttgggcagagtatactatgacaacggaggaaacagtaaatggctagcaacggtagttcaacttgttggctttcctgtgctacttccatattatatcttgtcatttaaaacacatgcaacaactgatagagatggaaaaagaacctcacctaggaaccgtgtattggtttacgtagtgcttggacttcttgtaggagcagattgctatctgtactccattggacttctttacttacccgtttctacctattccctgatctgtgcatctcagttagccttcaatgctttcttctcttattttcttaactcacaaaaacttacccctatcattttaaattctcttttcctcctaactatatcttccaccctacttgcattcaataatgaggagacagactccacaaaagttacaaaaggagagtatgtcaaaggtttcatatgcaccgttgctgcgtctgctggttatggtctagtcttatccctacaacagctagcctttctaaaagtcctaaagaagcaaaatttctcagaagttatggatatgataatctacgtgagtctagtggccagttgtgttagcgtggtggggctttttgctagcagtgagtggaaaactttgagcagtgaaatggataactacaaacatgggaaggtatcctacattatgaacctagtgtggacagctgttacctggcaggtattctccatcggtggcacaggactgatcttcgagctctcctctctattctcaaatgcaataagcgttttgggactcccagtggttcctatcttggctgtaatcattttccatgacaaaatgaatgggttaaaggtgatttctatgatcctagctatttggggtttcacttcctatgtctaccaacaatatcttgatgacaaaaacttgaagaaaaatcatgaaatcacaacaacagaatcccctgacccaccagaagcagaagagtcaacttggcaatcaaaataa

SEQ ID NO: 102212 - protein, 390 aa, Arabidopsis thaliana
  peptide (1)..(390): Ceres Seq. ID no. 13609695
  misc_feature (190)..(372): Pfam Name: Domain of unknown function, DUF250 Pfam Description: Domain of unknown function, DUF250
  misc_feature (1)..(390): Homolog of NCBI NO: 30684325 NR Description: purine permease family [Arabidopsis thaliana]
  misc_feature (67)..(390): Homolog of NCBI NO: 7487849 NR Description: hypothetical protein T9A21.60 - Arabidopsis >gi|2832695|emb|CAA16793.1| putative protein [Arabidopsis >gi|7268614|emb|CAB78823.1| putative protein [Arabidopsis
  misc_feature (55)..(390): Homolog of NCBI NO: 15236799 NR Description: purine permease family [Arabidopsis thaliana]
  misc_feature (16)..(379): Homolog of NCBI NO: 15236796 NR Description: purine permease family [Arabidopsis thaliana]
  misc_feature (6)..(366): Homolog of NCBI NO: 15236796 NR Description: purine permease family [Arabidopsis thaliana]
  misc_feature (24)..(366): Homolog of NCBI NO: 18491221 NR Description: unknown protein [Arabidopsis thaliana]
  misc_feature (3)..(380): Homolog of NCBI NO: 15219436 NR Description: purine permease family [Arabidopsis thaliana]
  misc_feature (29)..(367): Homolog of NCBI NO: 38605752 NR Description: OSJNBb0016D16.5 [Oryza sativa (japonica
  misc_feature (29)..(367): Homolog of NCBI NO: 38344290 NR Description: OSJNBa0013K16.22 [Oryza sativa (japonica
  misc_feature (31)..(384): Homolog of NCBI NO: 15236794 NR Description: purine permease family [Arabidopsis thaliana]
MTADQELQIIVRQGKEPNPTVQDERNSVSSSQAEVSHSNTYKRWLRVTLYTFFVISGQTVATILGRVYYDNGGNSKWLATVVQLVGFPVLLPYYILSFKTHATTDRDGKRTSPRNRVLVYVVLGLLVGADCYLYSIGLLYLPVSTYSLICASQLAFNAFFSYFLNSQKLTPIILNSLFLLTISSTLLAFNNEETDSTKVTKGEYVKGFICTVAASAGYGLVLSLQQLAFLKVLKKQNFSEVMDMIIYVSLVASCVSVVGLFASSEWKTLSSEMDNYKHGKVSYIMNLVWTAVTWQVFSIGGTGLIFELSSLFSNAISVLGLPVVPILAVIIFHDKMNGLKVISMILAIWGFTSYVYQQYLDDKNLKKNHEITTTESPDPPEAEESTWQSK

SEQ ID NO: 102213 - DNA, 1190 bp, Arabidopsis thaliana
  misc_feature (1)..(1190): Ceres Seq. ID no. 13609719
  misc_feature: MA Experiment ID: 20000184 Result: Down-regulated in Transcription
  misc_feature: MA Experiment 20000184 PARAMETER Experiment Name: At_Shoots__P Parameter: Age (day) Value: 7
  misc_feature: MA Experiment 20000184 PARAMETER Experiment Name: At_Shoots__P Parameter: Tissue Value: Shoots vs. Whole Plant
caacataactcttttgcttaagcctcaaaaaattgtcattaacccaatttcccagaaacttcaaaaacagttgggggaagaagaagaagatgaaacgacgaagaacccttttataaagtctcaatcttctaatccaagatctgccctttttcagattctatctcaaagctttcctcgatcttgtgatgtattgaagccggagactgagagagatgttgtgcttcaaaggctcggttaagcggaagaagcaatccggttctgttccggtttatctgaatgtctacgatctaactcctatgaatgcttatggttattggcttggacttggtgtttttcattctggtgttgaagttcatggagttgaatatgcatttggagcacatgaatcatcaagcacaggtatttttgaagtggaaccaaagaagtgtcctggtttcacgtttaggaaatcgattcttgtggggaaaaccgacttggttgcgaaagaagttcgtgtttttatggagaaattagctgaagagtatcaaggaaacaagtaccatctcatcacaaggaactgcaaccatttttgcaatgaagtttgtcttaaacttgctcagaaatcaatccctagatgggtgaatcgacttgctcgcttaggggttctctgcaactgtgtgttaccacctcgtttgaacgaggcaaaagtgagacgagtaggaaaaggagagctttcggaaagtgagaagaagaaactaagaaaccgatcacgatcagatcctttactgtcttcttctccgtcttcatcgacacctgataatcatcgttcacacattcgagcaaaatcaagtggtaatcatccttcttcttcttcttcttcgtcttcgggttctaagaaaaatcgaagacctaaagctcaagaccagaagtcgccaagcgtaagcatcaagacttgattgttatcatcattatttgaacatttaattattgtttatgaaaaggacaaaaagtaaaaagacaagaacagaggaacatgccaagcaaagtatcaatcatatatggggcatgctcgtgctttgttctaaggttattgaaaacctttttgggtgtgtagatcatttttctttgtacaattgcttataggagagagagaggtcatgagtatgtacaaaaagaatatgattcatatatttttctatgttttatctctc

SEQ ID NO: 102214 - protein, 240 aa, Arabidopsis thaliana; identical to SEQ ID NO: 29436
  peptide (1)..(240): Ceres Seq. ID no. 13609720
  misc_feature (17)..(140): Pfam Name: Eukaryotic protein of unknown function (DUF862) Pfam Description: Eukaryotic protein of unknown function (DUF862)
  misc_feature (1)..(240): Homolog of NCBI NO: 18400749 NR Description: expressed protein [Arabidopsis thaliana]
  misc_feature (1)..(240): Homolog of NCBI NO: 17529024 NR Description: unknown protein [Arabidopsis thaliana]
  misc_feature (1)..(240): Homolog of NCBI NO: 15236618 NR Description: expressed protein [Arabidopsis thaliana]
  misc_feature (1)..(213): Homolog of NCBI NO: 18420889 NR Description: expressed protein [Arabidopsis thaliana]
  misc_feature (1)..(217): Homolog of NCBI NO: 18412886 NR Description: expressed protein [Arabidopsis thaliana]
  misc_feature (1)..(217): Homolog of NCBI NO: 25354458 NR Description: hypothetical protein F23A5.4 [imported] - thaliana >gi|6503281|gb|AAF14657.1|AC011713_5 Contains similarity
  misc_feature (3)..(224): Homolog of NCBI NO: 18401869 NR Description: expressed protein [Arabidopsis thaliana] unknown protein [Arabidopsis thaliana]
  misc_feature (3)..(224): Homolog of NCBI NO: 21593644 NR Description: unknown [Arabidopsis thaliana]
  misc_feature (3)..(224): Homolog of NCBI NO: 9802596 NR Description: T2E6.19 [Arabidopsis thaliana]
  misc_feature (1)..(169): Homolog of NCBI NO: 15238059 NR Description: expressed protein [Arabidopsis thaliana]

SEQ ID NO: 102215 - protein, 212 aa, Arabidopsis thaliana; identical to SEQ ID NO: 29437
  peptide (1)..(212): Ceres Seq. ID no. 13609721
  misc_feature (1)..(112): Pfam Name: Eukaryotic protein of unknown function (DUF862) Pfam Description: Eukaryotic protein of unknown function (DUF862)
  misc_feature (1)..(212): Homolog of NCBI NO: 18400749 NR Description: expressed protein [Arabidopsis thaliana]
  misc_feature (1)..(212): Homolog of NCBI NO: 17529024 NR Description: unknown protein [Arabidopsis thaliana]
  misc_feature (1)..(212): Homolog of NCBI NO: 15236618 NR Description: expressed protein [Arabidopsis thaliana]
  misc_feature (1)..(185): Homolog of NCBI NO: 18420889 NR Description: expressed protein [Arabidopsis thaliana]
  misc_feature (1)..(189): Homolog of NCBI NO: 18412886 NR Description: expressed protein [Arabidopsis thaliana]
  misc_feature (1)..(189): Homolog of NCBI NO: 25354458 NR Description: hypothetical protein F23A5.4 [imported] - thaliana >gi|6503281|gb|AAF14657.1|AC011713_5 Contains similarity
  misc_feature (1)..(196): Homolog of NCBI NO: 18401869 NR Description: expressed protein [Arabidopsis thaliana] unknown protein [Arabidopsis thaliana]
  misc_feature (1)..(196): Homolog of NCBI NO: 21593644 NR Description: unknown [Arabidopsis thaliana]
  misc_feature (1)..(196): Homolog of NCBI NO: 9802596 NR Description: T2E6.19 [Arabidopsis thaliana]
  misc_feature (1)..(141): Homolog of NCBI NO: 15238059 NR Description: expressed protein [Arabidopsis thaliana]

SEQ ID NO: 102216 - protein, 144 aa, Arabidopsis thaliana; identical to SEQ ID NO: 29438
  peptide (1)..(144): Ceres Seq. ID no. 13609722
  misc_feature (1)..(144): Homolog of NCBI NO: 18400749 NR Description: expressed protein [Arabidopsis thaliana]
  misc_feature (1)..(144): Homolog of NCBI NO: 17529024 NR Description: unknown protein [Arabidopsis thaliana]
  misc_feature (1)..(144): Homolog of NCBI NO: 15236618 NR Description: expressed protein [Arabidopsis thaliana]
  misc_feature (1)..(117): Homolog of NCBI NO: 18420889 NR Description: expressed protein [Arabidopsis thaliana]
  misc_feature (1)..(121): Homolog of NCBI NO: 18412886 NR Description: expressed protein [Arabidopsis thaliana]
  misc_feature (1)..(121): Homolog of NCBI NO: 25354458 NR Description: hypothetical protein F23A5.4 [imported] - thaliana >gi|6503281|gb|AAF14657.1|AC011713_5 Contains similarity
  misc_feature (1)..(128): Homolog of NCBI NO: 18401869 NR Description: expressed protein [Arabidopsis thaliana] unknown protein [Arabidopsis thaliana]
  misc_feature (1)..(128): Homolog of NCBI NO: 21593644 NR Description: unknown [Arabidopsis thaliana]
  misc_feature (1)..(128): Homolog of NCBI NO: 9802596 NR Description: T2E6.19 [Arabidopsis thaliana]
  misc_feature (1)..(73): Homolog of NCBI NO: 15238059 NR Description: expressed protein [Arabidopsis thaliana]

SEQ ID NO: 102217 - DNA, 1254 bp, Arabidopsis thaliana
  misc_feature (1)..(1254): Ceres Seq. ID no. 13609733
  misc_feature: MA Experiment ID: 108434 Result: Down-regulated in Transcription
  misc_feature: MA Experiment 108434 PARAMETER Experiment Name: At_Root_Tips_cDNA_P Parameter: Tissue Value: Root Tips
  misc_feature: MA Experiment ID: 108435 Result: Down-regulated in Transcription
  misc_feature: MA Experiment 108435 PARAMETER Experiment Name: At_stm_Mutants_cDNA_P Parameter: Plant Line Value: wt Landsburg vs stm
  misc_feature: MA Experiment 108435 PARAMETER Experiment Name: At_stm_Mutants_cDNA_P Parameter: Tissue Value: Shoot Apical Meristem Region
  misc_feature: MA Experiment ID: 108461 Result: Down-regulated in Transcription
  misc_feature: MA Experiment 108461 PARAMETER Experiment Name: At_Germinating_Seeds_cDNA_P Parameter: Age (day) Value: 1 vs. 0
  misc_feature: MA Experiment 108461 PARAMETER Experiment Name: At_Germinating_Seeds_cDNA_P Parameter: Tissue Value: Germinating Seeds
  misc_feature: MA Experiment ID: 108462 Result: Down-regulated in Transcription
  misc_feature: MA Experiment 108462 PARAMETER Experiment Name: At_Germinating_Seeds_cDNA_P Parameter: Age (day) Value: 2 vs. 0
  misc_feature: MA Experiment 108462 PARAMETER Experiment Name: At_Germinating_Seeds_cDNA_P Parameter: Tissue Value: Germinating Seeds
  misc_feature: MA Experiment ID: 108579 Result: Up-regulated in Transcription
  misc_feature: MA Experiment 108579 PARAMETER Experiment Name: At_4deg_Cold_cDNA_P Parameter: Temperature (deg C) Value: 4 vs. 22
  misc_feature: MA Experiment 108579 PARAMETER Experiment Name: At_4deg_Cold_cDNA_P Parameter: Timepoint (hr) Value: 6
  misc_feature: MA Experiment 108579 PARAMETER Experiment Name: At_4deg_Cold_cDNA_P Parameter: Tissue Value: Aerial
  misc_feature: MA Experiment ID: 108585 Result: Up-regulated in Transcription
  misc_feature: MA Experiment 108585 PARAMETER Experiment Name: At_5mM_NaNP_cDNA_P Parameter: Timepoint (hr) Value: 6
  misc_feature: MA Experiment 108585 PARAMETER Experiment Name: At_5mM_NaNP_cDNA_P Parameter: Tissue Value: Aerial
  misc_feature: MA Experiment 108585 PARAMETER Experiment Name: At_5mM_NaNP_cDNA_P Parameter: Treatment Value: null
  misc_feature: MA Experiment ID: 108594 Result: Down-regulated in Transcription
  misc_feature: MA Experiment 108594 PARAMETER Experiment Name: At_Ler-rhl_Root_cDNA_P Parameter: Plant Line Value: null
  misc_feature: MA Experiment ID: 20000070 Result: Up-regulated in Transcription
  misc_feature: MA Experiment 20000070 PARAMETER Experiment Name: At_100uM_ABA_Mutants_cDNA_P Parameter: Plant Line Value: CS24
  misc_feature: MA Experiment 20000070 PARAMETER Experiment Name: At_100uM_ABA_Mutants_cDNA_P Parameter: Timepoint (hr) Value: 6
  misc_feature: MA Experiment 20000070 PARAMETER Experiment Name: At_100uM_ABA_Mutants_cDNA_P Parameter: Tissue Value: Aerial
  misc_feature: MA Experiment 20000070 PARAMETER Experiment Name: At_100uM_ABA_Mutants_cDNA_P Parameter: Treatment Value: 100uM ABA vs. No Treatment
  misc_feature: MA Experiment ID: 20000071 Result: Up-regulated in Transcription
  misc_feature: MA Experiment 20000071 PARAMETER Experiment Name: At_100uM_ABA_Mutants_cDNA_P Parameter: Plant Line Value: CS8104
  misc_feature: MA Experiment 20000071 PARAMETER Experiment Name: At_100uM_ABA_Mutants_cDNA_P Parameter: Timepoint (hr) Value: 6
  misc_feature: MA Experiment 20000071 PARAMETER Experiment Name: At_100uM_ABA_Mutants_cDNA_P Parameter: Tissue Value: Aerial
  misc_feature: MA Experiment 20000071 PARAMETER Experiment Name: At_100uM_ABA_Mutants_cDNA_P Parameter: Treatment Value: 100uM ABA vs. No Treatment
  misc_feature: MA Experiment ID: 20000086 Result: Up-regulated in Transcription
  misc_feature: MA Experiment 20000086 PARAMETER Experiment Name: At_100uM_ABA_Mutants_cDNA_P Parameter: Plant Line Value: CS22
  misc_feature: MA Experiment 20000086 PARAMETER Experiment Name: At_100uM_ABA_Mutants_cDNA_P Parameter: Timepoint (hr) Value: 6
  misc_feature: MA Experiment 20000086 PARAMETER Experiment Name: At_100uM_ABA_Mutants_cDNA_P Parameter: Tissue Value: Aerial
  misc_feature: MA Experiment 20000086 PARAMETER Experiment Name: At_100uM_ABA_Mutants_cDNA_P Parameter: Treatment Value: 100uM ABA vs. No Treatment
  misc_feature: MA Experiment ID: 20000087 Result: Up-regulated in Transcription
  misc_feature: MA Experiment 20000087 PARAMETER Experiment Name: At_100uM_ABA_Mutants_cDNA_P Parameter: Plant Line Value: WS
  misc_feature: MA Experiment 20000087 PARAMETER Experiment Name: At_100uM_ABA_Mutants_cDNA_P Parameter: Timepoint (hr) Value: 6
  misc_feature: MA Experiment 20000087 PARAMETER Experiment Name: At_100uM_ABA_Mutants_cDNA_P Parameter: Tissue Value: Aerial
  misc_feature: MA Experiment 20000087 PARAMETER Experiment Name: At_100uM_ABA_Mutants_cDNA_P Parameter: Treatment Value: 100uM ABA vs. No Treatment
  misc_feature: MA Experiment ID: 20000088 Result: Up-regulated in Transcription
  misc_feature: MA Experiment 20000088 PARAMETER Experiment Name: At_100uM_ABA_Mutants_cDNA_P Parameter: Plant Line Value: Landsberg
  misc_feature: MA Experiment 20000088 PARAMETER Experiment Name: At_100uM_ABA_Mutants_cDNA_P Parameter: Timepoint (hr) Value: 6
  misc_feature: MA Experiment 20000088 PARAMETER Experiment Name: At_100uM_ABA_Mutants_cDNA_P Parameter: Tissue Value: Aerial
  misc_feature: MA Experiment 20000088 PARAMETER Experiment Name: At_100uM_ABA_Mutants_cDNA_P Parameter: Treatment Value: 100uM ABA vs. No Treatment
  misc_feature: MA Experiment ID: 20000089 Result: Up-regulated in Transcription
  misc_feature: MA Experiment ID: 20000117 Result: Up-regulated in Transcription
  misc_feature: MA Experiment 20000117 PARAMETER Experiment Name: At_100uM_ABA_Mutants_cDNA_P Parameter: Plant Line Value: Columbia
  misc_feature: MA Experiment 20000117 PARAMETER Experiment Name: At_100uM_ABA_Mutants_cDNA_P Parameter: Timepoint (hr) Value: 6
  misc_feature: MA Experiment 20000117 PARAMETER Experiment Name: At_100uM_ABA_Mutants_cDNA_P Parameter: Tissue Value: Aerial
  misc_feature: MA Experiment 20000117 PARAMETER Experiment Name: At_100uM_ABA_Mutants_cDNA_P Parameter: Treatment Value: 100uM ABA vs. No Treatment
  misc_feature: MA Experiment ID: 20000179 Result: Down-regulated in Transcription
  misc_feature: MA Experiment 20000179 PARAMETER Experiment Name: At_Germinating_Seeds_P Parameter: Age (hr) Value: 6 vs. 0
  misc_feature: MA Experiment 20000179 PARAMETER Experiment Name: At_Germinating_Seeds_P Parameter: Tissue Value: Germinating Seeds
  misc_feature: MA Experiment ID: 20000180 Result: Down-regulated in Transcription
  misc_feature: MA Experiment 20000180 PARAMETER Experiment Name: At_Germinating_Seeds_P Parameter: Age (hr) Value: 24 vs. 0
  misc_feature: MA Experiment 20000180 PARAMETER Experiment Name: At_Germinating_Seeds_P Parameter: Tissue Value: Germinating Seeds
  misc_feature: MA Experiment ID: 20000184 Result: Down-regulated in Transcription
  misc_feature: MA Experiment 20000184 PARAMETER Experiment Name: At_Shoots__P Parameter: Age (day) Value: 7
  misc_feature: MA Experiment 20000184 PARAMETER Experiment Name: At_Shoots__P Parameter: Tissue Value: Shoots vs. Whole Plant
  misc_feature: MA Experiment ID: 20000227 Result: Down-regulated in Transcription
  misc_feature: MA Experiment 20000227 PARAMETER Experiment Name: At_Root-Tips-vs-Tops_P Parameter: Tissue Value: Root Tips vs. Root Tops
  misc_feature: MA Experiment ID: 20000234 Result: Down-regulated in Transcription
  misc_feature: MA Experiment 20000234 PARAMETER Experiment Name: At_Siliques_P Parameter: Age (day) Value: 21
  misc_feature: MA Experiment 20000234 PARAMETER Experiment Name: At_Siliques_P Parameter: Organism Value: A. thaliana
  misc_feature: MA Experiment 20000234 PARAMETER Experiment Name: At_Siliques_P Parameter: Plant Line Value: WS
  misc_feature: MA Experiment 20000234 PARAMETER Experiment Name: At_Siliques_P Parameter: Tissue Value: Less Than 5mm Siliques vs. Whole Plant
  misc_feature: MA Experiment ID: 20000265 Result: Down-regulated in Transcription
  misc_feature: MA Experiment 20000265 PARAMETER Experiment Name: At_Open_Flower_P Parameter: Age (day) Value: 21
  misc_feature: MA Experiment 20000265 PARAMETER Experiment Name: At_Open_Flower_P Parameter: Plant Line Value: WS
  misc_feature: MA Experiment 20000265 PARAMETER Experiment Name: At_Open_Flower_P Parameter: Tissue Value: Closed Flower vs. Whole Plant
  misc_feature: MA Experiment ID: 20000437 Result: Up-regulated in Transcription
  misc_feature: MA Experiment 20000437 PARAMETER Experiment Name: At_Drought_P Parameter: Age (day) Value: 8
  misc_feature: MA Experiment 20000437 PARAMETER Experiment Name: At_Drought_P Parameter: Organism Value: A. thaliana
  misc_feature: MA Experiment 20000437 PARAMETER Experiment Name: At_Drought_P Parameter: Plant Line Value: WS
  misc_feature: MA Experiment 20000437 PARAMETER Experiment Name: At_Drought_P Parameter: Timepoint (hr) Value: 24
  misc_feature: MA Experiment 20000437 PARAMETER Experiment Name: At_Drought_P Parameter: Tissue Value: Whole Plant
  misc_feature: MA Experiment 20000437 PARAMETER Experiment Name: At_Drought_P Parameter: Treatment Value: Drought vs. No Drought
  misc_feature: MA Experiment ID: 20000438 Result: Down-regulated in Transcription
  misc_feature: MA Experiment 20000438 PARAMETER Experiment Name: At_Shoots__P Parameter: Age (day) Value: 14
  misc_feature: MA Experiment 20000438 PARAMETER Experiment Name: At_Shoots__P Parameter: Tissue Value: Shoots vs. Whole Plant
  misc_feature: MA Experiment ID: 20000439 Result: Up-regulated in Transcription
  misc_feature: MA Experiment 20000439 PARAMETER Experiment Name: At_Roots__P Parameter: Age (day) Value: 14 vs. 21
  misc_feature: MA Experiment 20000439 PARAMETER Experiment Name: At_Roots__P Parameter: Organism Value: A. thaliana
  misc_feature: MA Experiment 20000439 PARAMETER Experiment Name: At_Roots__P Parameter: Tissue Value: Roots vs. Whole Plant
  misc_feature: MA Experiment ID: 20000443 Result: Down-regulated in Transcription
  misc_feature: MA Experiment 20000443 PARAMETER Experiment Name: At_1uM_BR-BRZ__P Parameter: Tissue Value: Shoot Apices
  misc_feature: MA Experiment 20000443 PARAMETER Experiment Name: At_1uM_BR-BRZ__P Parameter: Treatment Value: 1uM BRZ vs. No Treatment
  misc_feature: MA Experiment ID: 20000709 Result: Up-regulated in Transcription
  misc_feature: MA Experiment 20000709 PARAMETER Experiment Name: At_15mM_NH4NO3_L-to-H_P Parameter: Age (hr) Value: 14
  misc_feature: MA Experiment 20000709 PARAMETER Experiment Name: At_15mM_NH4NO3_L-to-H_P Parameter: Organism Value: A. thaliana
  misc_feature: MA Experiment 20000709 PARAMETER Experiment Name: At_15mM_NH4NO3_L-to-H_P Parameter: Plant Line Value: WS
  misc_feature: MA Experiment 20000709 PARAMETER Experiment Name: At_15mM_NH4NO3_L-to-H_P Parameter: Timepoint (hr) Value: 4
  misc_feature: MA Experiment 20000709 PARAMETER Experiment Name: At_15mM_NH4NO3_L-to-H_P Parameter: Tissue Value: Aerial
  misc_feature: MA Experiment 20000709 PARAMETER Experiment Name: At_15mM_NH4NO3_L-to-H_P Parameter: Treatment Value: 15mM NH4NO3 vs. 30mM Mannitol
  misc_feature: MA Experiment ID: 20001247 Result: Down-regulated in Transcription
  misc_feature: MA Experiment 20001247 PARAMETER Experiment Name: At_Far-red-induction_P Parameter: Age (day) Value: 7
  misc_feature: MA Experiment 20001247 PARAMETER Experiment Name: At_Far-red-induction_P Parameter: Light Value: Far-red vs. White
  misc_feature: MA Experiment 20001247 PARAMETER Experiment Name: At_Far-red-induction_P Parameter: Organism Value: A. thaliana
  misc_feature: MA Experiment 20001247 PARAMETER Experiment Name: At_Far-red-induction_P Parameter: Plant Line Value: Columbia
  misc_feature: MA Experiment 20001247 PARAMETER Experiment Name: At_Far-red-induction_P Parameter: Timepoint (hr) Value: 1
  misc_feature: MA Experiment 20001247 PARAMETER Experiment Name: At_Far-red-induction_P Parameter: Tissue Value: Whole Plant
  misc_feature: MA Experiment ID: 20001248 Result: Up-regulated in Transcription
  misc_feature: MA Experiment 20001248 PARAMETER Experiment Name: At_Far-red-induction_P Parameter: Age (day) Value: 7
  misc_feature: MA Experiment 20001248 PARAMETER Experiment Name: At_Far-red-induction_P Parameter: Light Value: Far-red vs. White
  misc_feature: MA Experiment 20001248 PARAMETER Experiment Name: At_Far-red-induction_P Parameter: Organism Value: A. thaliana
  misc_feature: MA Experiment 20001248 PARAMETER Experiment Name: At_Far-red-induction_P Parameter: Plant Line Value: Columbia
  misc_feature: MA Experiment 20001248 PARAMETER Experiment Name: At_Far-red-induction_P Parameter: Timepoint (hr) Value: 4
  misc_feature: MA Experiment 20001248 PARAMETER Experiment Name: At_Far-red-induction_P Parameter: Tissue Value: Whole Plant
atttggttttgttgccccaaaatatcccaagaaaagatcaacttcttcttcttaccaaaactgtcggcgtcgtctcctctaagctcctcccatggaagcagaagaaggtcatcagcgtgaccgcctctgcgactattgcgactcctccgtggctcttgtctactgcaaagctgactccgccaagctctgcctcgcctgcgacaagcaagtccacgtcgccaaccaactcttcgccaaacacttcaggtcacttctctgcgactcctgcaacgaatctccctcttcccttttctgcgagactgaaaggtctgttctttgccagaactgcgactggcaacaccacaccgcctcttcctcccttcatagccgcagaccctttgaaggatttaccggctgtccctccgtgcctgagttgctggccatcgttggcctcgatgacctcactctcgattccggattgctttgggagtcacctgagatcgttagcctcaacgaccttattgtttcgggcgggtcgggtactcataacttccgggccacggatgttcctcctctgcctaagaatcgtcacgccacctgcgggaaatacaaagatgagatgatccgacagctccgtggactatccagatctgagcctggttgtctgaaatttgaaaccccagatgctgagatcgatgccgggttccaattcctagcgccggatttgttttctacatgcgagctggagagtggactgaaatggttcgatcagcaagatcatgaggactttccatattgctctctgctaaagaacttgtcggagtcagatgagaaacctgagaatgtagaccgagagtcatcggtgatggttcccgtttccggctgcttaaaccgatgtgaggaagagactgtgatggttccggttatcactagtacaaggtcgatgacacatgagatcaacagtcttgagaggaactctgctctctctcgctacaaagaaaagaagaagtctcgaaggtacgagaaacacatcaggtatgaatcacgcaaggttcgtgcagaaagcaggacaagaatcaggggacgtttcgccaaggcagcagatccatgaatgatgatgaggttactttgataatcaaaaatcttttgtattaatcgaatcatatagtgtgtatgatcagataagtttttgtattctaagcttaggagttatcactgtatatcgaccacactctcaaaattgtcacttaagaatagttttttttttgttttgcc

SEQ ID NO: 102218 - protein, 332 aa, Arabidopsis thaliana
  peptide (1)..(332): Ceres Seq. ID no. 13609734
  misc_feature (8)..(55): Pfam Name: B-box zinc finger Pfam Description: B-box zinc finger
  misc_feature (1)..(332): Homolog of NCBI NO: 15227152 NR Description: CONSTANS B-box zinc finger family protein
  misc_feature (13)..(115): Homolog of NCBI NO: 30685731 NR Description: CONSTANS B-box zinc finger family protein
  misc_feature (287)..(332): Homolog of NCBI NO: 30685731 NR Description: CONSTANS B-box zinc finger family protein
  misc_feature (13)..(180): Homolog of NCBI NO: 15217814 NR Description: CONSTANS B-box zinc finger family protein
  misc_feature (287)..(331): Homolog of NCBI NO: 15217814 NR Description: CONSTANS B-box zinc finger family protein
  misc_feature (204)..(331): Homolog of NCBI NO: 15238918 NR Description: CONSTANS B-box zinc finger family protein
  misc_feature (12)..(121): Homolog of NCBI NO: 15238918 NR Description: CONSTANS B-box zinc finger family protein
  misc_feature (10)..(152): Homolog of NCBI NO: 7489605 NR Description: zinc-finger protein S3574 [imported] - rice
  misc_feature (287)..(331): Homolog of NCBI NO: 7489605 NR Description: zinc-finger protein S3574 [imported] - rice
  misc_feature (12)..(111): Homolog of NCBI NO: 15231491 NR Description: CONSTANS B-box zinc finger family protein
MEAEEGHQRDRLCDYCDSSVALVYCKADSAKLCLACDKQVHVANQLFAKHFRSLLCDSCNESPSSLFCETERSVLCQNCDWQHHTASSSLHSRRPFEGFTGCPSVPELLAIVGLDDLTLDSGLLWESPEIVSLNDLIVSGGSGTHNFRATDVPPLPKNRHATCGKYKDEMIRQLRGLSRSEPGCLKFETPDAEIDAGFQFLAPDLFSTCELESGLKWFDQQDHEDFPYCSLLKNLSESDEKPENVDRESSVMVPVSGCLNRCEEETVMVPVITSTRSMTHEINSLERNSALSRYKEKKKSRRYEKHIRYESRKVRAESRTRIRGRFAKAADP

SEQ ID NO: 102219 - protein, 199 aa, Arabidopsis thaliana
  peptide (1)..(199): Ceres Seq. ID no. 13609735
LVLLPQNIPRKDQLLLLTKTVGVVSSKLLPWKQKKVISVTASATIATPPWLLSTAKLTPPSSASPATSKSTSPTNSSPNTSGHFSATPATNLPLPFSARLKGLFFARTATGNTTPPLPPFIAADPLKDLPAVPPCLSCWPSLASMTSLSIPDCFGSHLRSLASTTLLFRAGRVLITSGPRMFLLCLRIVTPPAGNTKMR

SEQ ID NO: 102220 - DNA, 777 bp, Arabidopsis thaliana
  misc_feature (1)..(777): Ceres Seq. ID no. 13609746
  misc_feature: MA Experiment ID: 108434 Result: Down-regulated in Transcription
  misc_feature: MA Experiment 108434 PARAMETER Experiment Name: At_Root_Tips_cDNA_P Parameter: Tissue Value: Root Tips
  misc_feature: MA Experiment ID: 108461 Result: Down-regulated in Transcription
  misc_feature: MA Experiment 108461 PARAMETER Experiment Name: At_Germinating_Seeds_cDNA_P Parameter: Age (day) Value: 1 vs. 0
  misc_feature: MA Experiment 108461 PARAMETER Experiment Name: At_Germinating_Seeds_cDNA_P Parameter: Tissue Value: Germinating Seeds
  misc_feature: MA Experiment ID: 108579 Result: Down-regulated in Transcription
  misc_feature: MA Experiment 108579 PARAMETER Experiment Name: At_4deg_Cold_cDNA_P Parameter: Temperature (deg C) Value: 4 vs. 22
  misc_feature: MA Experiment 108579 PARAMETER Experiment Name: At_4deg_Cold_cDNA_P Parameter: Timepoint (hr) Value: 6
  misc_feature: MA Experiment 108579 PARAMETER Experiment Name: At_4deg_Cold_cDNA_P Parameter: Tissue Value: Aerial
  misc_feature: MA Experiment ID: 20000224 Result: Down-regulated in Transcription
  misc_feature: MA Experiment ID: 20000234 Result: Down-regulated in Transcription
  misc_feature: MA Experiment 20000234 PARAMETER Experiment Name: At_Siliques_P Parameter: Age (day) Value: 21
  misc_feature: MA Experiment 20000234 PARAMETER Experiment Name: At_Siliques_P Parameter: Organism Value: A. thaliana
  misc_feature: MA Experiment 20000234 PARAMETER Experiment Name: At_Siliques_P Parameter: Plant Line Value: WS
  misc_feature: MA Experiment 20000234 PARAMETER Experiment Name: At_Siliques_P Parameter: Tissue Value: Less Than 5mm Siliques vs. Whole Plant
  misc_feature: MA Experiment ID: 20000264 Result: Down-regulated in Transcription
  misc_feature: MA Experiment 20000264 PARAMETER Experiment Name: At_Open_Flower_P Parameter: Age (day) Value: 21
  misc_feature: MA Experiment 20000264 PARAMETER Experiment Name: At_Open_Flower_P Parameter: Plant Line Value: WS
  misc_feature: MA Experiment 20000264 PARAMETER Experiment Name: At_Open_Flower_P Parameter: Tissue Value: Open Flower vs. Whole Plant
  misc_feature: MA Experiment ID: 20000286 Result: Down-regulated in Transcription
  misc_feature: MA Experiment 20000286 PARAMETER Experiment Name: At_Open_Flower_P Parameter: Age (day) Value: 21
  misc_feature: MA Experiment 20000286 PARAMETER Experiment Name: At_Open_Flower_P Parameter: Plant Line Value: WS
  misc_feature: MA Experiment 20000286 PARAMETER Experiment Name: At_Open_Flower_P Parameter: Tissue Value: Half Open vs. Whole Plant
  misc_feature: MA Experiment ID: 20000437 Result: Up-regulated in Transcription
  misc_feature: MA Experiment 20000437 PARAMETER Experiment Name: At_Drought_P Parameter: Age (day) Value: 8
  misc_feature: MA Experiment 20000437 PARAMETER Experiment Name: At_Drought_P Parameter: Organism Value: A. thaliana
  misc_feature: MA Experiment 20000437 PARAMETER Experiment Name: At_Drought_P Parameter: Plant Line Value: WS
  misc_feature: MA Experiment 20000437 PARAMETER Experiment Name: At_Drought_P Parameter: Timepoint (hr) Value: 24
  misc_feature: MA Experiment 20000437 PARAMETER Experiment Name: At_Drought_P Parameter: Tissue Value: Whole Plant
  misc_feature: MA Experiment 20000437 PARAMETER Experiment Name: At_Drought_P Parameter: Treatment Value: Drought vs. No Drought
  misc_feature: MA Experiment ID: 20000453 Result: Up-regulated in Transcription
  misc_feature: MA Experiment 20000453 PARAMETER Experiment Name: At_100uM_ABA_P Parameter: Age (day) Value: 15
  misc_feature: MA Experiment 20000453 PARAMETER Experiment Name: At_100uM_ABA_P Parameter: Organism Value: A. thaliana
  misc_feature: MA Experiment 20000453 PARAMETER Experiment Name: At_100uM_ABA_P Parameter: Plant Line Value: WS
  misc_feature: MA Experiment 20000453 PARAMETER Experiment Name: At_100uM_ABA_P Parameter: Timepoint (hr) Value: 24
  misc_feature: MA Experiment 20000453 PARAMETER Experiment Name: At_100uM_ABA_P Parameter: Tissue Value: Aerial
  misc_feature: MA Experiment 20000453 PARAMETER Experiment Name: At_100uM_ABA_P Parameter: Treatment Value: 100uM ABA vs. No Treatment
  misc_feature: MA Experiment ID: 20001248 Result: Up-regulated in Transcription
  misc_feature: MA Experiment 20001248 PARAMETER Experiment Name: At_Far-red-induction_P Parameter: Age (day) Value: 7
  misc_feature: MA Experiment 20001248 PARAMETER Experiment Name: At_Far-red-induction_P Parameter: Light Value: Far-red vs. White
  misc_feature: MA Experiment 20001248 PARAMETER Experiment Name: At_Far-red-induction_P Parameter: Organism Value: A. thaliana
  misc_feature: MA Experiment 20001248 PARAMETER Experiment Name: At_Far-red-induction_P Parameter: Plant Line Value: Columbia
  misc_feature: MA Experiment 20001248 PARAMETER Experiment Name: At_Far-red-induction_P Parameter: Timepoint (hr) Value: 4
  misc_feature: MA Experiment 20001248 PARAMETER Experiment Name: At_Far-red-induction_P Parameter: Tissue Value: Whole Plant
  misc_feature: MA Experiment ID: 20001450 Result: Up-regulated in Transcription
  misc_feature: MA Experiment 20001450 PARAMETER Experiment Name: At_Far-red-induction_P Parameter: Age (day) Value: 7
  misc_feature: MA Experiment 20001450 PARAMETER Experiment Name: At_Far-red-induction_P Parameter: Light Value: Far-red vs. White
  misc_feature: MA Experiment 20001450 PARAMETER Experiment Name: At_Far-red-induction_P Parameter: Organism Value: A. thaliana
  misc_feature: MA Experiment 20001450 PARAMETER Experiment Name: At_Far-red-induction_P Parameter: Plant Line Value: Columbia
  misc_feature: MA Experiment 20001450 PARAMETER Experiment Name: At_Far-red-induction_P Parameter: Timepoint (hr) Value: 8
  misc_feature: MA Experiment 20001450 PARAMETER Experiment Name: At_Far-red-induction_P Parameter: Tissue Value: Whole Plant
  misc_feature: MA Experiment ID: 20001451 Result: Up-regulated in Transcription
  misc_feature: MA Experiment 20001451 PARAMETER Experiment Name: At_Far-red-induction_P Parameter: Age (day) Value: 7
  misc_feature: MA Experiment 20001451 PARAMETER Experiment Name: At_Far-red-induction_P Parameter: Light Value: Far-red vs. White
  misc_feature: MA Experiment 20001451 PARAMETER Experiment Name: At_Far-red-induction_P Parameter: Organism Value: A. thaliana
  misc_feature: MA Experiment 20001451 PARAMETER Experiment Name: At_Far-red-induction_P Parameter: Plant Line Value: Columbia
  misc_feature: MA Experiment 20001451 PARAMETER Experiment Name: At_Far-red-induction_P Parameter: Timepoint (hr) Value: 24
  misc_feature: MA Experiment 20001451 PARAMETER Experiment Name: At_Far-red-induction_P Parameter: Tissue Value: Whole Plant
gttttccttaagagcttcatcgtcatcatccgagaattggagcagagatacgaagatttggcgaaaaatggggagcgagccaacaaaagtgatggtggcggtgaacgcttcgacgatcaaagactatcctaacccttcgattagctgcaaaagagcattcgaatggactctggagaagatcgtaaggtccaacacttccgatttcaagattctcttgctccacgtacaagtcgtcgacgaagacggttttgatgacgtggatagcatttatgcttcccctgaggatttccgagacatgagacaatctaacaaggcaaaaggtcttcaccttctcgagtttttcgttaataaatgtcatgagattggggttggttgcgaggcctggattaagacaggtgatcccaaggatgtcatatgccaagaagtgaagcgagttcgaccagattttctggtcgtgggaagtcgtggacttggccggtttcaaaaggtctttgtggggactgtgagtgcgttctgtgtgaaacatgcggagtgtccagttatgacgatcaaacgcaatgccgatgaaactcccagtgatccagctgatgactaaacaataacaacgtcccttccttctttgatctatacagagagagagtgcttttgtgtgtacaaaatccaaattcctacccctatatgtatttgtatctgtgtatgtatgtgtgtgtgcagcttgttccgttttctgaattggttttcaaactgaaccaaactgctatatatttggtttctttg

SEQ ID NO: 102221 - protein, 197 aa, Arabidopsis thaliana; identical to SEQ ID NO: 39014
  peptide (1)..(197): Ceres Seq. ID no. 13609747
  misc_feature (27)..(184): Pfam Name: Universal stress protein family Pfam Description: Universal stress protein family
  misc_feature (8)..(197): Homolog of NCBI NO: 6016711 NR Description: unknown protein [Arabidopsis thaliana]
  misc_feature (23)..(197): Homolog of NCBI NO: 18395845 NR Description: expressed protein [Arabidopsis thaliana] AT3g01520/F4P13_7 [Arabidopsis thaliana]
  misc_feature (31)..(197): Homolog of NCBI NO: 21536534 NR Description: putative ethylene-responsive protein [Arabidopsis
  misc_feature (23)..(197): Homolog of NCBI NO: 15241464 NR Description: expressed protein [Arabidopsis thaliana]
  misc_feature (25)..(197): Homolog of NCBI NO: 19387249 NR Description: putative ethylene-responsive protein [Oryza
  misc_feature (50)..(187): Homolog of NCBI NO: 18408994 NR Description: expressed protein [Arabidopsis thaliana]
  misc_feature (24)..(185): Homolog of NCBI NO: 34914610 NR Description: P0520B06.18 [Oryza sativa (japonica
  misc_feature (70)..(193): Homolog of NCBI NO: 30694811 NR Description: expressed protein [Arabidopsis thaliana] unknown protein [Arabidopsis thaliana]
  misc_feature (29)..(184): Homolog of NCBI NO: 40539010 NR Description: putative stress-related protein [Oryza sativa
  misc_feature (52)..(190): Homolog of NCBI NO: 30681321 NR Description: ER6 protein -related [Arabidopsis thaliana]

SEQ ID NO: 102222 - protein, 175 aa, Arabidopsis thaliana; identical to SEQ ID NO: 39015
  peptide (1)..(175): Ceres Seq. ID no. 13609748
  misc_feature (5)..(162): Pfam Name: Universal stress protein family Pfam Description: Universal stress protein family
  misc_feature (1)..(175): Homolog of NCBI NO: 6016711 NR Description: unknown protein [Arabidopsis thaliana]
  misc_feature (1)..(175): Homolog of NCBI NO: 18395845 NR Description: expressed protein [Arabidopsis thaliana] AT3g01520/F4P13_7 [Arabidopsis thaliana]
  misc_feature (9)..(175): Homolog of NCBI NO: 21536534 NR Description: putative ethylene-responsive protein [Arabidopsis
  misc_feature (1)..(175): Homolog of NCBI NO: 15241464 NR Description: expressed protein [Arabidopsis thaliana]
  misc_feature (3)..(175): Homolog of NCBI NO: 19387249 NR Description: putative ethylene-responsive protein [Oryza
  misc_feature (28)..(165): Homolog of NCBI NO: 18408994 NR Description: expressed protein [Arabidopsis thaliana]
  misc_feature (2)..(163): Homolog of NCBI NO: 34914610 NR Description: P0520B06.18 [Oryza sativa (japonica
  misc_feature (48)..(171): Homolog of NCBI NO: 30694811 NR Description: expressed protein [Arabidopsis thaliana] unknown protein [Arabidopsis thaliana]
  misc_feature (7)..(162): Homolog of NCBI NO: 40539010 NR Description: putative stress-related protein [Oryza sativa
  misc_feature (30)..(168): Homolog of NCBI NO: 30681321 NR Description: ER6 protein -related [Arabidopsis thaliana]

SEQ ID NO: 102223 - protein, 167 aa, Arabidopsis thaliana; identical to SEQ ID NO: 39016
  peptide (1)..(167): Ceres Seq. ID no. 13609749
  misc_feature (1)..(154): Pfam Name: Universal stress protein family Pfam Description: Universal stress protein family
  misc_feature (1)..(167): Homolog of NCBI NO: 6016711 NR Description: unknown protein [Arabidopsis thaliana]
  misc_feature (1)..(167): Homolog of NCBI NO: 18395845 NR Description: expressed protein [Arabidopsis thaliana] AT3g01520/F4P13_7 [Arabidopsis thaliana]
  misc_feature (1)..(167): Homolog of NCBI NO: 21536534 NR Description: putative ethylene-responsive protein [Arabidopsis
  misc_feature (1)..(167): Homolog of NCBI NO: 15241464 NR Description: expressed protein [Arabidopsis thaliana]
  misc_feature (1)..(167): Homolog of NCBI NO: 19387249 NR Description: putative ethylene-responsive protein [Oryza
  misc_feature (20)..(157): Homolog of NCBI NO: 18408994 NR Description: expressed protein [Arabidopsis thaliana]
  misc_feature (1)..(155): Homolog of NCBI NO: 34914610 NR Description: P0520B06.18 [Oryza sativa (japonica
  misc_feature (40)..(163): Homolog of NCBI NO: 30694811 NR Description: expressed protein [Arabidopsis thaliana] unknown protein [Arabidopsis thaliana]
  misc_feature (1)..(154): Homolog of NCBI NO: 40539010 NR Description: putative stress-related protein [Oryza sativa
  misc_feature (22)..(160): Homolog of NCBI NO: 30681321 NR Description: ER6 protein -related [Arabidopsis thaliana]

SEQ ID NO: 102224 - DNA, 1293 bp, Arabidopsis thaliana
  misc_feature (1)..(1293): Ceres Seq. ID no. 13609750
  misc_feature: MA Experiment ID: 20000184 Result: Up-regulated in Transcription
  misc_feature: MA Experiment 20000184 PARAMETER Experiment Name: At_Shoots__P Parameter: Age (day) Value: 7
  misc_feature: MA Experiment 20000184 PARAMETER Experiment Name: At_Shoots__P Parameter: Tissue Value: Shoots vs. Whole Plant
  misc_feature: MA Experiment ID: 20000227 Result: Up-regulated in Transcription
  misc_feature: MA Experiment 20000227 PARAMETER Experiment Name: At_Root-Tips-vs-Tops_P Parameter: Tissue Value: Root Tips vs. Root Tops
  misc_feature: MA Experiment ID: 20000437 Result: Down-regulated in Transcription
  misc_feature: MA Experiment 20000437 PARAMETER Experiment Name: At_Drought_P Parameter: Age (day) Value: 8
  misc_feature: MA Experiment 20000437 PARAMETER Experiment Name: At_Drought_P Parameter: Organism Value: A. thaliana
  misc_feature: MA Experiment 20000437 PARAMETER Experiment Name: At_Drought_P Parameter: Plant Line Value: WS
  misc_feature: MA Experiment 20000437 PARAMETER Experiment Name: At_Drought_P Parameter: Timepoint (hr) Value: 24
  misc_feature: MA Experiment 20000437 PARAMETER Experiment Name: At_Drought_P Parameter: Tissue Value: Whole Plant
  misc_feature: MA Experiment 20000437 PARAMETER Experiment Name: At_Drought_P Parameter: Treatment Value: Drought vs. No Drought
  misc_feature: MA Experiment ID: 20000439 Result: Down-regulated in Transcription
  misc_feature: MA Experiment 20000439 PARAMETER Experiment Name: At_Roots__P Parameter: Age (day) Value: 14 vs. 21
  misc_feature: MA Experiment 20000439 PARAMETER Experiment Name: At_Roots__P Parameter: Organism Value: A. thaliana
  misc_feature: MA Experiment 20000439 PARAMETER Experiment Name: At_Roots__P Parameter: Tissue Value: Roots vs. Whole Plant
  misc_feature: MA Experiment ID: 20000527 Result: Up-regulated in Transcription
  misc_feature: MA Experiment 20000527 PARAMETER Experiment Name: At_10percent_PEG_P Parameter: Age (day) Value: 20
  misc_feature: MA Experiment 20000527 PARAMETER Experiment Name: At_10percent_PEG_P Parameter: Organism Value: A. thaliana
  misc_feature: MA Experiment 20000527 PARAMETER Experiment Name: At_10percent_PEG_P Parameter: Plant Line Value: WS
  misc_feature: MA Experiment 20000527 PARAMETER Experiment Name: At_10percent_PEG_P Parameter: Timepoint (day) Value: 20
  misc_feature: MA Experiment 20000527 PARAMETER Experiment Name: At_10percent_PEG_P Parameter: Tissue Value: Whole Plant
  misc_feature: MA Experiment 20000527 PARAMETER Experiment Name: At_10percent_PEG_P Parameter: Treatment Value: 10percent PEG vs. No Treatment
  misc_feature: MA Experiment ID: 20000794 Result: Down-regulated in Transcription
  misc_feature: MA Experiment 20000794 PARAMETER Experiment Name: At_Petals_P Parameter: Age (day) Value: 23-25 days
  misc_feature: MA Experiment 20000794 PARAMETER Experiment Name: At_Petals_P Parameter: Plant Line Value: WS
  misc_feature: MA Experiment 20000794 PARAMETER Experiment Name: At_Petals_P Parameter: Tissue Value: Petals vs. Whole plant
  misc_feature: MA Experiment ID: 20001450 Result: Down-regulated in Transcription
  misc_feature: MA Experiment 20001450 PARAMETER Experiment Name: At_Far-red-induction_P Parameter: Age (day) Value: 7
  misc_feature: MA Experiment 20001450 PARAMETER Experiment Name: At_Far-red-induction_P Parameter: Light Value: Far-red vs. White
  misc_feature: MA Experiment 20001450 PARAMETER Experiment Name: At_Far-red-induction_P Parameter: Organism Value: A. thaliana
  misc_feature: MA Experiment 20001450 PARAMETER Experiment Name: At_Far-red-induction_P Parameter: Plant Line Value: Columbia
  misc_feature: MA Experiment 20001450 PARAMETER Experiment Name: At_Far-red-induction_P Parameter: Timepoint (hr) Value: 8
  misc_feature: MA Experiment 20001450 PARAMETER Experiment Name: At_Far-red-induction_P Parameter: Tissue Value: Whole Plant
  misc_feature: MA Experiment ID: 20001558 Result: Up-regulated in Transcription
  misc_feature: MA Experiment 20001558 PARAMETER Experiment Name: At_Drought_Soil_Dry_P Parameter: Age (day) Value: 27
  misc_feature: MA Experiment 20001558 PARAMETER Experiment Name: At_Drought_Soil_Dry_P Parameter: Organism Value: A. thaliana
  misc_feature: MA Experiment 20001558 PARAMETER Experiment Name: At_Drought_Soil_Dry_P Parameter: Plant Line Value: WS
  misc_feature: MA Experiment 20001558 PARAMETER Experiment Name: At_Drought_Soil_Dry_P Parameter: Post Timepoint (hr) Value: 6
  misc_feature: MA Experiment 20001558 PARAMETER Experiment Name: At_Drought_Soil_Dry_P Parameter: Post-Treatment Value: Re-Water vs. No Drought
  misc_feature: MA Experiment 20001558 PARAMETER Experiment Name: At_Drought_Soil_Dry_P Parameter: Timepoint (day) Value: 13
  misc_feature: MA Experiment 20001558 PARAMETER Experiment Name: At_Drought_Soil_Dry_P Parameter: Treatment Value: Drought vs. No Drought
  misc_feature: MA Experiment ID: 20001560 Result: Up-regulated in Transcription
  misc_feature: MA Experiment 20001560 PARAMETER Experiment Name: At_Drought_Soil_Dry_P Parameter: Age (day) Value: 28
  misc_feature: MA Experiment 20001560 PARAMETER Experiment Name: At_Drought_Soil_Dry_P Parameter: Organism Value: A. thaliana
  misc_feature: MA Experiment 20001560 PARAMETER Experiment Name: At_Drought_Soil_Dry_P Parameter: Plant Line Value: WS
  misc_feature: MA Experiment 20001560 PARAMETER Experiment Name: At_Drought_Soil_Dry_P Parameter: Post Timepoint (hr) Value: None
  misc_feature: MA Experiment 20001560 PARAMETER Experiment Name: At_Drought_Soil_Dry_P Parameter: Post-Treatment Value: None
  misc_feature: MA Experiment 20001560 PARAMETER Experiment Name: At_Drought_Soil_Dry_P Parameter: Timepoint (day) Value: 14
  misc_feature: MA Experiment 20001560 PARAMETER Experiment Name: At_Drought_Soil_Dry_P Parameter: Treatment Value: Drought vs. No Drought
  misc_feature: MA Experiment ID: 20001757 Result: Up-regulated in Transcription
  misc_feature: MA Experiment 20001757 PARAMETER Experiment Name: At_50mM_NH4NO3_L-to-H_P Parameter: Timepoint (hr) Value: 6
  misc_feature: MA Experiment 20001757 PARAMETER Experiment Name: At_50mM_NH4NO3_L-to-H_P Parameter: Tissue Value: Leaf
  misc_feature: MA Experiment 20001757 PARAMETER Experiment Name: At_50mM_NH4NO3_L-to-H_P Parameter: Treatment Value: 50mM NH4NO3 vs 100mM Mannitol
aaaacttccgtatcctggagagtaaattcctttatggctacgaatgggttaatggcgtcgtccagtgtgtttcttcatcgcccgcgtatcgcatttgcttctagaacgaatcagactgtaggaaaatacggtaaaggccgtgttagtttcatgggcattgggacacgtcgtcttccggtggttttatccatgacggcgatggcggattccggtgaggaggccgtgaaatctgttttgcctggaaatggcatatccatcatggtgaatggatgtagtggcaaaatggggaaagctgtaattaaagcagcagactctgcaggagtaaatattgttcccatatcgtttggatctgctggtgaggatggtcagagagttgaggtctgtggaaaggagattactgtgcacggtccaactgaaagagaaaaggttctttcttcggtgtttgagaagcacccggagctaattgttgtcgactacacaattccctctgcagtaaatgataatgcggagctgtatagcaaagtaggtgttcctttcgtcatgggaacaactggtggagataggaacaaattgtatgaaactgttgaggaagcaaagatttatgctgtgatttctccacagatgggtaaacaggttgtagcatttcttgcggccatggagatcatggctgagcagtttccgggagccttttctggttattccttggatgtgatggagtctcatcaagctagcaaattggatgcatccggaacagcaaaagctgttatttcttgcttccaggaattgggtgtgtcttacgacatggatcagatacaattgattcgggatccaaaacagcaagtggagatggtgggtgtacctgaggagcatatctctggtcacgctttccatctttatcacttgacatcacccgatgaaactgtctccttcgagttccagcacaatgtctgcggccgatcaatttatgctgagggtactgttgatgccgtgctcttcctcgccaaaaagattcgattgaaagcagatcagcgaatctacaacatgatcgatgtcttgagagagggaaatatgcgttgagctttcgagttttgccagtgcattgaccaaatggtggttgtagaagagctgagattagatttaccaaatcatcagctgtgaaaattagatgtttggtttcccacttcttctgccttgagcacaggcttttgaaattccttggtatatacaagaacttgccattgtattgttcatgttttgacctctttacctcaatgttattctcctttctggatc

SEQ ID NO: 102225 - protein, 358 aa, Arabidopsis thaliana; identical to SEQ ID NO: 28449
  peptide (1)..(358): Ceres Seq. ID no. 13609751
  misc_feature (211)..(353): Pfam Name: Dihydrodipicolinate reductase, C-terminus Pfam Description: Dihydrodipicolinate reductase, C-terminus
  misc_feature (12)..(358): Homolog of NCBI NO: 18406430 NR Description: expressed protein [Arabidopsis thaliana] expressed protein [Arabidopsis thaliana] unknown [Arabidopsis thaliana] >gi|26452703|dbj|BAC43434.1|
  misc_feature (18)..(337): Homolog of NCBI NO: 7486478 NR Description: hypothetical protein At2g44040 [imported] -
  misc_feature (12)..(358): Homolog of NCBI NO: 18411368 NR Description: expressed protein [Arabidopsis thaliana]
  misc_feature (12)..(336): Homolog of NCBI NO: 11357603 NR Description: hypothetical protein F24G16.160 - Arabidopsis >gi|7019683|emb|CAB75808.1| putative protein [Arabidopsis
  misc_feature (84)..(352): Homolog of NCBI NO: 22299530 NR Description: dihydrodipicolinate reductase
  misc_feature (84)..(352): Homolog of NCBI NO: 7531267 NR Description: DIHYDRODIPICOLINATE REDUCTASE (DHPR)
  misc_feature (84)..(352): Homolog of NCBI NO: 15668598 NR Description: dihydrodipicolinate reductase (dapB) jannaschii] >gi|2127846|pir||F64352 dihydrodipicolinate reductase

SEQ ID NO: 102226 - protein, 347 aa, Arabidopsis thaliana; identical to SEQ ID NO: 28450
  peptide (1)..(347): Ceres Seq. ID no. 13609752
  misc_feature (200)..(342): Pfam Name: Dihydrodipicolinate reductase, C-terminus Pfam Description: Dihydrodipicolinate reductase, C-terminus
  misc_feature (1)..(347): Homolog of NCBI NO: 18406430 NR Description: expressed protein [Arabidopsis thaliana] expressed protein [Arabidopsis thaliana] unknown [Arabidopsis thaliana] >gi|26452703|dbj|BAC43434.1|
  misc_feature (7)..(326): Homolog of NCBI NO: 7486478 NR Description: hypothetical protein At2g44040 [imported] -
  misc_feature (1)..(347): Homolog of NCBI NO: 18411368 NR Description: expressed protein [Arabidopsis thaliana]
  misc_feature (1)..(325): Homolog of NCBI NO: 11357603 NR Description: hypothetical protein F24G16.160 - Arabidopsis >gi|7019683|emb|CAB75808.1| putative protein [Arabidopsis
  misc_feature (73)..(341): Homolog of NCBI NO: 22299530 NR Description: dihydrodipicolinate reductase
  misc_feature (73)..(341): Homolog of NCBI NO: 7531267 NR Description: DIHYDRODIPICOLINATE REDUCTASE (DHPR)
  misc_feature (73)..(341): Homolog of NCBI NO: 15668598 NR Description: dihydrodipicolinate reductase (dapB) jannaschii] >gi|2127846|pir||F64352 dihydrodipicolinate reductase

SEQ ID NO: 102227 - protein, 341 aa, Arabidopsis thaliana; identical to SEQ ID NO: 28451
  peptide (1)..(341): Ceres Seq. ID no. 13609753
  misc_feature (194)..(336): Pfam Name: Dihydrodipicolinate reductase, C-terminus Pfam Description: Dihydrodipicolinate reductase, C-terminus
  misc_feature (1)..(341): Homolog of NCBI NO: 18406430 NR Description: expressed protein [Arabidopsis thaliana] expressed protein [Arabidopsis thaliana] unknown [Arabidopsis thaliana] >gi|26452703|dbj|BAC43434.1|
  misc_feature (1)..(320): Homolog of NCBI NO: 7486478 NR Description: hypothetical protein At2g44040 [imported] -
  misc_feature (1)..(341): Homolog of NCBI NO: 18411368 NR Description: expressed protein [Arabidopsis thaliana]
  misc_feature (1)..(319): Homolog of NCBI NO: 11357603 NR Description: hypothetical protein F24G16.160 - Arabidopsis >gi|7019683|emb|CAB75808.1| putative protein [Arabidopsis
  misc_feature (67)..(335): Homolog of NCBI NO: 22299530 NR Description: dihydrodipicolinate reductase
  misc_feature (67)..(335): Homolog of NCBI NO: 7531267 NR Description: DIHYDRODIPICOLINATE REDUCTASE (DHPR)
  misc_feature (67)..(335): Homolog of NCBI NO: 15668598 NR Description: dihydrodipicolinate reductase (dapB) jannaschii] >gi|2127846|pir||F64352 dihydrodipicolinate reductase

SEQ ID NO: 102228 - DNA, 1593 bp, Arabidopsis thaliana
  misc_feature (1)..(1593): Ceres Seq. ID no. 13609767
  misc_feature: MA Experiment ID: 20000794 Result: Up-regulated in Transcription
  misc_feature: MA Experiment 20000794 PARAMETER Experiment Name: At_Petals_P Parameter: Age (day) Value: 23-25 days
  misc_feature: MA Experiment 20000794 PARAMETER Experiment Name: At_Petals_P Parameter: Plant Line Value: WS
  misc_feature: MA Experiment 20000794 PARAMETER Experiment Name: At_Petals_P Parameter: Tissue Value: Petals vs. Whole plant
aaggatgttgcaagtacggtggtcctggttacgcgactcctctcgccgctatgtctggtccatcggagaaacttatctacgtaaccgccgtctacaccggaactggaatagataaaccggattatttggcgacggtggatgtagatccaagctcgccttcgtattcaagtgttattcatagattaccaatgccttttgttggtgatgagcttcatcattctggttggaactcttgtagttcttgccatggtgatgcttctgttgatagacgttatctcgtgttaccgtctcttatatctggtcgcatttatgcgattgatactaaggaaaacccgagggctccgtctttgtataagtatgttgatcctaaagagattgctgataagactggattggcgtttcctcacacggctcattgcctcgccacgggcgagatcttggtgtcctgtcttggagatgaagaggggaatgctaaggggaatgggtttcttcttcttgactctgattttaacatcaagaataggtgggagaaaccaggacatagtcctttgtatgggtatgatttttggtaccaacctcggcacaagaccatgatcagcacatcttggggagcacctaaagccttctctaaaggtttcaatcttcagcacgttgctgatggcttgtatggaagtcatctacatgtttatagttggccaggaggtgaaataaaacaattaattgaccttggaccgactggtctcttacctttggagattagattcttgcatgatccatctaaagatacagggtttgttgggagtgccttgtcgagtaatatgataagatttttcaagaacagtgatgaaacatggagccatgaggttgttatatcggttaaaccgttgaaagtcgaaaactggatacttccagaaatgccggggctaatcaccgacttcttgatctccctcgatgaccgatttatttactttgtgaactggctccatggagacattcgtcagtacaacatagaggaccctaaaaaccctgtattaacagggcaaatttgggttggaggattactacaaaagggcagtcctgttaaggcggttggagaagacggaaacactttccaattcgaggttcctcagatcaaggggaaatctttacgaggtggacctcaaatgattcagctgagcctcgatgggaaacgattgtatgcaacaaactcgctgtttagcgcatgggatcgtcagttttatcctgaaatcatggagaaaggctcacacataattcagattgatgttgatacagaaaaaggtggtctcaccataaaccctgatttctttgtggactttggtgatgaaccagacggtccttcactagcccacgagatgagatatccaggtggagactgcacttccgatatctggatttgaatttggctttgtttagagtgtgttttgtgttaagtttaaattgagttttattatttgttgtgtgtttagtagagttgaataaaaaagggagtaagatgactcagacaattaacacttgtttgtacattttgactcctatgtgtcttaagtaataaaactttctacaattcgactt

SEQ ID NO: 102229 - protein, 471 aa, Arabidopsis thaliana
  peptide (1)..(471): Ceres Seq. ID no. 13609768
  misc_feature (3)..(471): Pfam Name: 56kDa selenium binding protein (SBP56) Pfam Description: 56kDa selenium binding protein (SBP56)
  misc_feature (1)..(471): Homolog of NCBI NO: 15236385 NR Description: selenium-binding protein like [Arabidopsis
  misc_feature (6)..(471): Homolog of NCBI NO: 15485232 NR Description: selenium binding protein [Arabidopsis thaliana]
  misc_feature (1)..(471): Homolog of NCBI NO: 13605825 NR Description: AT4g14040/dl3061c [Arabidopsis thaliana]
  misc_feature (1)..(471): Homolog of NCBI NO: 15236386 NR Description: selenium-binding protein like [Arabidopsis
  misc_feature (1)..(471): Homolog of NCBI NO: 22530900 NR Description: selenium-binding protein-like protein
  misc_feature (1)..(471): Homolog of NCBI NO: 25348077 NR Description: selenium-binding protein like [imported] -
  misc_feature (1)..(471): Homolog of NCBI NO: 15485720 NR Description: selenium binding protein [Medicago sativa]
  misc_feature (63)..(471): Homolog of NCBI NO: 20340239 NR Description: putative selenium-binding protein [Thellungiella
  misc_feature (1)..(471): Homolog of NCBI NO: 15485716 NR Description: selenium binding protein [Lotus japonicus]
  misc_feature (2)..(471): Homolog of NCBI NO: 15229520 NR Description: selenium binding protein -related [Arabidopsis
GCCKYGGPGYATPLAAMSGPSEKLIYVTAVYTGTGIDKPDYLATVDVDPSSPSYSSVIHRLPMPFVGDELHHSGWNSCSSCHGDASVDRRYLVLPSLISGRIYAIDTKENPRAPSLYKYVDPKEIADKTGLAFPHTAHCLATGEILVSCLGDEEGNAKGNGFLLLDSDFNIKNRWEKPGHSPLYGYDFWYQPRHKTMISTSWGAPKAFSKGFNLQHVADGLYGSHLHVYSWPGGEIKQLIDLGPTGLLPLEIRFLHDPSKDTGFVGSALSSNMIRFFKNSDETWSHEVVISVKPLKVENWILPEMPGLITDFLISLDDRFIYFVNWLHGDIRQYNIEDPKNPVLTGQIWVGGLLQKGSPVKAVGEDGNTFQFEVPQIKGKSLRGGPQMIQLSLDGKRLYATNSLFSAWDRQFYPEIMEKGSHIIQIDVDTEKGGLTINPDFFVDFGDEPDGPSLAHEMRYPGGDCTSDIWI

SEQ ID NO: 102230 - protein, 455 aa, Arabidopsis thaliana; identical to SEQ ID NO: 77464
  peptide (1)..(455): Ceres Seq. ID no. 13609769
  misc_feature (1)..(455): Pfam Name: 56kDa selenium binding protein (SBP56) Pfam Description: 56kDa selenium binding protein (SBP56)
  misc_feature (1)..(455): Homolog of NCBI NO: 15236385 NR Description: selenium-binding protein like [Arabidopsis
  misc_feature (1)..(455): Homolog of NCBI NO: 15485232 NR Description: selenium binding protein [Arabidopsis thaliana]
  misc_feature (1)..(455): Homolog of NCBI NO: 13605825 NR Description: AT4g14040/dl3061c [Arabidopsis thaliana]
  misc_feature (1)..(455): Homolog of NCBI NO: 15236386 NR Description: selenium-binding protein like [Arabidopsis
  misc_feature (1)..(455): Homolog of NCBI NO: 22530900 NR Description: selenium-binding protein-like protein
  misc_feature (1)..(455): Homolog of NCBI NO: 25348077 NR Description: selenium-binding protein like [imported] -
  misc_feature (1)..(455): Homolog of NCBI NO: 15485720 NR Description: selenium binding protein [Medicago sativa]
  misc_feature (47)..(455): Homolog of NCBI NO: 20340239 NR Description: putative selenium-binding protein [Thellungiella
  misc_feature (1)..(455): Homolog of NCBI NO: 15485716 NR Description: selenium binding protein [Lotus japonicus]
  misc_feature (1)..(455): Homolog of NCBI NO: 15229520 NR Description: selenium binding protein -related [Arabidopsis

SEQ ID NO: 102231 - protein, 409 aa, Arabidopsis thaliana; identical to SEQ ID NO: 77465
  peptide (1)..(409): Ceres Seq. ID no. 13609770
  misc_feature (1)..(409): Pfam Name: 56kDa selenium binding protein (SBP56) Pfam Description: 56kDa selenium binding protein (SBP56)
  misc_feature (1)..(409): Homolog of NCBI NO: 15236385 NR Description: selenium-binding protein like [Arabidopsis
  misc_feature (1)..(409): Homolog of NCBI NO: 15485232 NR Description: selenium binding protein [Arabidopsis thaliana]
  misc_feature (1)..(409): Homolog of NCBI NO: 13605825 NR Description: AT4g14040/dl3061c [Arabidopsis thaliana]
  misc_feature (1)..(409): Homolog of NCBI NO: 15236386 NR Description: selenium-binding protein like [Arabidopsis
  misc_feature (1)..(409): Homolog of NCBI NO: 22530900 NR Description: selenium-binding protein-like protein
  misc_feature (1)..(409): Homolog of NCBI NO: 25348077 NR Description: selenium-binding protein like [imported] -
  misc_feature (1)..(409): Homolog of NCBI NO: 15485720 NR Description: selenium binding protein [Medicago sativa]
  misc_feature (1)..(409): Homolog of NCBI NO: 20340239 NR Description: putative selenium-binding protein [Thellungiella
  misc_feature (1)..(409): Homolog of NCBI NO: 15485716 NR Description: selenium binding protein [Lotus japonicus]
  misc_feature (1)..(409): Homolog of NCBI NO: 15229520 NR Description: selenium binding protein -related [Arabidopsis

SEQ ID NO: 102232 - DNA, 1296 bp, Arabidopsis thaliana
  misc_feature (1)..(1296): Ceres Seq. ID no. 13609771
  misc_feature: MA Experiment ID: 20000355 Result: Up-regulated in Transcription
  misc_feature: MA Experiment 20000355 PARAMETER Experiment Name: At_Siliques_Sub_P Parameter: Age (day) Value: 21
  misc_feature: MA Experiment 20000355 PARAMETER Experiment Name: At_Siliques_Sub_P Parameter: Organism Value: A. thaliana
  misc_feature: MA Experiment 20000355 PARAMETER Experiment Name: At_Siliques_Sub_P Parameter: Plant Line Value: WS
  misc_feature: MA Experiment 20000355 PARAMETER Experiment Name: At_Siliques_Sub_P Parameter: Tissue Value: Less Than 5mm Siliques vs. Whole Plant
aactctctcgtctctctctattgttgattaaaatggaagtgatatggatgttcttaatctgttgcatctttggtatcataattataagtcatagcaatgactttgtcgaagctaagagcctttctaaagttgaagatttagaaatcgagaagagactaaggactatcaacaaacctgctgtcaagatcatcaagagtatagatggagaaagatacggatgtgtggatttcttcaagcaaccagcatttgatcacccttcaatgaagaatcacacataccattacaagatgcgtccaatatggaaaggaatgagagaaagaaagacaaacaataccaattttggttacctatgggagaatggtgtgggttgtcccattggtaccgtccccatgcaaagagtcactaaagaagatctattgagattagactcatttggcgataattataaacctcgtggctcttggaattataccactgatgattctaatagtaacaaccagaaacattttgcggtggctcggacggttggctcagacaagaggttcaatggagcaacaatggatctttgtttaaccgctcctaaggttaggctaaaccaatacagtgcttctcgacttcacattcagattggaaatgatttcctccaaaccggctttactgtaaatccaacattgtacaaggacagccaacctcggactttcgtctatacaaaatcaggtgaaaaatcatgttacaatagctactgcgacgttggaatgatacttgttcgtcaagatattccacttggtatggcattatcgccagtgtctgttcgtggtgctaggacaactcattatggagtcttcggtctaattaaggaccaaataaatggaaattggtggttgcaatttggtaatgctgcagaggaaattggattttggccgtcgagtaggtttcatcaaagctctggaaatttggtggagtggggtggagaagtgtacagcgcatcactgccgagtcctcaaatgggatttgggtattttgttgatggtcaaatgcgctacgatgcatatatcaaacggatatctgtaatcgacggttttaataagattgaccgcaaagtggcatataccgaaaaatttgtggacgacactcgtggctaccaagttatagacaaatacaatattcccggatactcaatactcggtcatataatgttttacggtggtccggggaatctctgaatatggttaattacatctctgtgaaatgaaaattaataaaacattacattgacttgattatacaataaatatc

SEQ ID NO: 102233 - protein, 406 aa, Arabidopsis thaliana
  peptide (1)..(406): Ceres Seq. ID no. 13609772
  misc_feature (181)..(364): Pfam Name: Arabidopsis proteins of unknown function Pfam Description: Arabidopsis proteins of unknown function
  misc_feature (11)..(406): Homolog of NCBI NO: 30683101 NR Description: expressed protein [Arabidopsis thaliana]
  misc_feature (238)..(406): Homolog of NCBI NO: 7485045 NR Description: hypothetical protein - Arabidopsis thaliana hypothetical protein [Arabidopsis thaliana]
  misc_feature (65)..(219): Homolog of NCBI NO: 7485045 NR Description: hypothetical protein - Arabidopsis thaliana hypothetical protein [Arabidopsis thaliana]
  misc_feature (11)..(64): Homolog of NCBI NO: 7485045 NR Description: hypothetical protein - Arabidopsis thaliana hypothetical protein [Arabidopsis thaliana]
  misc_feature (11)..(406): Homolog of NCBI NO: 15218449 NR Description: expressed protein [Arabidopsis thaliana] unknown protein [Arabidopsis thaliana]
  misc_feature (11)..(220): Homolog of NCBI NO: 25345694 NR Description: protein F14N23.7 [imported] - Arabidopsis >gi|4914321|gb|AAD32869.1|AC005489_7 F14N23.7 [Arabidopsis
  misc_feature (220)..(406): Homolog of NCBI NO: 25345694 NR Description: protein F14N23.7 [imported] - Arabidopsis >gi|4914321|gb|AAD32869.1|AC005489_7 F14N23.7 [Arabidopsis
  misc_feature (9)..(406): Homolog of NCBI NO: 22328636 NR Description: hypothetical protein [Arabidopsis thaliana]
  misc_feature (57)..(302): Homolog of NCBI NO: 11358466 NR Description: IB1C3-1 protein [imported] - Arabidopsis thaliana
  misc_feature (4)..(406): Homolog of NCBI NO: 15224650 NR Description: hypothetical protein [Arabidopsis thaliana]
LSRLSLLLIKMEVIWMFLICCIFGIIIISHSNDFVEAKSLSKVEDLEIEKRLRTINKPAVKIIKSIDGERYGCVDFFKQPAFDHPSMKNHTYHYKMRPIWKGMRERKTNNTNFGYLWENGVGCPIGTVPMQRVTKEDLLRLDSFGDNYKPRGSWNYTTDDSNSNNQKHFAVARTVGSDKRFNGATMDLCLTAPKVRLNQYSASRLHIQIGNDFLQTGFTVNPTLYKDSQPRTFVYTKSGEKSCYNSYCDVGMILVRQDIPLGMALSPVSVRGARTTHYGVFGLIKDQINGNWWLQFGNAAEEIGFWPSSRFHQSSGNLVEWGGEVYSASLPSPQMGFGYFVDGQMRYDAYIKRISVIDGFNKIDRKVAYTEKFVDDTRGYQVIDKYNIPGYSILGHIMFYGGPGNL

SEQ ID NO: 102234 - protein, 396 aa, Arabidopsis thaliana
  peptide (1)..(396): Ceres Seq. ID no. 13609773
  misc_feature (171)..(354): Pfam Name: Arabidopsis proteins of unknown function Pfam Description: Arabidopsis proteins of unknown function
  misc_feature (1)..(396): Homolog of NCBI NO: 30683101 NR Description: expressed protein [Arabidopsis thaliana]
  misc_feature (228)..(396): Homolog of NCBI NO: 7485045 NR Description: hypothetical protein - Arabidopsis thaliana hypothetical protein [Arabidopsis thaliana]
  misc_feature (55)..(209): Homolog of NCBI NO: 7485045 NR Description: hypothetical protein - Arabidopsis thaliana hypothetical protein [Arabidopsis thaliana]
  misc_feature (1)..(54): Homolog of NCBI NO: 7485045 NR Description: hypothetical protein - Arabidopsis thaliana hypothetical protein [Arabidopsis thaliana]
  misc_feature (1)..(396): Homolog of NCBI NO: 15218449 NR Description: expressed protein [Arabidopsis thaliana] unknown protein [Arabidopsis thaliana]
  misc_feature (1)..(210): Homolog of NCBI NO: 25345694 NR Description: protein F14N23.7 [imported] - Arabidopsis >gi|4914321|gb|AAD32869.1|AC005489_7 F14N23.7 [Arabidopsis
  misc_feature (210)..(396): Homolog of NCBI NO: 25345694 NR Description: protein F14N23.7 [imported] - Arabidopsis >gi|4914321|gb|AAD32869.1|AC005489_7 F14N23.7 [Arabidopsis
  misc_feature (1)..(396): Homolog of NCBI NO: 22328636 NR Description: hypothetical protein [Arabidopsis thaliana]
  misc_feature (47)..(292): Homolog of NCBI NO: 11358466 NR Description: IB1C3-1 protein [imported] - Arabidopsis thaliana
  misc_feature (1)..(396): Homolog of NCBI NO: 15224650 NR Description: hypothetical protein [Arabidopsis thaliana]
MEVIWMFLICCIFGIIIISHSNDFVEAKSLSKVEDLEIEKRLRTINKPAVKIIKSIDGERYGCVDFFKQPAFDHPSMKNHTYHYKMRPIWKGMRERKTNNTNFGYLWENGVGCPIGTVPMQRVTKEDLLRLDSFGDNYKPRGSWNYTTDDSNSNNQKHFAVARTVGSDKRFNGATMDLCLTAPKVRLNQYSASRLHIQIGNDFLQTGFTVNPTLYKDSQPRTFVYTKSGEKSCYNSYCDVGMILVRQDIPLGMALSPVSVRGARTTHYGVFGLIKDQINGNWWLQFGNAAEEIGFWPSSRFHQSSGNLVEWGGEVYSASLPSPQMGFGYFVDGQMRYDAYIKRISVIDGFNKIDRKVAYTEKFVDDTRGYQVIDKYNIPGYSILGHIMFYGGPGNL

SEQ ID NO: 102235 - protein, 391 aa, Arabidopsis thaliana
  peptide (1)..(391): Ceres Seq. ID no. 13609774
  misc_feature (166)..(349): Pfam Name: Arabidopsis proteins of unknown function Pfam Description: Arabidopsis proteins of unknown function
  misc_feature (1)..(391): Homolog of NCBI NO: 30683101 NR Description: expressed protein [Arabidopsis thaliana]
  misc_feature (223)..(391): Homolog of NCBI NO: 7485045 NR Description: hypothetical protein - Arabidopsis thaliana hypothetical protein [Arabidopsis thaliana]
  misc_feature (50)..(204): Homolog of NCBI NO: 7485045 NR Description: hypothetical protein - Arabidopsis thaliana hypothetical protein [Arabidopsis thaliana]
  misc_feature (1)..(49): Homolog of NCBI NO: 7485045 NR Description: hypothetical protein - Arabidopsis thaliana hypothetical protein [Arabidopsis thaliana]
  misc_feature (1)..(391): Homolog of NCBI NO: 15218449 NR Description: expressed protein [Arabidopsis thaliana] unknown protein [Arabidopsis thaliana]
  misc_feature (1)..(205): Homolog of NCBI NO: 25345694 NR Description: protein F14N23.7 [imported] - Arabidopsis >gi|4914321|gb|AAD32869.1|AC005489_7 F14N23.7 [Arabidopsis
  misc_feature (205)..(391): Homolog of NCBI NO: 25345694 NR Description: protein F14N23.7 [imported] - Arabidopsis >gi|4914321|gb|AAD32869.1|AC005489_7 F14N23.7 [Arabidopsis
  misc_feature (1)..(391): Homolog of NCBI NO: 22328636 NR Description: hypothetical protein [Arabidopsis thaliana]
  misc_feature (42)..(287): Homolog of NCBI NO: 11358466 NR Description: IB1C3-1 protein [imported] - Arabidopsis thaliana
  misc_feature (1)..(391): Homolog of NCBI NO: 15224650 NR Description: hypothetical protein [Arabidopsis thaliana]
MFLICCIFGIIIISHSNDFVEAKSLSKVEDLEIEKRLRTINKPAVKIIKSIDGERYGCVDFFKQPAFDHPSMKNHTYHYKMRPIWKGMRERKTNNTNFGYLWENGVGCPIGTVPMQRVTKEDLLRLDSFGDNYKPRGSWNYTTDDSNSNNQKHFAVARTVGSDKRFNGATMDLCLTAPKVRLNQYSASRLHIQIGNDFLQTGFTVNPTLYKDSQPRTFVYTKSGEKSCYNSYCDVGMILVRQDIPLGMALSPVSVRGARTTHYGVFGLIKDQINGNWWLQFGNAAEEIGFWPSSRFHQSSGNLVEWGGEVYSASLPSPQMGFGYFVDGQMRYDAYIKRISVIDGFNKIDRKVAYTEKFVDDTRGYQVIDKYNIPGYSILGHIMFYGGPGNL

SEQ ID NO: 102236 - DNA, 1139 bp, Arabidopsis thaliana
  misc_feature (1)..(1139): Ceres Seq. ID no. 13609779
  misc_feature: MA Experiment ID: 108434 Result: Up-regulated in Transcription
  misc_feature: MA Experiment 108434 PARAMETER Experiment Name: At_Root_Tips_cDNA_P Parameter: Tissue Value: Root Tips
  misc_feature: MA Experiment ID: 108595 Result: Down-regulated in Transcription
  misc_feature: MA Experiment 108595 PARAMETER Experiment Name: At_Ler-pi_Ovule_cDNA_P Parameter: Plant Line Value: null
  misc_feature: MA Experiment ID: 20000185 Result: Down-regulated in Transcription
  misc_feature: MA Experiment 20000185 PARAMETER Experiment Name: At_Roots__P Parameter: Age (day) Value: 7 vs. 21
  misc_feature: MA Experiment 20000185 PARAMETER Experiment Name: At_Roots__P Parameter: Organism Value: A. thaliana
  misc_feature: MA Experiment 20000185 PARAMETER Experiment Name: At_Roots__P Parameter: Tissue Value: Roots vs. Whole Plant
  misc_feature: MA Experiment ID: 20000439 Result: Down-regulated in Transcription
  misc_feature: MA Experiment 20000439 PARAMETER Experiment Name: At_Roots__P Parameter: Age (day) Value: 14 vs. 21
  misc_feature: MA Experiment 20000439 PARAMETER Experiment Name: At_Roots__P Parameter: Organism Value: A. thaliana
  misc_feature: MA Experiment 20000439 PARAMETER Experiment Name: At_Roots__P Parameter: Tissue Value: Roots vs. Whole Plant
  misc_feature: MA Experiment ID: 20001905 Result: Down-regulated in Transcription
  misc_feature: MA Experiment 20001905 PARAMETER Experiment Name: At_Drought_Reproduction_P Parameter: Age (day) Value: 40
  misc_feature: MA Experiment 20001905 PARAMETER Experiment Name: At_Drought_Reproduction_P Parameter: Organism Value: A. thaliana
  misc_feature: MA Experiment 20001905 PARAMETER Experiment Name: At_Drought_Reproduction_P Parameter: Plant Line Value: WS
  misc_feature: MA Experiment 20001905 PARAMETER Experiment Name: At_Drought_Reproduction_P Parameter: Timepoint (day) Value: 10
  misc_feature: MA Experiment 20001905 PARAMETER Experiment Name: At_Drought_Reproduction_P Parameter: Tissue Value: Rosettes
  misc_feature: MA Experiment 20001905 PARAMETER Experiment Name: At_Drought_Reproduction_P Parameter: Treatment Value: Drought vs. No Drought
gtgtcactgttgctgttgccttggttgggttcggtttaaagttcgtggccaaacagtaaccttgagtcttgccgtcctctgtcatctatccacgcctgaacccgaaaaactctgaaagctgagctctggtaatggcgggtttagcaatttcacctcctctcggtctttccttctcttctcgaactcgaaaccctaaacccacttcctttctatctcacaatcaaaggaatcctataagacgtatagtttctgctctacagagtccatatggagattctctgaaagctggactttctagtaatgtttctggatccccaataaagattgacaacaaggctccaagatttggagtgatagaggcgaaaaagggaaaccccccagtaatgccttcagtgatgacccctggaggacctttagacctctcttctgtgttattccgtaaccgcataatcttcatcgggcaaccaattaacgcacaggttgctcagcgagtcatatctcagcttgtaacccttgcatctattgatgataaatccgacatcctgatgtacttgaattgtcccggtggcagtacttactccgtcctagcaatttatgactgtatgtcttggataaagcctaaagttggaacagtggcgtttggagtagctgcaagccaaggagcacttcttcttgctggaggtgaaaaaggaatgcgctatgcaatgccaaatactcgtgtcatgatacatcaaccacaaactggatgcggaggacatgtagaggacgtgaggagacaggtcaatgaagccatcgaagcccgacaaaaaattgacaggatgtatgcagctttcactggacaacctctggagaaagtgcagcaatacactgaaagagatcgtttcttatcagcatctgaggcgcttgagttcgggctcattgatggtctattggaaacagaatactgaagcagcatacaggacaatgcacaacaacagctcattgcaatgttcaaagcttccattttcatttgaatatgaacggttgtaactgatatttgtgcataaatcagtttggttttcttggttttattgtctactaaacagaatgagaaaactaaactgtttatttttttactgaaaaatctgaaagttgtgttc

SEQ ID NO: 102237 - protein, 271 aa, Arabidopsis thaliana; identical to SEQ ID NO: 22328
  peptide (1)..(271): Ceres Seq. ID no. 13609780
  misc_feature (91)..(270): Pfam Name: Clp protease Pfam Description: Clp protease
  misc_feature (1)..(271): Homolog of NCBI NO: 18391311 NR Description: ATP-dependent Clp protease proteolytic subunit [Arabidopsis thaliana] >gi|25289851|pir||C86251 hypothetical
  misc_feature (1)..(271): Homolog of NCBI NO: 2827888 NR Description: ATP-dependent Clp protease proteolytic subunit
  misc_feature (1)..(271): Homolog of NCBI NO: 2921510 NR Description: clp-like energy-dependent protease [Fritillaria
  misc_feature (24)..(271): Homolog of NCBI NO: 7435703 NR Description: endopeptidase Clp (EC 3.4.21.92) chain P
  misc_feature (13)..(248): Homolog of NCBI NO: 9968665 NR Description: putative ATP-dependent clp serine protease
  misc_feature (1)..(271): Homolog of NCBI NO: 28209486 NR Description: putative clp-like energy-dependent protease
  misc_feature (65)..(267): Homolog of NCBI NO: 16332068 NR Description: ATP-dependent Clp protease proteolytic subunit
  misc_feature (96)..(268): Homolog of NCBI NO: 1705929 NR Description: ATP-dependent Clp protease proteolytic subunit 1
  misc_feature (96)..(270): Homolog of NCBI NO: 16080507 NR Description: ATP-dependent Clp protease proteolytic subunit
  misc_feature (67)..(270): Homolog of NCBI NO: 17231175 NR Description: ATP-dependent Clp protease proteolytic subunit

SEQ ID NO: 102238 - protein, 187 aa, Arabidopsis thaliana; identical to SEQ ID NO: 22329
  peptide (1)..(187): Ceres Seq. ID no. 13609781
  misc_feature (7)..(186): Pfam Name: Clp protease Pfam Description: Clp protease
  misc_feature (1)..(187): Homolog of NCBI NO: 18391311 NR Description: ATP-dependent Clp protease proteolytic subunit [Arabidopsis thaliana] >gi|25289851|pir||C86251 hypothetical
  misc_feature (1)..(187): Homolog of NCBI NO: 2827888 NR Description: ATP-dependent Clp protease proteolytic subunit
  misc_feature (1)..(187): Homolog of NCBI NO: 2921510 NR Description: clp-like energy-dependent protease [Fritillaria
  misc_feature (1)..(187): Homolog of NCBI NO: 7435703 NR Description: endopeptidase Clp (EC 3.4.21.92) chain P
  misc_feature (1)..(164): Homolog of NCBI NO: 9968665 NR Description: putative ATP-dependent clp serine protease
  misc_feature (1)..(187): Homolog of NCBI NO: 28209486 NR Description: putative clp-like energy-dependent protease
  misc_feature (1)..(183): Homolog of NCBI NO: 16332068 NR Description: ATP-dependent Clp protease proteolytic subunit
  misc_feature (12)..(184): Homolog of NCBI NO: 1705929 NR Description: ATP-dependent Clp protease proteolytic subunit 1
  misc_feature (12)..(186): Homolog of NCBI NO: 16080507 NR Description: ATP-dependent Clp protease proteolytic subunit
  misc_feature (1)..(186): Homolog of NCBI NO: 17231175 NR Description: ATP-dependent Clp protease proteolytic subunit

SEQ ID NO: 102239 - protein, 183 aa, Arabidopsis thaliana; identical to SEQ ID NO: 22330
  peptide (1)..(183): Ceres Seq. ID no. 13609782
  misc_feature (3)..(182): Pfam Name: Clp protease Pfam Description: Clp protease
  misc_feature (1)..(183): Homolog of NCBI NO: 18391311 NR Description: ATP-dependent Clp protease proteolytic subunit [Arabidopsis thaliana] >gi|25289851|pir||C86251 hypothetical
  misc_feature (1)..(183): Homolog of NCBI NO: 2827888 NR Description: ATP-dependent Clp protease proteolytic subunit
  misc_feature (1)..(183): Homolog of NCBI NO: 2921510 NR Description: clp-like energy-dependent protease [Fritillaria
  misc_feature (1)..(183): Homolog of NCBI NO: 7435703 NR Description: endopeptidase Clp (EC 3.4.21.92) chain P
  misc_feature (1)..(160): Homolog of NCBI NO: 9968665 NR Description: putative ATP-dependent clp serine protease
  misc_feature (1)..(183): Homolog of NCBI NO: 28209486 NR Description: putative clp-like energy-dependent protease
  misc_feature (1)..(179): Homolog of NCBI NO: 16332068 NR Description: ATP-dependent Clp protease proteolytic subunit
  misc_feature (8)..(180): Homolog of NCBI NO: 1705929 NR Description: ATP-dependent Clp protease proteolytic subunit 1
  misc_feature (8)..(182): Homolog of NCBI NO: 16080507 NR Description: ATP-dependent Clp protease proteolytic subunit
  misc_feature (1)..(182): Homolog of NCBI NO: 17231175 NR Description: ATP-dependent Clp protease proteolytic subunit

SEQ ID NO: 102240 - DNA, 1014 bp, Arabidopsis thaliana
  misc_feature (1)..(1014): Ceres Seq. ID no. 13609794
  misc_feature: MA Experiment ID: 108595 Result: Down-regulated in Transcription
  misc_feature: MA Experiment 108595 PARAMETER Experiment Name: At_Ler-pi_Ovule_cDNA_P Parameter: Plant Line Value: null
aaagctgtgaccagaagatcagtgattgttcgatgaacgaagaggagccagacaaagaacacgtggcggattctactatgtcggcggcggcgattgatggtgtggcggctctgagatcggtgtttcagcgggtaaaccaggcggcggagaaagcgggtcgtgggtcggatcagatacgggtcgtagcggtgagtaagacgaaaccagtttctctgattcgccaagtatacgacgctggtcagaggtcttttggagagaattatgtgcaagagatcattgagaaggcacctcagcttccagaagatatagagtggcatttcattgggaatttgcagagcaacaaagtgaagcctttgctatctggtgttcctaaccttgtgaccgtggaaagtgttgatgatgaaaagattgcaaatatgcttgatcgtgtggttggtaatatcggaagaaagcccttgaaggtatttgtccaagtgaataccagtggtgaagactctaaattcggcgtggaaccctcgggatgcgtaggactggcgaaacacgtgaaggaagcttgctcgaatcttgagttttctggtttgatgacaatagggatggctgattacacttcaaccccagagaatttcaagttgcttgcgaaatgcagaagtgaagtgtgtaaggagcttggaataccggaggagcaatgtgagctatctatggggatgtctggtgactttgaactagcaattgaactgggaagcacaaatgtgagaataggatctactattttcggggcgagagagtatcctaagaagtaatgatgtaaactactgagtgatgagattgattctaagtttgaacatcaaaaccagtttcagggaagaataagagcttaggttttaatgttgaaatcatgtagatcttctctcttcttttgttttgcattgtatttggtgatgttgcttgtaagttgtaaccaaggtacattattactatttttctaatttcatggatataaacacatgaaagaag

SEQ ID NO: 102241 - protein, 265 aa, Arabidopsis thaliana
  peptide (1)..(265): Ceres Seq. ID no. 13609795
  misc_feature (43)..(262): Pfam Name: Alanine racemase, N-terminal domain Pfam Description: Alanine racemase, N-terminal domain
  misc_feature (11)..(265): Homolog of NCBI NO: 30682530 NR Description: Proline synthetase associated protein -related
  misc_feature (11)..(265): Homolog of NCBI NO: 18391333 NR Description: Proline synthetase associated protein -related thaliana] >gi|16226282|gb|AAL16123.1|AF428291_1 [Arabidopsis thaliana] >gi|21436037|gb|AAM51596.1|
  misc_feature (26)..(265): Homolog of NCBI NO: 18416879 NR Description: Proline synthetase associated protein -related
  misc_feature (26)..(265): Homolog of NCBI NO: 14030629 NR Description: AT4g26860/F10M23_200 [Arabidopsis thaliana] AT4g26860/F10M23_200 [Arabidopsis thaliana] putative proline synthetase associated protein [Arabidopsis
  misc_feature (26)..(255): Homolog of NCBI NO: 7445224 NR Description: hypothetical protein F10M23.200 - Arabidopsis >gi|4455209|emb|CAB36532.1| putative Proline synthetase protein [Arabidopsis thaliana] >gi|7269539|emb|CAB79541.1|
  misc_feature (54)..(265): Homolog of NCBI NO: 11359716 NR Description: conserved hypothetical protein [imported] - major >gi|6066445|emb|CAB58387.1| possible proline synthetase
  misc_feature (27)..(265): Homolog of NCBI NO: 6005842 NR Description: proline synthetase co-transcribed homolog; proline
  misc_feature (33)..(265): Homolog of NCBI NO: 16930823 NR Description: proline synthetase co-transcribed [Mus musculus]
  misc_feature (45)..(265): Homolog of NCBI NO: 34879017 NR Description: similar to Proline synthetase associated [Rattus
  misc_feature (119)..(243): Homolog of NCBI NO: 19386824 NR Description: B1147A04.19 [Oryza sativa (japonica
SCDQKISDCSMNEEEPDKEHVADSTMSAAAIDGVAALRSVFQRVNQAAEKAGRGSDQIRVVAVSKTKPVSLIRQVYDAGQRSFGENYVQEIIEKAPQLPEDIEWHFIGNLQSNKVKPLLSGVPNLVTVESVDDEKIANMLDRVVGNIGRKPLKVFVQVNTSGEDSKFGVEPSGCVGLAKHVKEACSNLEFSGLMTIGMADYTSTPENFKLLAKCRSEVCKELGIPEEQCELSMGMSGDFELAIELGSTNVRIGSTIFGAREYPKK

SEQ ID NO: 102242 - protein, 255 aa, Arabidopsis thaliana
  peptide (1)..(255): Ceres Seq. ID no. 13609796
  misc_feature (33)..(252): Pfam Name: Alanine racemase, N-terminal domain Pfam Description: Alanine racemase, N-terminal domain
  misc_feature (1)..(255): Homolog of NCBI NO: 30682530 NR Description: Proline synthetase associated protein -related
  misc_feature (1)..(255): Homolog of NCBI NO: 18391333 NR Description: Proline synthetase associated protein -related thaliana] >gi|16226282|gb|AAL16123.1|AF428291_1 [Arabidopsis thaliana] >gi|21436037|gb|AAM51596.1|
  misc_feature (16)..(255): Homolog of NCBI NO: 18416879 NR Description: Proline synthetase associated protein -related
  misc_feature (16)..(255): Homolog of NCBI NO: 14030629 NR Description: AT4g26860/F10M23_200 [Arabidopsis thaliana] AT4g26860/F10M23_200 [Arabidopsis thaliana] putative proline synthetase associated protein [Arabidopsis
  misc_feature (16)..(245): Homolog of NCBI NO: 7445224 NR Description: hypothetical protein F10M23.200 - Arabidopsis >gi|4455209|emb|CAB36532.1| putative Proline synthetase protein [Arabidopsis thaliana] >gi|7269539|emb|CAB79541.1|
  misc_feature (44)..(255): Homolog of NCBI NO: 11359716 NR Description: conserved hypothetical protein [imported] - major >gi|6066445|emb|CAB58387.1| possible proline synthetase
  misc_feature (17)..(255): Homolog of NCBI NO: 6005842 NR Description: proline synthetase co-transcribed homolog; proline
  misc_feature (23)..(255): Homolog of NCBI NO: 16930823 NR Description: proline synthetase co-transcribed [Mus musculus]
  misc_feature (35)..(255): Homolog of NCBI NO: 34879017 NR Description: similar to Proline synthetase associated [Rattus
  misc_feature (109)..(233): Homolog of NCBI NO: 19386824 NR Description: B1147A04.19 [Oryza sativa (japonica
MNEEEPDKEHVADSTMSAAAIDGVAALRSVFQRVNQAAEKAGRGSDQIRVVAVSKTKPVSLIRQVYDAGQRSFGENYVQEIIEKAPQLPEDIEWHFIGNLQSNKVKPLLSGVPNLVTVESVDDEKIANMLDRVVGNIGRKPLKVFVQVNTSGEDSKFGVEPSGCVGLAKHVKEACSNLEFSGLMTIGMADYTSTPENFKLLAKCRSEVCKELGIPEEQCELSMGMSGDFELAIELGSTNVRIGSTIFGAREYPKK

SEQ ID NO: 102243 - protein, 240 aa, Arabidopsis thaliana
  peptide (1)..(240): Ceres Seq. ID no. 13609797
  misc_feature (18)..(237): Pfam Name: Alanine racemase, N-terminal domain Pfam Description: Alanine racemase, N-terminal domain
  misc_feature (1)..(240): Homolog of NCBI NO: 30682530 NR Description: Proline synthetase associated protein -related
  misc_feature (1)..(240): Homolog of NCBI NO: 18391333 NR Description: Proline synthetase associated protein -related thaliana] >gi|16226282|gb|AAL16123.1|AF428291_1 [Arabidopsis thaliana] >gi|21436037|gb|AAM51596.1|
  misc_feature (1)..(240): Homolog of NCBI NO: 18416879 NR Description: Proline synthetase associated protein -related
  misc_feature (1)..(240): Homolog of NCBI NO: 14030629 NR Description: AT4g26860/F10M23_200 [Arabidopsis thaliana] AT4g26860/F10M23_200 [Arabidopsis thaliana] putative proline synthetase associated protein [Arabidopsis
  misc_feature (1)..(230): Homolog of NCBI NO: 7445224 NR Description: hypothetical protein F10M23.200 - Arabidopsis >gi|4455209|emb|CAB36532.1| putative Proline synthetase protein [Arabidopsis thaliana] >gi|7269539|emb|CAB79541.1|
  misc_feature (29)..(240): Homolog of NCBI NO: 11359716 NR Description: conserved hypothetical protein [imported] - major >gi|6066445|emb|CAB58387.1| possible proline synthetase
  misc_feature (2)..(240): Homolog of NCBI NO: 6005842 NR Description: proline synthetase co-transcribed homolog; proline
  misc_feature (8)..(240): Homolog of NCBI NO: 16930823 NR Description: proline synthetase co-transcribed [Mus musculus]
  misc_feature (20)..(240): Homolog of NCBI NO: 34879017 NR Description: similar to Proline synthetase associated [Rattus
  misc_feature (94)..(218): Homolog of NCBI NO: 19386824 NR Description: B1147A04.19 [Oryza sativa (japonica
MSAAAIDGVAALRSVFQRVNQAAEKAGRGSDQIRVVAVSKTKPVSLIRQVYDAGQRSFGENYVQEIIEKAPQLPEDIEWHFIGNLQSNKVKPLLSGVPNLVTVESVDDEKIANMLDRVVGNIGRKPLKVFVQVNTSGEDSKFGVEPSGCVGLAKHVKEACSNLEFSGLMTIGMADYTSTPENFKLLAKCRSEVCKELGIPEEQCELSMGMSGDFELAIELGSTNVRIGSTIFGAREYPKK

SEQ ID NO: 102244 - DNA, 1531 bp, Arabidopsis thaliana
  misc_feature (1)..(1531): Ceres Seq. ID no. 13609798
  misc_feature: MA Experiment ID: 108461 Result: Up-regulated in Transcription
  misc_feature: MA Experiment 108461 PARAMETER Experiment Name: At_Germinating_Seeds_cDNA_P Parameter: Age (day) Value: 1 vs. 0
  misc_feature: MA Experiment 108461 PARAMETER Experiment Name: At_Germinating_Seeds_cDNA_P Parameter: Tissue Value: Germinating Seeds
  misc_feature: MA Experiment ID: 108572 Result: Up-regulated in Transcription
  misc_feature: MA Experiment 108572 PARAMETER Experiment Name: At_Drought_cDNA_P Parameter: Timepoint (hr) Value: 1
  misc_feature: MA Experiment 108572 PARAMETER Experiment Name: At_Drought_cDNA_P Parameter: Tissue Value: Aerial
  misc_feature: MA Experiment 108572 PARAMETER Experiment Name: At_Drought_cDNA_P Parameter: Treatment Value: Drought vs. No Drought
  misc_feature: MA Experiment ID: 108573 Result: Up-regulated in Transcription
  misc_feature: MA Experiment 108573 PARAMETER Experiment Name: At_Drought_cDNA_P Parameter: Timepoint (hr) Value: 6
  misc_feature: MA Experiment 108573 PARAMETER Experiment Name: At_Drought_cDNA_P Parameter: Tissue Value: Aerial
  misc_feature: MA Experiment 108573 PARAMETER Experiment Name: At_Drought_cDNA_P Parameter: Treatment Value: Drought vs. No Drought
  misc_feature: MA Experiment ID: 20000179 Result: Up-regulated in Transcription
  misc_feature: MA Experiment 20000179 PARAMETER Experiment Name: At_Germinating_Seeds_P Parameter: Age (hr) Value: 6 vs. 0
  misc_feature: MA Experiment 20000179 PARAMETER Experiment Name: At_Germinating_Seeds_P Parameter: Tissue Value: Germinating Seeds
  misc_feature: MA Experiment ID: 20000180 Result: Up-regulated in Transcription
  misc_feature: MA Experiment 20000180 PARAMETER Experiment Name: At_Germinating_Seeds_P Parameter: Age (hr) Value: 24 vs. 0
  misc_feature: MA Experiment 20000180 PARAMETER Experiment Name: At_Germinating_Seeds_P Parameter: Tissue Value: Germinating Seeds
  misc_feature: MA Experiment ID: 20000184 Result: Down-regulated in Transcription
  misc_feature: MA Experiment 20000184 PARAMETER Experiment Name: At_Shoots__P Parameter: Age (day) Value: 7
  misc_feature: MA Experiment 20000184 PARAMETER Experiment Name: At_Shoots__P Parameter: Tissue Value: Shoots vs. Whole Plant
  misc_feature: MA Experiment ID: 20000234 Result: Up-regulated in Transcription
  misc_feature: MA Experiment 20000234 PARAMETER Experiment Name: At_Siliques_P Parameter: Age (day) Value: 21
  misc_feature: MA Experiment 20000234 PARAMETER Experiment Name: At_Siliques_P Parameter: Organism Value: A. thaliana
  misc_feature: MA Experiment 20000234 PARAMETER Experiment Name: At_Siliques_P Parameter: Plant Line Value: WS
  misc_feature: MA Experiment 20000234 PARAMETER Experiment Name: At_Siliques_P Parameter: Tissue Value: Less Than 5mm Siliques vs. Whole Plant
  misc_feature: MA Experiment ID: 20000235 Result: Up-regulated in Transcription
  misc_feature: MA Experiment 20000235 PARAMETER Experiment Name: At_Siliques_P Parameter: Age (day) Value: 21
  misc_feature: MA Experiment 20000235 PARAMETER Experiment Name: At_Siliques_P Parameter: Organism Value: A. thaliana
  misc_feature: MA Experiment 20000235 PARAMETER Experiment Name: At_Siliques_P Parameter: Plant Line Value: WS
  misc_feature: MA Experiment 20000235 PARAMETER Experiment Name: At_Siliques_P Parameter: Tissue Value: 5-10mm Siliques vs. Whole Plant
  misc_feature: MA Experiment ID: 20000437 Result: Up-regulated in Transcription
  misc_feature: MA Experiment 20000437 PARAMETER Experiment Name: At_Drought_P Parameter: Age (day) Value: 8
  misc_feature: MA Experiment 20000437 PARAMETER Experiment Name: At_Drought_P Parameter: Organism Value: A. thaliana
  misc_feature: MA Experiment 20000437 PARAMETER Experiment Name: At_Drought_P Parameter: Plant Line Value: WS
  misc_feature: MA Experiment 20000437 PARAMETER Experiment Name: At_Drought_P Parameter: Timepoint (hr) Value: 24
  misc_feature: MA Experiment 20000437 PARAMETER Experiment Name: At_Drought_P Parameter: Tissue Value: Whole Plant
  misc_feature: MA Experiment 20000437 PARAMETER Experiment Name: At_Drought_P Parameter: Treatment Value: Drought vs. No Drought
  misc_feature: MA Experiment ID: 20001451 Result: Down-regulated in Transcription
  misc_feature: MA Experiment 20001451 PARAMETER Experiment Name: At_Far-red-induction_P Parameter: Age (day) Value: 7
  misc_feature: MA Experiment 20001451 PARAMETER Experiment Name: At_Far-red-induction_P Parameter: Light Value: Far-red vs. White
  misc_feature: MA Experiment 20001451 PARAMETER Experiment Name: At_Far-red-induction_P Parameter: Organism Value: A. thaliana
  misc_feature: MA Experiment 20001451 PARAMETER Experiment Name: At_Far-red-induction_P Parameter: Plant Line Value: Columbia
  misc_feature: MA Experiment 20001451 PARAMETER Experiment Name: At_Far-red-induction_P Parameter: Timepoint (hr) Value: 24
  misc_feature: MA Experiment 20001451 PARAMETER Experiment Name: At_Far-red-induction_P Parameter: Tissue Value: Whole Plant
  misc_feature: MA Experiment ID: 20001556 Result: Up-regulated in Transcription
  misc_feature: MA Experiment 20001556 PARAMETER Experiment Name: At_Drought_Soil_Dry_P Parameter: Age (day) Value: 26
  misc_feature: MA Experiment 20001556 PARAMETER Experiment Name: At_Drought_Soil_Dry_P Parameter: Organism Value: A. thaliana
  misc_feature: MA Experiment 20001556 PARAMETER Experiment Name: At_Drought_Soil_Dry_P Parameter: Plant Line Value: WS
  misc_feature: MA Experiment 20001556 PARAMETER Experiment Name: At_Drought_Soil_Dry_P Parameter: Post Timepoint (hr) Value: None
  misc_feature: MA Experiment 20001556 PARAMETER Experiment Name: At_Drought_Soil_Dry_P Parameter: Post-Treatment Value: None
  misc_feature: MA Experiment 20001556 PARAMETER Experiment Name: At_Drought_Soil_Dry_P Parameter: Timepoint (day) Value: 12
  misc_feature: MA Experiment 20001556 PARAMETER Experiment Name: At_Drought_Soil_Dry_P Parameter: Treatment Value: Drought vs. No Drought
  misc_feature: MA Experiment ID: 20001905 Result: Up-regulated in Transcription
  misc_feature: MA Experiment 20001905 PARAMETER Experiment Name: At_Drought_Reproduction_P Parameter: Age (day) Value: 40
  misc_feature: MA Experiment 20001905 PARAMETER Experiment Name: At_Drought_Reproduction_P Parameter: Organism Value: A. thaliana
  misc_feature: MA Experiment 20001905 PARAMETER Experiment Name: At_Drought_Reproduction_P Parameter: Plant Line Value: WS
  misc_feature: MA Experiment 20001905 PARAMETER Experiment Name: At_Drought_Reproduction_P Parameter: Timepoint (day) Value: 10
  misc_feature: MA Experiment 20001905 PARAMETER Experiment Name: At_Drought_Reproduction_P Parameter: Tissue Value: Rosettes
  misc_feature: MA Experiment 20001905 PARAMETER Experiment Name: At_Drought_Reproduction_P Parameter: Treatment Value: Drought vs. No Drought
acctttctttctctctttctctcaaaatccaaaatgttgtaatttgcaattcttcagtttccgtttctctcctgagaaatttattgacttcaaaaaccctaaaaagacttgtgattgttcgtttctctaactcgaatgttgatcgtacgacggtgagtgatcgtagtacaatgacgaagaaatcacagccgcagattccgcctccattgtcccgtcgcggcggcgtcgtgtggctgggatggaaactcgtaatcgctttctccgtcgcgctttgccttcttgctcttcttcgaatccaactacagtacaattccttcacgacattgtcgtttccactctccgtcgcgagatctcagacaccgcttcacaaatactccggtgatcgtcccaagctcgctttccttttcttagctcgccgtgatctcccacttgattttatgtgggatagattcttcaagggagtggatcatgcgaatttctcaatttatatacattcagtacctggtttcgtgttcaatgaagaaactacacgatcacagtatttctataatcgccaattgaacaatagcattaaggtagtatggggagaatcaagcatgattgaagcagaaagattgttgcttgcatctgctttagaggatcactccaatcaaagatttgttcttctctctgacagatgtgctccattatatgactttggctatatatacaaatatcttatctcttcaccgaggagttttgtggatagttttcttcatactaaagagacacggtacagtgtgaaaatgtctcctgtcatacctgaagagaaatggcgaaaaggatcccagtggatagctttgatcagaagtcatgcagaggtcattgtaaatgatggtatcgtattcccagtttttaaggaattctgcaagagatgtccacctttaggtaccaatgaggcatggttgtttcttaaacagaagcgacgcaactgcatccccgatgaacactatgtgcaaacattgcttacgatgcaaggactagagagtgaaatggaacgaagaacagtgacatacactgtatggaacgtttcaggtacaaaatatgaagccaaatcttggcatcccgtcactttcacattggaaaactccggccctgaggaaataaaagaaataaagaaaatagaccatgtctattacgagtctgaatctcgaacggaatggtgtaaggcggattcgaaacccgtcccatgctttctctttgcaaggaagttcacgaatgaagctgctatgcgcattgtgagtgaaggactaataggatcatcagcaaacaaaaccttataactttgcaacagtgtaagcaagtaggtcaagcaacagagcgtatacatagagtaggaatagcattgatacattacaaacatccctcatgaggtttaatggtttatgattatatatgacgcttagtaaaaactaataatcattcttcatggataatcttgtgtttgggtgttaaaatttctatgtgtatatgtctgaagaaactggcttcg

SEQ ID NO: 102245 - protein, 439 aa, Arabidopsis thaliana
  peptide (1)..(439): Ceres Seq. ID no. 13609799
  misc_feature (169)..(278): Pfam Name: Arabidopsis protein of unknown function, DUF266 Pfam Description: Arabidopsis protein of unknown function, DUF266
  misc_feature (57)..(439): Homolog of NCBI NO: 30682534 NR Description: expressed protein [Arabidopsis thaliana] unknown protein [Arabidopsis thaliana]
  misc_feature (57)..(358): Homolog of NCBI NO: 25402693 NR Description: hypothetical protein [imported] - Arabidopsis >gi|3157941|gb|AAC17624.1| Contains similarity to hypothetical
  misc_feature (81)..(431): Homolog of NCBI NO: 15241437 NR Description: expressed protein [Arabidopsis thaliana]
  misc_feature (81)..(385): Homolog of NCBI NO: 30684956 NR Description: expressed protein [Arabidopsis thaliana]
  misc_feature (71)..(385): Homolog of NCBI NO: 34911442 NR Description: P0431H09.21 [Oryza sativa (japonica
  misc_feature (191)..(303): Homolog of NCBI NO: 22330381 NR Description: hypothetical protein [Arabidopsis thaliana]
  misc_feature (68)..(154): Homolog of NCBI NO: 22330381 NR Description: hypothetical protein [Arabidopsis thaliana]
  misc_feature (311)..(439): Homolog of NCBI NO: 25402693 NR Description: hypothetical protein [imported] - Arabidopsis >gi|3157941|gb|AAC17624.1| Contains similarity to hypothetical
  misc_feature (130)..(417): Homolog of NCBI NO: 30680587 NR Description: expressed protein [Arabidopsis thaliana]
  misc_feature (128)..(427): Homolog of NCBI NO: 38346557 NR Description: OSJNBa0035M09.18 [Oryza sativa (japonica
LSFSLSLKIQNVVICNSSVSVSLLRNLLTSKTLKRLVIVRFSNSNVDRTTVSDRSTMTKKSQPQIPPPLSRRGGVVWLGWKLVIAFSVALCLLALLRIQLQYNSFTTLSFPLSVARSQTPLHKYSGDRPKLAFLFLARRDLPLDFMWDRFFKGVDHANFSIYIHSVPGFVFNEETTRSQYFYNRQLNNSIKVVWGESSMIEAERLLLASALEDHSNQRFVLLSDRCAPLYDFGYIYKYLISSPRSFVDSFLHTKETRYSVKMSPVIPEEKWRKGSQWIALIRSHAEVIVNDGIVFPVFKEFCKRCPPLGTNEAWLFLKQKRRNCIPDEHYVQTLLTMQGLESEMERRTVTYTVWNVSGTKYEAKSWHPVTFTLENSGPEEIKEIKKIDHVYYESESRTEWCKADSKPVPCFLFARKFTNEAAMRIVSEGLIGSSANKTL

SEQ ID NO: 102246 - protein, 383 aa, Arabidopsis thaliana; identical to SEQ ID NO: 43231
  peptide (1)..(383): Ceres Seq. ID no. 13609800
  misc_feature (113)..(222): Pfam Name: Arabidopsis protein of unknown function, DUF266 Pfam Description: Arabidopsis protein of unknown function, DUF266
  misc_feature (1)..(383): Homolog of NCBI NO: 30682534 NR Description: expressed protein [Arabidopsis thaliana] unknown protein [Arabidopsis thaliana]
  misc_feature (1)..(302): Homolog of NCBI NO: 25402693 NR Description: hypothetical protein [imported] - Arabidopsis >gi|3157941|gb|AAC17624.1| Contains similarity to hypothetical
  misc_feature (25)..(375): Homolog of NCBI NO: 15241437 NR Description: expressed protein [Arabidopsis thaliana]
  misc_feature (25)..(329): Homolog of NCBI NO: 30684956 NR Description: expressed protein [Arabidopsis thaliana]
  misc_feature (15)..(329): Homolog of NCBI NO: 34911442 NR Description: P0431H09.21 [Oryza sativa (japonica
  misc_feature (135)..(247): Homolog of NCBI NO: 22330381 NR Description: hypothetical protein [Arabidopsis thaliana]
  misc_feature (12)..(98): Homolog of NCBI NO: 22330381 NR Description: hypothetical protein [Arabidopsis thaliana]
  misc_feature (255)..(383): Homolog of NCBI NO: 25402693 NR Description: hypothetical protein [imported] - Arabidopsis >gi|3157941|gb|AAC17624.1| Contains similarity to hypothetical
  misc_feature (74)..(361): Homolog of NCBI NO: 30680587 NR Description: expressed protein [Arabidopsis thaliana]
  misc_feature (72)..(371): Homolog of NCBI NO: 38346557 NR Description: OSJNBa0035M09.18 [Oryza sativa (japonica

SEQ ID NO: 102247 - protein, 294 aa, Arabidopsis thaliana; identical to SEQ ID NO: 43232
  peptide (1)..(294): Ceres Seq. ID no. 13609801
  misc_feature (24)..(133): Pfam Name: Arabidopsis protein of unknown function, DUF266 Pfam Description: Arabidopsis protein of unknown function, DUF266
  misc_feature (1)..(294): Homolog of NCBI NO: 30682534 NR Description: expressed protein [Arabidopsis thaliana] unknown protein [Arabidopsis thaliana]
  misc_feature (1)..(213): Homolog of NCBI NO: 25402693 NR Description: hypothetical protein [imported] - Arabidopsis >gi|3157941|gb|AAC17624.1| Contains similarity to hypothetical
  misc_feature (1)..(286): Homolog of NCBI NO: 15241437 NR Description: expressed protein [Arabidopsis thaliana]
  misc_feature (1)..(240): Homolog of NCBI NO: 30684956 NR Description: expressed protein [Arabidopsis thaliana]
  misc_feature (1)..(240): Homolog of NCBI NO: 34911442 NR Description: P0431H09.21 [Oryza sativa (japonica
  misc_feature (46)..(158): Homolog of NCBI NO: 22330381 NR Description: hypothetical protein [Arabidopsis thaliana]
  misc_feature (166)..(294): Homolog of NCBI NO: 25402693 NR Description: hypothetical protein [imported] - Arabidopsis >gi|3157941|gb|AAC17624.1| Contains similarity to hypothetical
  misc_feature (1)..(272): Homolog of NCBI NO: 30680587 NR Description: expressed protein [Arabidopsis thaliana]
  misc_feature (1)..(282): Homolog of NCBI NO: 38346557 NR Description: OSJNBa0035M09.18 [Oryza sativa (japonica
  misc_feature (1)..(281): Homolog of NCBI NO: 26452247 NR Description: unknown protein [Arabidopsis thaliana] Unknown protein [Arabidopsis thaliana]

SEQ ID NO: 102248 - DNA, 1761 bp, Arabidopsis thaliana
  misc_feature (1)..(1761): Ceres Seq. ID no. 13609817
  misc_feature: MA Experiment ID: 108433 Result: Up-regulated in Transcription
  misc_feature: MA Experiment 108433 PARAMETER Experiment Name: At_rhl_Mutant2_cDNA_P Parameter: Age (day) Value: 7
  misc_feature: MA Experiment 108433 PARAMETER Experiment Name: At_rhl_Mutant2_cDNA_P Parameter: Organism Value: A. thaliana
  misc_feature: MA Experiment 108433 PARAMETER Experiment Name: At_rhl_Mutant2_cDNA_P Parameter: Plant Line Value: rhl Mutant vs. wt landsburg
  misc_feature: MA Experiment 108433 PARAMETER Experiment Name: At_rhl_Mutant2_cDNA_P Parameter: Tissue Value: Roots
  misc_feature: MA Experiment ID: 108434 Result: Down-regulated in Transcription
  misc_feature: MA Experiment 108434 PARAMETER Experiment Name: At_Root_Tips_cDNA_P Parameter: Tissue Value: Root Tips
  misc_feature: MA Experiment ID: 108435 Result: Up-regulated in Transcription
  misc_feature: MA Experiment 108435 PARAMETER Experiment Name: At_stm_Mutants_cDNA_P Parameter: Plant Line Value: wt Landsburg vs stm
  misc_feature: MA Experiment 108435 PARAMETER Experiment Name: At_stm_Mutants_cDNA_P Parameter: Tissue Value: Shoot Apical Meristem Region
  misc_feature: MA Experiment ID: 108462 Result: Up-regulated in Transcription
  misc_feature: MA Experiment 108462 PARAMETER Experiment Name: At_Germinating_Seeds_cDNA_P Parameter: Age (day) Value: 2 vs. 0
  misc_feature: MA Experiment 108462 PARAMETER Experiment Name: At_Germinating_Seeds_cDNA_P Parameter: Tissue Value: Germinating Seeds
  misc_feature: MA Experiment ID: 108463 Result: Up-regulated in Transcription
  misc_feature: MA Experiment 108463 PARAMETER Experiment Name: At_Germinating_Seeds_cDNA_P Parameter: Age (day) Value: 3 vs. 0
  misc_feature: MA Experiment 108463 PARAMETER Experiment Name: At_Germinating_Seeds_cDNA_P Parameter: Tissue Value: Germinating Seeds
  misc_feature: MA Experiment ID: 108464 Result: Up-regulated in Transcription
  misc_feature: MA Experiment 108464 PARAMETER Experiment Name: At_Germinating_Seeds_cDNA_P Parameter: Age (day) Value: 4 vs. 0
  misc_feature: MA Experiment 108464 PARAMETER Experiment Name: At_Germinating_Seeds_cDNA_P Parameter: Tissue Value: Germinating Seeds
  misc_feature: MA Experiment ID: 108572 Result: Up-regulated in Transcription
  misc_feature: MA Experiment 108572 PARAMETER Experiment Name: At_Drought_cDNA_P Parameter: Timepoint (hr) Value: 1
  misc_feature: MA Experiment 108572 PARAMETER Experiment Name: At_Drought_cDNA_P Parameter: Tissue Value: Aerial
  misc_feature: MA Experiment 108572 PARAMETER Experiment Name: At_Drought_cDNA_P Parameter: Treatment Value: Drought vs. No Drought
  misc_feature: MA Experiment ID: 108573 Result: Up-regulated in Transcription
  misc_feature: MA Experiment 108573 PARAMETER Experiment Name: At_Drought_cDNA_P Parameter: Timepoint (hr) Value: 6
  misc_feature: MA Experiment 108573 PARAMETER Experiment Name: At_Drought_cDNA_P Parameter: Tissue Value: Aerial
  misc_feature: MA Experiment 108573 PARAMETER Experiment Name: At_Drought_cDNA_P Parameter: Treatment Value: Drought vs. No Drought
  misc_feature: MA Experiment ID: 108594 Result: Down-regulated in Transcription
  misc_feature: MA Experiment 108594 PARAMETER Experiment Name: At_Ler-rhl_Root_cDNA_P Parameter: Plant Line Value: null
  misc_feature: MA Experiment ID: 108595 Result: Down-regulated in Transcription
  misc_feature: MA Experiment 108595 PARAMETER Experiment Name: At_Ler-pi_Ovule_cDNA_P Parameter: Plant Line Value: null
  misc_feature: MA Experiment ID: 20000090 Result: Down-regulated in Transcription
  misc_feature: MA Experiment ID: 20000185 Result: Up-regulated in Transcription
  misc_feature: MA Experiment 20000185 PARAMETER Experiment Name: At_Roots__P Parameter: Age (day) Value: 7 vs. 21
  misc_feature: MA Experiment 20000185 PARAMETER Experiment Name: At_Roots__P Parameter: Organism Value: A. thaliana
  misc_feature: MA Experiment 20000185 PARAMETER Experiment Name: At_Roots__P Parameter: Tissue Value: Roots vs. Whole Plant
  misc_feature: MA Experiment ID: 20000227 Result: Down-regulated in Transcription
  misc_feature: MA Experiment 20000227 PARAMETER Experiment Name: At_Root-Tips-vs-Tops_P Parameter: Tissue Value: Root Tips vs. Root Tops
  misc_feature: MA Experiment ID: 20000234 Result: Down-regulated in Transcription
  misc_feature: MA Experiment 20000234 PARAMETER Experiment Name: At_Siliques_P Parameter: Age (day) Value: 21
  misc_feature: MA Experiment 20000234 PARAMETER Experiment Name: At_Siliques_P Parameter: Organism Value: A. thaliana
  misc_feature: MA Experiment 20000234 PARAMETER Experiment Name: At_Siliques_P Parameter: Plant Line Value: WS
  misc_feature: MA Experiment 20000234 PARAMETER Experiment Name: At_Siliques_P Parameter: Tissue Value: Less Than 5mm Siliques vs. Whole Plant
  misc_feature: MA Experiment ID: 20000235 Result: Down-regulated in Transcription
  misc_feature: MA Experiment 20000235 PARAMETER Experiment Name: At_Siliques_P Parameter: Age (day) Value: 21
  misc_feature: MA Experiment 20000235 PARAMETER Experiment Name: At_Siliques_P Parameter: Organism Value: A. thaliana
  misc_feature: MA Experiment 20000235 PARAMETER Experiment Name: At_Siliques_P Parameter: Plant Line Value: WS
  misc_feature: MA Experiment 20000235 PARAMETER Experiment Name: At_Siliques_P Parameter: Tissue Value: 5-10mm Siliques vs. Whole Plant
  misc_feature: MA Experiment ID: 20000265 Result: Down-regulated in Transcription
  misc_feature: MA Experiment 20000265 PARAMETER Experiment Name: At_Open_Flower_P Parameter: Age (day) Value: 21
  misc_feature: MA Experiment 20000265 PARAMETER Experiment Name: At_Open_Flower_P Parameter: Plant Line Value: WS
  misc_feature: MA Experiment 20000265 PARAMETER Experiment Name: At_Open_Flower_P Parameter: Tissue Value: Closed Flower vs. Whole Plant
  misc_feature: MA Experiment ID: 20000286 Result: Down-regulated in Transcription
  misc_feature: MA Experiment 20000286 PARAMETER Experiment Name: At_Open_Flower_P Parameter: Age (day) Value: 21
  misc_feature: MA Experiment 20000286 PARAMETER Experiment Name: At_Open_Flower_P Parameter: Plant Line Value: WS
  misc_feature: MA Experiment 20000286 PARAMETER Experiment Name: At_Open_Flower_P Parameter: Tissue Value: Half Open vs. Whole Plant
  misc_feature: MA Experiment ID: 20000439 Result: Up-regulated in Transcription
  misc_feature: MA Experiment 20000439 PARAMETER Experiment Name: At_Roots__P Parameter: Age (day) Value: 14 vs. 21
  misc_feature: MA Experiment 20000439 PARAMETER Experiment Name: At_Roots__P Parameter: Organism Value: A. thaliana
  misc_feature: MA Experiment 20000439 PARAMETER Experiment Name: At_Roots__P Parameter: Tissue Value: Roots vs. Whole Plant
  misc_feature: MA Experiment ID: 20000451 Result: Down-regulated in Transcription
  misc_feature: MA Experiment 20000451 PARAMETER Experiment Name: At_CS6879_Shoots-Roots_P Parameter: Age (day) Value: 14
  misc_feature: MA Experiment 20000451 PARAMETER Experiment Name: At_CS6879_Shoots-Roots_P Parameter: Organism Value: A. thaliana
  misc_feature: MA Experiment 20000451 PARAMETER Experiment Name: At_CS6879_Shoots-Roots_P Parameter: Plant Line Value: CS6879 vs. WS
  misc_feature: MA Experiment 20000451 PARAMETER Experiment Name: At_CS6879_Shoots-Roots_P Parameter: Tissue Value: Roots
  misc_feature: MA Experiment ID: 20000495 Result: Up-regulated in Transcription
  misc_feature: MA Experiment 20000495 PARAMETER Experiment Name: At_Guard_Cells_P Parameter: Harvest Date Value: 8/2/2002
  misc_feature: MA Experiment 20000495 PARAMETER Experiment Name: At_Guard_Cells_P Parameter: Organism Value: A. thaliana
  misc_feature: MA Experiment 20000495 PARAMETER Experiment Name: At_Guard_Cells_P Parameter: Tissue Value: Guard Cells vs. Leaves
  misc_feature: MA Experiment ID: 20001556 Result: Down-regulated in Transcription
  misc_feature: MA Experiment 20001556 PARAMETER Experiment Name: At_Drought_Soil_Dry_P Parameter: Age (day) Value: 26
  misc_feature: MA Experiment 20001556 PARAMETER Experiment Name: At_Drought_Soil_Dry_P Parameter: Organism Value: A. thaliana
  misc_feature: MA Experiment 20001556 PARAMETER Experiment Name: At_Drought_Soil_Dry_P Parameter: Plant Line Value: WS
  misc_feature: MA Experiment 20001556 PARAMETER Experiment Name: At_Drought_Soil_Dry_P Parameter: Post Timepoint (hr) Value: None
  misc_feature: MA Experiment 20001556 PARAMETER Experiment Name: At_Drought_Soil_Dry_P Parameter: Post-Treatment Value: None
  misc_feature: MA Experiment 20001556 PARAMETER Experiment Name: At_Drought_Soil_Dry_P Parameter: Timepoint (day) Value: 12
  misc_feature: MA Experiment 20001556 PARAMETER Experiment Name: At_Drought_Soil_Dry_P Parameter: Treatment Value: Drought vs. No Drought
  misc_feature: MA Experiment ID: 20001557 Result: Down-regulated in Transcription
  misc_feature: MA Experiment 20001557 PARAMETER Experiment Name: At_Drought_Soil_Dry_P Parameter: Age (day) Value: 27
  misc_feature: MA Experiment 20001557 PARAMETER Experiment Name: At_Drought_Soil_Dry_P Parameter: Organism Value: A. thaliana
  misc_feature: MA Experiment 20001557 PARAMETER Experiment Name: At_Drought_Soil_Dry_P Parameter: Plant Line Value: WS
  misc_feature: MA Experiment 20001557 PARAMETER Experiment Name: At_Drought_Soil_Dry_P Parameter: Post Timepoint (hr) Value: 3
  misc_feature: MA Experiment 20001557 PARAMETER Experiment Name: At_Drought_Soil_Dry_P Parameter: Post-Treatment Value: Re-Water vs. No Drought
  misc_feature: MA Experiment 20001557 PARAMETER Experiment Name: At_Drought_Soil_Dry_P Parameter: Timepoint (day) Value: 13
  misc_feature: MA Experiment 20001557 PARAMETER Experiment Name: At_Drought_Soil_Dry_P Parameter: Treatment Value: Drought vs. No Drought
  misc_feature: MA Experiment ID: 20001558 Result: Down-regulated in Transcription
  misc_feature: MA Experiment 20001558 PARAMETER Experiment Name: At_Drought_Soil_Dry_P Parameter: Age (day) Value: 27
  misc_feature: MA Experiment 20001558 PARAMETER Experiment Name: At_Drought_Soil_Dry_P Parameter: Organism Value: A. thaliana
  misc_feature: MA Experiment 20001558 PARAMETER Experiment Name: At_Drought_Soil_Dry_P Parameter: Plant Line Value: WS
  misc_feature: MA Experiment 20001558 PARAMETER Experiment Name: At_Drought_Soil_Dry_P Parameter: Post Timepoint (hr) Value: 6
  misc_feature: MA Experiment 20001558 PARAMETER Experiment Name: At_Drought_Soil_Dry_P Parameter: Post-Treatment Value: Re-Water vs. No Drought
  misc_feature: MA Experiment 20001558 PARAMETER Experiment Name: At_Drought_Soil_Dry_P Parameter: Timepoint (day) Value: 13
  misc_feature: MA Experiment 20001558 PARAMETER Experiment Name: At_Drought_Soil_Dry_P Parameter: Treatment Value: Drought vs. No Drought
  misc_feature: MA Experiment ID: 20001559 Result: Down-regulated in Transcription
  misc_feature: MA Experiment 20001559 PARAMETER Experiment Name: At_Drought_Soil_Dry_P Parameter: Age (day) Value: 28
  misc_feature: MA Experiment 20001559 PARAMETER Experiment Name: At_Drought_Soil_Dry_P Parameter: Organism Value: A. thaliana
  misc_feature: MA Experiment 20001559 PARAMETER Experiment Name: At_Drought_Soil_Dry_P Parameter: Plant Line Value: WS
  misc_feature: MA Experiment 20001559 PARAMETER Experiment Name: At_Drought_Soil_Dry_P Parameter: Post Timepoint (hr) Value: 29
  misc_feature: MA Experiment 20001559 PARAMETER Experiment Name: At_Drought_Soil_Dry_P Parameter: Post-Treatment Value: Re-Water vs. No Drought
  misc_feature: MA Experiment 20001559 PARAMETER Experiment Name: At_Drought_Soil_Dry_P Parameter: Timepoint (day) Value: 14
  misc_feature: MA Experiment 20001559 PARAMETER Experiment Name: At_Drought_Soil_Dry_P Parameter: Treatment Value: Drought vs. No Drought
  misc_feature: MA Experiment ID: 20001560 Result: Down-regulated in Transcription
  misc_feature: MA Experiment 20001560 PARAMETER Experiment Name: At_Drought_Soil_Dry_P Parameter: Age (day) Value: 28
  misc_feature: MA Experiment 20001560 PARAMETER Experiment Name: At_Drought_Soil_Dry_P Parameter: Organism Value: A. thaliana
  misc_feature: MA Experiment 20001560 PARAMETER Experiment Name: At_Drought_Soil_Dry_P Parameter: Plant Line Value: WS
  misc_feature: MA Experiment 20001560 PARAMETER Experiment Name: At_Drought_Soil_Dry_P Parameter: Post Timepoint (hr) Value: None
  misc_feature: MA Experiment 20001560 PARAMETER Experiment Name: At_Drought_Soil_Dry_P Parameter: Post-Treatment Value: None
  misc_feature: MA Experiment 20001560 PARAMETER Experiment Name: At_Drought_Soil_Dry_P Parameter: Timepoint (day) Value: 14
  misc_feature: MA Experiment 20001560 PARAMETER Experiment Name: At_Drought_Soil_Dry_P Parameter: Treatment Value: Drought vs. No Drought
  misc_feature: MA Experiment ID: 20001904 Result: Down-regulated in Transcription
  misc_feature: MA Experiment 20001904 PARAMETER Experiment Name: At_Drought_Reproduction_P Parameter: Age (day) Value: 37
  misc_feature: MA Experiment 20001904 PARAMETER Experiment Name: At_Drought_Reproduction_P Parameter: Organism Value: A. thaliana
  misc_feature: MA Experiment 20001904 PARAMETER Experiment Name: At_Drought_Reproduction_P Parameter: Plant Line Value: WS
  misc_feature: MA Experiment 20001904 PARAMETER Experiment Name: At_Drought_Reproduction_P Parameter: Timepoint (day) Value: 7
  misc_feature: MA Experiment 20001904 PARAMETER Experiment Name: At_Drought_Reproduction_P Parameter: Tissue Value: Rosettes
  misc_feature: MA Experiment 20001904 PARAMETER Experiment Name: At_Drought_Reproduction_P Parameter: Treatment Value: Drought vs. No Drought
  misc_feature: MA Experiment ID: 20001905 Result: Down-regulated in Transcription
  misc_feature: MA Experiment 20001905 PARAMETER Experiment Name: At_Drought_Reproduction_P Parameter: Age (day) Value: 40
  misc_feature: MA Experiment 20001905 PARAMETER Experiment Name: At_Drought_Reproduction_P Parameter: Organism Value: A. thaliana
  misc_feature: MA Experiment 20001905 PARAMETER Experiment Name: At_Drought_Reproduction_P Parameter: Plant Line Value: WS
  misc_feature: MA Experiment 20001905 PARAMETER Experiment Name: At_Drought_Reproduction_P Parameter: Timepoint (day) Value: 10
  misc_feature: MA Experiment 20001905 PARAMETER Experiment Name: At_Drought_Reproduction_P Parameter: Tissue Value: Rosettes
  misc_feature: MA Experiment 20001905 PARAMETER Experiment Name: At_Drought_Reproduction_P Parameter: Treatment Value: Drought vs. No Drought
gcagcagcaaatactatcatcacccatctccttagttctattttataattcctcttctttttgttcatagctttgtaattatagtcttatttctctttaaggctcaataagaggagatgggtgaaaccgctgccgccaataaccaccgtcaccaccaccatcacggccaccaggtctttgacgtggccagccacgatttcgtccctccacaaccggcttttaaatgcttcgatgatgatggccgcctcaaaagaactgggactgtttggaccgcgagcgctcatataataactgcggttatcggatccggcgttttgtcattggcgtgggcgattgcacagctcggatggatcgctggccctgctgtgatgctattgttctctcttgttactctttactcctccacacttcttagcgactgctacagaaccggcgatgcagtgtctggcaagagaaactacacttacatggatgccgttcgatcaattctcggtgggttcaagttcaagatttgtgggttgattcaatacttgaatctctttggtatcgcaattggatacacgatagcagcttccataagcatgatggcgatcaagagatccaactgcttccacaagagtggaggaaaagacccatgtcacatgtccagtaatccttacatgatcgtatttggtgtggcagagatcttgctctctcaggttcctgatttcgatcagatttggtggatctccattgttgcagctgttatgtccttcacttactctgccattggtctagctcttggaatcgttcaagttgcagcgaatggagttttcaaaggaagtctcactggaataagcatcggaacagtgactcaaacacagaagatatggagaaccttccaagcacttggagacattgcctttgcgtactcatactctgttgtcctaatcgagattcaggatactgtaagatccccaccggcggaatcgaaaacgatgaagaaagcaacaaaaatcagtattgccgtcacaactatcttctacatgctatgtggctcaatgggttatgccgcttttggagatgcagcaccgggaaacctcctcaccggttttggattctacaacccgttttggctccttgacatagctaacgccgccattgttgtccacctcgttggagcttaccaagtctttgctcagcccatctttgcctttattgaaaaatcagtcgcagagagatatccagacaatgacttcctcagcaaggaatttgaaatcagaatccccggatttaagtctccttacaaagtaaacgttttcaggatggtttacaggagtggctttgtcgttacaaccaccgtgatatcgatgctgatgccgttttttaacgacgtggtcgggatcttaggggcgttagggttttggcccttgacggtttattttccggtggagatgtatattaagcagaggaaggttgagaaatggagcacgagatgggtgtgtttacagatgcttagtgttgcttgtcttgtgatctcggtggtcgccggggttggatcaatcgccggagtgatgcttgatcttaaggtctataagccattcaagtctacatattgatgattatggaccatgaacaacagagagagttggtgtgtaaagtttaccatttcaaagaaaactccaaaaatgtgtatattgtatgttgttctcatttcgtatggtctcatctttgtaataaaatttaaaacttatgttataaattataaaaccgtgtgttttc

SEQ ID NO: 102249 - protein, 493 aa, Arabidopsis thaliana; identical to SEQ ID NO: 40482
  peptide (1)..(493): Ceres Seq. ID no. 13609818
  misc_feature (1)..(493): Homolog of NCBI NO: 15242347 NR Description: amino acid permease 2 (AAP2) [Arabidopsis
  misc_feature (1)..(493): Homolog of NCBI NO: 21536895 NR Description: amino acid transport protein AAP2 [Arabidopsis
  misc_feature (31)..(493): Homolog of NCBI NO: 608671 NR Description: amino acid transporter [Arabidopsis thaliana]
  misc_feature (31)..(493): Homolog of NCBI NO: 15237539 NR Description: amino acid transporter 4 (AAP4) [Arabidopsis >gi|10177673|dbj|BAB11033.1| amino acid transporter AAP4
  misc_feature (31)..(493): Homolog of NCBI NO: 20260650 NR Description: amino acid transporter AAP4 [Arabidopsis >gi|28059439|gb|AAO30058.1| amino acid transporter AAP4
  misc_feature (31)..(493): Homolog of NCBI NO: 21536979 NR Description: amino acid transporter AAP4 [Arabidopsis thaliana]
  misc_feature (1)..(493): Homolog of NCBI NO: 7442735 NR Description: amino acid transport protein AAP1 - castor bean
  misc_feature (29)..(493): Homolog of NCBI NO: 21553710 NR Description: amino acid carrier, putative [Arabidopsis
  misc_feature (29)..(493): Homolog of NCBI NO: 15223930 NR Description: amino acid carrier, putative [Arabidopsis
  misc_feature (18)..(491): Homolog of NCBI NO: 27447657 NR Description: amino acid transporter [Lycopersicon esculentum]

SEQ ID NO: 102250 - protein, 409 aa, Arabidopsis thaliana; identical to SEQ ID NO: 40483
  peptide (1)..(409): Ceres Seq. ID no. 13609819
  misc_feature (1)..(409): Homolog of NCBI NO: 15242347 NR Description: amino acid permease 2 (AAP2) [Arabidopsis
  misc_feature (1)..(409): Homolog of NCBI NO: 21536895 NR Description: amino acid transport protein AAP2 [Arabidopsis
  misc_feature (1)..(409): Homolog of NCBI NO: 608671 NR Description: amino acid transporter [Arabidopsis thaliana]
  misc_feature (1)..(409): Homolog of NCBI NO: 15237539 NR Description: amino acid transporter 4 (AAP4) [Arabidopsis >gi|10177673|dbj|BAB11033.1| amino acid transporter AAP4
  misc_feature (1)..(409): Homolog of NCBI NO: 20260650 NR Description: amino acid transporter AAP4 [Arabidopsis >gi|28059439|gb|AAO30058.1| amino acid transporter AAP4
  misc_feature (1)..(409): Homolog of NCBI NO: 21536979 NR Description: amino acid transporter AAP4 [Arabidopsis thaliana]
  misc_feature (1)..(409): Homolog of NCBI NO: 7442735 NR Description: amino acid transport protein AAP1 - castor bean
  misc_feature (1)..(409): Homolog of NCBI NO: 21553710 NR Description: amino acid carrier, putative [Arabidopsis
  misc_feature (1)..(409): Homolog of NCBI NO: 15223930 NR Description: amino acid carrier, putative [Arabidopsis
  misc_feature (1)..(407): Homolog of NCBI NO: 27447657 NR Description: amino acid transporter [Lycopersicon esculentum]

SEQ ID NO: 102251 - protein, 376 aa, Arabidopsis thaliana; identical to SEQ ID NO: 40484
  peptide (1)..(376): Ceres Seq. ID no. 13609820
  misc_feature (1)..(376): Homolog of NCBI NO: 15242347 NR Description: amino acid permease 2 (AAP2) [Arabidopsis
  misc_feature (1)..(376): Homolog of NCBI NO: 21536895 NR Description: amino acid transport protein AAP2 [Arabidopsis
  misc_feature (1)..(376): Homolog of NCBI NO: 608671 NR Description: amino acid transporter [Arabidopsis thaliana]
  misc_feature (1)..(376): Homolog of NCBI NO: 15237539 NR Description: amino acid transporter 4 (AAP4) [Arabidopsis >gi|10177673|dbj|BAB11033.1| amino acid transporter AAP4
  misc_feature (1)..(376): Homolog of NCBI NO: 20260650 NR Description: amino acid transporter AAP4 [Arabidopsis >gi|28059439|gb|AAO30058.1| amino acid transporter AAP4
  misc_feature (1)..(376): Homolog of NCBI NO: 21536979 NR Description: amino acid transporter AAP4 [Arabidopsis thaliana]
  misc_feature (1)..(376): Homolog of NCBI NO: 7442735 NR Description: amino acid transport protein AAP1 - castor bean
  misc_feature (1)..(376): Homolog of NCBI NO: 21553710 NR Description: amino acid carrier, putative [Arabidopsis
  misc_feature (1)..(376): Homolog of NCBI NO: 15223930 NR Description: amino acid carrier, putative [Arabidopsis
  misc_feature (1)..(374): Homolog of NCBI NO: 27447657 NR Description: amino acid transporter [Lycopersicon esculentum]

SEQ ID NO: 102252 - DNA, 2491 bp, Arabidopsis thaliana
  misc_feature (1)..(2491): Ceres Seq. ID no. 13609821
  misc_feature: MA Experiment ID: 108462 Result: Down-regulated in Transcription
  misc_feature: MA Experiment 108462 PARAMETER Experiment Name: At_Germinating_Seeds_cDNA_P Parameter: Age (day) Value: 2 vs. 0
  misc_feature: MA Experiment 108462 PARAMETER Experiment Name: At_Germinating_Seeds_cDNA_P Parameter: Tissue Value: Germinating Seeds
  misc_feature: MA Experiment ID: 108464 Result: Down-regulated in Transcription
  misc_feature: MA Experiment 108464 PARAMETER Experiment Name: At_Germinating_Seeds_cDNA_P Parameter: Age (day) Value: 4 vs. 0
  misc_feature: MA Experiment 108464 PARAMETER Experiment Name: At_Germinating_Seeds_cDNA_P Parameter: Tissue Value: Germinating Seeds
  misc_feature: MA Experiment ID: 108607 Result: Down-regulated in Transcription
  misc_feature: MA Experiment 108607 PARAMETER Experiment Name: At_100uM_ABA_cDNA_P Parameter: Timepoint (hr) Value: 4
  misc_feature: MA Experiment 108607 PARAMETER Experiment Name: At_100uM_ABA_cDNA_P Parameter: Tissue Value: Aerial
  misc_feature: MA Experiment 108607 PARAMETER Experiment Name: At_100uM_ABA_cDNA_P Parameter: Treatment Value: 100uM ABA vs. No Treatment
  misc_feature: MA Experiment ID: 20000171 Result: Down-regulated in Transcription
  misc_feature: MA Experiment 20000171 PARAMETER Experiment Name: At_42deg_Heat_P Parameter: Age (day) Value: 14
  misc_feature: MA Experiment 20000171 PARAMETER Experiment Name: At_42deg_Heat_P Parameter: Organism Value: A. thaliana
  misc_feature: MA Experiment 20000171 PARAMETER Experiment Name: At_42deg_Heat_P Parameter: Plant Line Value: WS
  misc_feature: MA Experiment 20000171 PARAMETER Experiment Name: At_42deg_Heat_P Parameter: Temperature (deg C) Value: 42 vs. 22
  misc_feature: MA Experiment 20000171 PARAMETER Experiment Name: At_42deg_Heat_P Parameter: Timepoint (hr) Value: 1
  misc_feature: MA Experiment 20000171 PARAMETER Experiment Name: At_42deg_Heat_P Parameter: Tissue Value: Aerial
  misc_feature: MA Experiment ID: 20000264 Result: Down-regulated in Transcription
  misc_feature: MA Experiment 20000264 PARAMETER Experiment Name: At_Open_Flower_P Parameter: Age (day) Value: 21
  misc_feature: MA Experiment 20000264 PARAMETER Experiment Name: At_Open_Flower_P Parameter: Plant Line Value: WS
  misc_feature: MA Experiment 20000264 PARAMETER Experiment Name: At_Open_Flower_P Parameter: Tissue Value: Open Flower vs. Whole Plant
  misc_feature: MA Experiment ID: 20000794 Result: Down-regulated in Transcription
  misc_feature: MA Experiment 20000794 PARAMETER Experiment Name: At_Petals_P Parameter: Age (day) Value: 23-25 days
  misc_feature: MA Experiment 20000794 PARAMETER Experiment Name: At_Petals_P Parameter: Plant Line Value: WS
  misc_feature: MA Experiment 20000794 PARAMETER Experiment Name: At_Petals_P Parameter: Tissue Value: Petals vs. Whole plant
atggagaacacagacgtcgtctcgggtctgcataatttcttgagtaaaccctccgccaaagatttcatcaaatcaatcaaaagtttcattgtttcgatcttgaacactgcaccagaccctgaaaaagattgtgatgcagttcaggacttcttttacaagatggagtctgctttcagggctcatccactttggtctggttgttccgatgatgagttagacaatgcgggagatggcctggagaagtatgtcatgacaaagttatttccccgggtttttgcatcaaacaccgaggatgttatatccgatgagaaactctttcagaagatttccttggttcaacagttcatatctcctgaaaacttggatatacaaccaacttttcaaaaccaaacatcttggcttctagctcaaaaagagctccagaagataaatatgtacaatgctcctcgtgataagcttatgtgtatccttaggtgctgcaaagtcattaataacttacttctaaatgcttcaattgcttcaaaccagaatgaacctggagctgaccaatttcttcctgttctcatatatgttaccattaaggctaaccctccccagtttcactcaaacttgttgtatatacaaagatataggcgtcaatctaaactggttggcgaagctggctacttattcaccaacatactctctgcagagtcattcatctcaaatattgatgcaaaatccctctccatggatgaagctgactttgaaactaaaatgaaatctgcacatgcacgtctttctggtccgggaagccagtcttatcaaacggatcacggtgctgcattacccactgctcataatactaagagggaaaacatgcttctgcatacaaaatcaactgatagtttctctggtaccaatgaaacactgagtgaaacaccaataaagaaagctgaccccattaccgatttggaaaataagggcgctgctacgcttttgaatgatagaagtgaggcaaccaaaatatttcaagaatatccttacatgtttgccagtgttggtgatttaaagataggagatgttgaagacttgcttaataattataaacagctagttttcaaatatgtttgcctttccaaaggcttgggtgatgcaacatctttaactccatgcatttcaccattgcaagcgtctaaagtctctgagaatcatacaacattgtcttcagattttcaaacgaaaagcgaaactgacaggagcgttgataatttgtttcgagctctacaagggtattattgtaatttcgcttcattttctgctcctctgccattcccacaccactcagaggaacagagcttaacggcgactatggaagggattggactgcgaagttgcggagatgatattctccgtctcggattcaagctacgcggtggtaccggtggccggattcagattctccagcgagctatggtgataaaaatgagagaccgtagcaagaacaggaaaccattgcagagaggacgaatgctcagtatcgaagcgattcaagcggttcaagccctgaagcgagccaatccacttcttcctcctcctcccgttccttctacttccacgacttcttcttcctcagctctgcttgatcgtgtaatcatttctaaattccgtcggctcttgaaattcgatatggtcgccgttctcagagaacttctacgccaaaacgagtgctctctagctctcaaggtttttgaagagattagaaaggagtattggtacaagcctcaggtgagaatgtacacagatatgatcactgtaatggcggataatagtttgatggaagaggtcaattatctttactcagctatgaaatcagaaaagggtttaatggctgagattgaatggttcaacactctcttgacgattctcttgaatcataagctttttgatcttgtcatggattgctatgcctttatgcaatctattggctatgagcctgatagagcctcctttagggttttagtcttaggtcttgaatcaaatggtgaaatgggtttatcagctattgttaggcaagatgctcatgagtattatggtgaatcactcgagtttatcgaagaagatgaagaaatctctagtgggactagtgtgttgatctaatgatggagcgaaagagttgagagcttgtagctctttcttcatggttctatattcagtcgagctcgaggtttgatcatatcgtaatactaataccttccgagtatgcccgatgagatgatgcgtcgttagccaaaccatatcatgtaggcttgtaacataggaatgttaccgagtatgcgagttttgattgcctgaacttggatctgttccaagtcactcaagtcactcatgtctatggagacatttatagcttcaaattccattacaattgaagttttgatatttgtaaagctcttgttgatgttataagtacaatttgagtaatcaaatatttataaagttcagtcacctt

SEQ ID NO: 102253 - protein, 712 aa, Arabidopsis thaliana
  peptide (1)..(712): Ceres Seq. ID no. 13609822
  misc_feature (132)..(239): Pfam Name: Vacuolar sorting protein 9 (VPS9) domain Pfam Description: Vacuolar sorting protein 9 (VPS9) domain
  misc_feature (1)..(412): Homolog of NCBI NO: 18402362 NR Description: expressed protein [Arabidopsis thaliana] unknown protein [Arabidopsis thaliana]
  misc_feature (451)..(712): Homolog of NCBI NO: 22531104 NR Description: putative protein [Arabidopsis thaliana]
  misc_feature (451)..(712): Homolog of NCBI NO: 21618227 NR Description: unknown [Arabidopsis thaliana]
  misc_feature (29)..(419): Homolog of NCBI NO: 34902128 NR Description: unknown protein [Oryza sativa (japonica
  misc_feature (484)..(706): Homolog of NCBI NO: 38344476 NR Description: OSJNBa0022H21.11 [Oryza sativa (japonica
  misc_feature (224)..(424): Homolog of NCBI NO: 18402362 NR Description: expressed protein [Arabidopsis thaliana] unknown protein [Arabidopsis thaliana]
  misc_feature (2)..(256): Homolog of NCBI NO: 19112902 NR Description: putative vacuolar protein sorting-associated [Schizosaccharomyces pombe] >gi|7493160|pir||T40507 probable
  misc_feature (24)..(238): Homolog of NCBI NO: 21739944 NR Description: hypothetical protein [Homo sapiens]
  misc_feature (24)..(238): Homolog of NCBI NO: 27882595 NR Description: 4432404J10Rik protein [Mus musculus]
  misc_feature (14)..(253): Homolog of NCBI NO: 38541983 NR Description: RAB guanine nucleotide exchange factor (GEF) 1
MENTDVVSGLHNFLSKPSAKDFIKSIKSFIVSILNTAPDPEKDCDAVQDFFYKMESAFRAHPLWSGCSDDELDNAGDGLEKYVMTKLFPRVFASNTEDVISDEKLFQKISLVQQFISPENLDIQPTFQNQTSWLLAQKELQKINMYNAPRDKLMCILRCCKVINNLLLNASIASNQNEPGADQFLPVLIYVTIKANPPQFHSNLLYIQRYRRQSKLVGEAGYLFTNILSAESFISNIDAKSLSMDEADFETKMKSAHARLSGPGSQSYQTDHGAALPTAHNTKRENMLLHTKSTDSFSGTNETLSETPIKKADPITDLENKGAATLLNDRSEATKIFQEYPYMFASVGDLKIGDVEDLLNNYKQLVFKYVCLSKGLGDATSLTPCISPLQASKVSENHTTLSSDFQTKSETDRSVDNLFRALQGYYCNFASFSAPLPFPHHSEEQSLTATMEGIGLRSCGDDILRLGFKLRGGTGGRIQILQRAMVIKMRDRSKNRKPLQRGRMLSIEAIQAVQALKRANPLLPPPPVPSTSTTSSSSALLDRVIISKFRRLLKFDMVAVLRELLRQNECSLALKVFEEIRKEYWYKPQVRMYTDMITVMADNSLMEEVNYLYSAMKSEKGLMAEIEWFNTLLTILLNHKLFDLVMDCYAFMQSIGYEPDRASFRVLVLGLESNGEMGLSAIVRQDAHEYYGESLEFIEEDEEISSGTSVLI

SEQ ID NO: 102254 - protein, 659 aa, Arabidopsis thaliana
  peptide (1)..(659): Ceres Seq. ID no. 13609823
  misc_feature (79)..(186): Pfam Name: Vacuolar sorting protein 9 (VPS9) domain Pfam Description: Vacuolar sorting protein 9 (VPS9) domain
  misc_feature (1)..(359): Homolog of NCBI NO: 18402362 NR Description: expressed protein [Arabidopsis thaliana] unknown protein [Arabidopsis thaliana]
  misc_feature (398)..(659): Homolog of NCBI NO: 22531104 NR Description: putative protein [Arabidopsis thaliana]
  misc_feature (398)..(659): Homolog of NCBI NO: 21618227 NR Description: unknown [Arabidopsis thaliana]
  misc_feature (1)..(366): Homolog of NCBI NO: 34902128 NR Description: unknown protein [Oryza sativa (japonica
  misc_feature (431)..(653): Homolog of NCBI NO: 38344476 NR Description: OSJNBa0022H21.11 [Oryza sativa (japonica
  misc_feature (171)..(371): Homolog of NCBI NO: 18402362 NR Description: expressed protein [Arabidopsis thaliana] unknown protein [Arabidopsis thaliana]
  misc_feature (1)..(203): Homolog of NCBI NO: 19112902 NR Description: putative vacuolar protein sorting-associated [Schizosaccharomyces pombe] >gi|7493160|pir||T40507 probable
  misc_feature (1)..(185): Homolog of NCBI NO: 21739944 NR Description: hypothetical protein [Homo sapiens]
  misc_feature (1)..(185): Homolog of NCBI NO: 27882595 NR Description: 4432404J10Rik protein [Mus musculus]
  misc_feature (1)..(200): Homolog of NCBI NO: 38541983 NR Description: RAB guanine nucleotide exchange factor (GEF) 1
MESAFRAHPLWSGCSDDELDNAGDGLEKYVMTKLFPRVFASNTEDVISDEKLFQKISLVQQFISPENLDIQPTFQNQTSWLLAQKELQKINMYNAPRDKLMCILRCCKVINNLLLNASIASNQNEPGADQFLPVLIYVTIKANPPQFHSNLLYIQRYRRQSKLVGEAGYLFTNILSAESFISNIDAKSLSMDEADFETKMKSAHARLSGPGSQSYQTDHGAALPTAHNTKRENMLLHTKSTDSFSGTNETLSETPIKKADPITDLENKGAATLLNDRSEATKIFQEYPYMFASVGDLKIGDVEDLLNNYKQLVFKYVCLSKGLGDATSLTPCISPLQASKVSENHTTLSSDFQTKSETDRSVDNLFRALQGYYCNFASFSAPLPFPHHSEEQSLTATMEGIGLRSCGDDILRLGFKLRGGTGGRIQILQRAMVIKMRDRSKNRKPLQRGRMLSIEAIQAVQALKRANPLLPPPPVPSTSTTSSSSALLDRVIISKFRRLLKFDMVAVLRELLRQNECSLALKVFEEIRKEYWYKPQVRMYTDMITVMADNSLMEEVNYLYSAMKSEKGLMAEIEWFNTLLTILLNHKLFDLVMDCYAFMQSIGYEPDRASFRVLVLGLESNGEMGLSAIVRQDAHEYYGESLEFIEEDEEISSGTSVLI

SEQ ID NO: 102255 - protein, 629 aa, Arabidopsis thaliana
  peptide (1)..(629): Ceres Seq. ID no. 13609824
  misc_feature (49)..(156): Pfam Name: Vacuolar sorting protein 9 (VPS9) domain Pfam Description: Vacuolar sorting protein 9 (VPS9) domain
  misc_feature (1)..(329): Homolog of NCBI NO: 18402362 NR Description: expressed protein [Arabidopsis thaliana] unknown protein [Arabidopsis thaliana]
  misc_feature (368)..(629): Homolog of NCBI NO: 22531104 NR Description: putative protein [Arabidopsis thaliana]
  misc_feature (368)..(629): Homolog of NCBI NO: 21618227 NR Description: unknown [Arabidopsis thaliana]
  misc_feature (1)..(336): Homolog of NCBI NO: 34902128 NR Description: unknown protein [Oryza sativa (japonica
  misc_feature (401)..(623): Homolog of NCBI NO: 38344476 NR Description: OSJNBa0022H21.11 [Oryza sativa (japonica
  misc_feature (141)..(341): Homolog of NCBI NO: 18402362 NR Description: expressed protein [Arabidopsis thaliana] unknown protein [Arabidopsis thaliana]
  misc_feature (1)..(173): Homolog of NCBI NO: 19112902 NR Description: putative vacuolar protein sorting-associated [Schizosaccharomyces pombe] >gi|7493160|pir||T40507 probable
  misc_feature (1)..(155): Homolog of NCBI NO: 21739944 NR Description: hypothetical protein [Homo sapiens]
  misc_feature (1)..(155): Homolog of NCBI NO: 27882595 NR Description: 4432404J10Rik protein [Mus musculus]
  misc_feature (1)..(170): Homolog of NCBI NO: 38541983 NR Description: RAB guanine nucleotide exchange factor (GEF) 1
MTKLFPRVFASNTEDVISDEKLFQKISLVQQFISPENLDIQPTFQNQTSWLLAQKELQKINMYNAPRDKLMCILRCCKVINNLLLNASIASNQNEPGADQFLPVLIYVTIKANPPQFHSNLLYIQRYRRQSKLVGEAGYLFTNILSAESFISNIDAKSLSMDEADFETKMKSAHARLSGPGSQSYQTDHGAALPTAHNTKRENMLLHTKSTDSFSGTNETLSETPIKKADPITDLENKGAATLLNDRSEATKIFQEYPYMFASVGDLKIGDVEDLLNNYKQLVFKYVCLSKGLGDATSLTPCISPLQASKVSENHTTLSSDFQTKSETDRSVDNLFRALQGYYCNFASFSAPLPFPHHSEEQSLTATMEGIGLRSCGDDILRLGFKLRGGTGGRIQILQRAMVIKMRDRSKNRKPLQRGRMLSIEAIQAVQALKRANPLLPPPPVPSTSTTSSSSALLDRVIISKFRRLLKFDMVAVLRELLRQNECSLALKVFEEIRKEYWYKPQVRMYTDMITVMADNSLMEEVNYLYSAMKSEKGLMAEIEWFNTLLTILLNHKLFDLVMDCYAFMQSIGYEPDRASFRVLVLGLESNGEMGLSAIVRQDAHEYYGESLEFIEEDEEISSGTSVLI

SEQ ID NO: 102256 - DNA, 966 bp, Arabidopsis thaliana
  misc_feature (1)..(966): Ceres Seq. ID no. 13609833
  misc_feature: MA Experiment ID: 108434 Result: Down-regulated in Transcription
  misc_feature: MA Experiment 108434 PARAMETER Experiment Name: At_Root_Tips_cDNA_P Parameter: Tissue Value: Root Tips
aactgatataggaagatccaacaatggattcatcggcggacatagcaatattagtggcagatgaatgtaaccaaaaggtgaatacaacggcagagaaagcatcgaatacagcggaggttgggtggttgatgatgtttgggattgaggagaagaagattgaaagtctgatgaggaaatttgaagctaaatctcagtttgctgtggcggtttctagtggcttttttctgcttaactatgtttcatccttgtactataagtcacgtttgaacctcatgctggaaatctagtttaggcatgatgttactttcatttgcttctctaatcaccagagggcatgttgctttaagtttcgagttctacaagctttggttttatactcttttgggttagtttttaagtacagtttcttgtaagttaatggaaacggtgtcgtagtaagaaaaaacaaatcatcgtagtaattaagcctaatccgatgcattaattaatctctgaaatttgttggtttgcacaaaaaaaaaaattccattgttgttgttccacggaactctaaaatggagagtggcgatgagagtccggtggttctaattacgggatgttctcagggaggaattggtcacgcgctggcccgtgagttcactgagaagggatgtcgagtggtggcgacgagtcgatcacggagtacgatgacggatctggagcaagattcgaggttattcgtgaaggagcttgatgtgcaatcggaccagaatgtgagtaaggttttgtcggaggttattgataagttcggtaagatcgacgttcttgttaataacgccggagttcagtgcgttggacctctggcggagactccaatttccgccatggaaaacacattcaacaccaatgtttttggtaataaagatttgatttttagtttcaattattacatttattggagcttcaacagttctggtttttttgctt

SEQ ID NO: 102257 - protein, 137 aa, Arabidopsis thaliana
  peptide (1)..(137): Ceres Seq. ID no. 13609834
  misc_feature (1)..(134): Homolog of NCBI NO: 11358313 NR Description: hypothetical protein T31P16.40 - Arabidopsis >gi|7960724|emb|CAB92046.1| putative protein [Arabidopsis
  misc_feature (1)..(115): Homolog of NCBI NO: 26453106 NR Description: unknown protein [Arabidopsis thaliana]
  misc_feature (1)..(115): Homolog of NCBI NO: 30682984 NR Description: short-chain dehydrogenase/reductase family
  misc_feature (3)..(115): Homolog of NCBI NO: 10178182 NR Description: contains similarity to
  misc_feature (3)..(115): Homolog of NCBI NO: 18424923 NR Description: short-chain dehydrogenase/reductase family [Arabidopsis thaliana] >gi|15983432|gb|AAL11584.1|AF424590_1 [Arabidopsis thaliana] >gi|20466145|gb|AAM19994.1|
  misc_feature (45)..(115): Homolog of NCBI NO: 26450169 NR Description: unknown protein [Arabidopsis thaliana]
  misc_feature (8)..(114): Homolog of NCBI NO: 21234042 NR Description: putative short-chain oxidoreductase [Streptomyces
  misc_feature (8)..(114): Homolog of NCBI NO: 29826690 NR Description: putative oxidoreductase [Streptomyces avermitilis >gi|29603786|dbj|BAC67859.1| putative oxidoreductase
  misc_feature (9)..(114): Homolog of NCBI NO: 15896578 NR Description: Short-chain alcohol dehydrogenase family enzyme
  misc_feature (9)..(115): Homolog of NCBI NO: 23038313 NR Description: hypothetical protein [Oenococcus oeni MCW]
MESGDESPVVLITGCSQGGIGHALAREFTEKGCRVVATSRSRSTMTDLEQDSRLFVKELDVQSDQNVSKVLSEVIDKFGKIDVLVNNAGVQCVGPLAETPISAMENTFNTNVFGNKDLIFSFNYYIYWSFNSSGFFA

SEQ ID NO: 102258 - protein, 93 aa, Arabidopsis thaliana
  peptide (1)..(93): Ceres Seq. ID no. 13609835
  misc_feature (1)..(90): Homolog of NCBI NO: 11358313 NR Description: hypothetical protein T31P16.40 - Arabidopsis >gi|7960724|emb|CAB92046.1| putative protein [Arabidopsis
  misc_feature (1)..(71): Homolog of NCBI NO: 26453106 NR Description: unknown protein [Arabidopsis thaliana]
  misc_feature (1)..(71): Homolog of NCBI NO: 30682984 NR Description: short-chain dehydrogenase/reductase family
  misc_feature (1)..(71): Homolog of NCBI NO: 10178182 NR Description: contains similarity to
  misc_feature (1)..(71): Homolog of NCBI NO: 18424923 NR Description: short-chain dehydrogenase/reductase family [Arabidopsis thaliana] >gi|15983432|gb|AAL11584.1|AF424590_1 [Arabidopsis thaliana] >gi|20466145|gb|AAM19994.1|
  misc_feature (1)..(71): Homolog of NCBI NO: 26450169 NR Description: unknown protein [Arabidopsis thaliana]
  misc_feature (1)..(70): Homolog of NCBI NO: 21234042 NR Description: putative short-chain oxidoreductase [Streptomyces
  misc_feature (1)..(70): Homolog of NCBI NO: 29826690 NR Description: putative oxidoreductase [Streptomyces avermitilis >gi|29603786|dbj|BAC67859.1| putative oxidoreductase
  misc_feature (1)..(70): Homolog of NCBI NO: 15896578 NR Description: Short-chain alcohol dehydrogenase family enzyme
  misc_feature (1)..(71): Homolog of NCBI NO: 23038313 NR Description: hypothetical protein [Oenococcus oeni MCW]
MTDLEQDSRLFVKELDVQSDQNVSKVLSEVIDKFGKIDVLVNNAGVQCVGPLAETPISAMENTFNTNVFGNKDLIFSFNYYIYWSFNSSGFFA

SEQ ID NO: 102259 - protein, 87 aa, Arabidopsis thaliana; identical to SEQ ID NO: 27228
  peptide (1)..(87): Ceres Seq. ID no. 13609836
  misc_feature (1)..(87): Homolog of NCBI NO: 15238047 NR Description: expressed protein [Arabidopsis thaliana]

SEQ ID NO: 102260 - DNA, 681 bp, Arabidopsis thaliana
  misc_feature (1)..(681): Ceres Seq. ID no. 13609837
  misc_feature: MA Experiment ID: 108434 Result: Up-regulated in Transcription
  misc_feature: MA Experiment 108434 PARAMETER Experiment Name: At_Root_Tips_cDNA_P Parameter: Tissue Value: Root Tips
  misc_feature: MA Experiment ID: 108594 Result: Down-regulated in Transcription
  misc_feature: MA Experiment 108594 PARAMETER Experiment Name: At_Ler-rhl_Root_cDNA_P Parameter: Plant Line Value: null
  misc_feature: MA Experiment ID: 20000180 Result: Up-regulated in Transcription
  misc_feature: MA Experiment 20000180 PARAMETER Experiment Name: At_Germinating_Seeds_P Parameter: Age (hr) Value: 24 vs. 0
  misc_feature: MA Experiment 20000180 PARAMETER Experiment Name: At_Germinating_Seeds_P Parameter: Tissue Value: Germinating Seeds
  misc_feature: MA Experiment ID: 20000185 Result: Up-regulated in Transcription
  misc_feature: MA Experiment 20000185 PARAMETER Experiment Name: At_Roots__P Parameter: Age (day) Value: 7 vs. 21
  misc_feature: MA Experiment 20000185 PARAMETER Experiment Name: At_Roots__P Parameter: Organism Value: A. thaliana
  misc_feature: MA Experiment 20000185 PARAMETER Experiment Name: At_Roots__P Parameter: Tissue Value: Roots vs. Whole Plant
  misc_feature: MA Experiment ID: 20000227 Result: Up-regulated in Transcription
  misc_feature: MA Experiment 20000227 PARAMETER Experiment Name: At_Root-Tips-vs-Tops_P Parameter: Tissue Value: Root Tips vs. Root Tops
  misc_feature: MA Experiment ID: 20000436 Result: Down-regulated in Transcription
  misc_feature: MA Experiment 20000436 PARAMETER Experiment Name: At_Drought_P Parameter: Age (day) Value: 7
  misc_feature: MA Experiment 20000436 PARAMETER Experiment Name: At_Drought_P Parameter: Organism Value: A. thaliana
  misc_feature: MA Experiment 20000436 PARAMETER Experiment Name: At_Drought_P Parameter: Plant Line Value: WS
  misc_feature: MA Experiment 20000436 PARAMETER Experiment Name: At_Drought_P Parameter: Timepoint (hr) Value: 12
  misc_feature: MA Experiment 20000436 PARAMETER Experiment Name: At_Drought_P Parameter: Tissue Value: Whole Plant
  misc_feature: MA Experiment 20000436 PARAMETER Experiment Name: At_Drought_P Parameter: Treatment Value: Drought vs. No Drought
  misc_feature: MA Experiment ID: 20000437 Result: Down-regulated in Transcription
  misc_feature: MA Experiment 20000437 PARAMETER Experiment Name: At_Drought_P Parameter: Age (day) Value: 8
  misc_feature: MA Experiment 20000437 PARAMETER Experiment Name: At_Drought_P Parameter: Organism Value: A. thaliana
  misc_feature: MA Experiment 20000437 PARAMETER Experiment Name: At_Drought_P Parameter: Plant Line Value: WS
  misc_feature: MA Experiment 20000437 PARAMETER Experiment Name: At_Drought_P Parameter: Timepoint (hr) Value: 24
  misc_feature: MA Experiment 20000437 PARAMETER Experiment Name: At_Drought_P Parameter: Tissue Value: Whole Plant
  misc_feature: MA Experiment 20000437 PARAMETER Experiment Name: At_Drought_P Parameter: Treatment Value: Drought vs. No Drought
  misc_feature: MA Experiment ID: 20000439 Result: Up-regulated in Transcription
  misc_feature: MA Experiment 20000439 PARAMETER Experiment Name: At_Roots__P Parameter: Age (day) Value: 14 vs. 21
  misc_feature: MA Experiment 20000439 PARAMETER Experiment Name: At_Roots__P Parameter: Organism Value: A. thaliana
  misc_feature: MA Experiment 20000439 PARAMETER Experiment Name: At_Roots__P Parameter: Tissue Value: Roots vs. Whole Plant
  misc_feature: MA Experiment ID: 20000527 Result: Down-regulated in Transcription
  misc_feature: MA Experiment 20000527 PARAMETER Experiment Name: At_10percent_PEG_P Parameter: Age (day) Value: 20
  misc_feature: MA Experiment 20000527 PARAMETER Experiment Name: At_10percent_PEG_P Parameter: Organism Value: A. thaliana
  misc_feature: MA Experiment 20000527 PARAMETER Experiment Name: At_10percent_PEG_P Parameter: Plant Line Value: WS
  misc_feature: MA Experiment 20000527 PARAMETER Experiment Name: At_10percent_PEG_P Parameter: Timepoint (day) Value: 20
  misc_feature: MA Experiment 20000527 PARAMETER Experiment Name: At_10percent_PEG_P Parameter: Tissue Value: Whole Plant
  misc_feature: MA Experiment 20000527 PARAMETER Experiment Name: At_10percent_PEG_P Parameter: Treatment Value: 10percent PEG vs. No Treatment
  misc_feature: MA Experiment ID: 20001450 Result: Down-regulated in Transcription
  misc_feature: MA Experiment 20001450 PARAMETER Experiment Name: At_Far-red-induction_P Parameter: Age (day) Value: 7
  misc_feature: MA Experiment 20001450 PARAMETER Experiment Name: At_Far-red-induction_P Parameter: Light Value: Far-red vs. White
  misc_feature: MA Experiment 20001450 PARAMETER Experiment Name: At_Far-red-induction_P Parameter: Organism Value: A. thaliana
  misc_feature: MA Experiment 20001450 PARAMETER Experiment Name: At_Far-red-induction_P Parameter: Plant Line Value: Columbia
  misc_feature: MA Experiment 20001450 PARAMETER Experiment Name: At_Far-red-induction_P Parameter: Timepoint (hr) Value: 8
  misc_feature: MA Experiment 20001450 PARAMETER Experiment Name: At_Far-red-induction_P Parameter: Tissue Value: Whole Plant
aatacacaaaaccctttcactaataacaatctccaaatggctaaatcatttgtacctctcatcgctgtgttatgcgttttggttctcccacttgcagccatggcggttggaacgccattccacattgaaggaagtgtttactgcgacacttgccgctttggattcgagacaatcgccacccaatatatccgcggggcaagagtgagaatagtatgcaaagacagagtgacactaaaatcggagttggttggggtggcggtgacgggacctgatgggaaatacaaagtcgccgtcagaggagaccgacaggaccagcaatgtctggcggagcttgttcacagtccactgtcccgctgccaagaggctgatcctggcagaagcaccgctaccgtgatcctcacgcgctccaacggagccgcctctactcgtcactacgccaacgccatgggtttcttcagggacgaaccgctccgtggctgcgccgctctccgcaaacgctacctcgcagacggcgataaccgggctatttgagtcatcttatgttcttgatgaaacagaacacaaaagtttatttagagtttttatttatttctattttattgtattgttgagtctctaaagatggtgagactatttagacatatctaagataaaccatataaaataaagtatttgcaacct

SEQ ID NO: 102261 - protein, 176 aa, Arabidopsis thaliana
  peptide (1)..(176): Ceres Seq. ID no. 13609838
  misc_feature (42)..(162): Pfam Name: Pollen proteins Ole e I family Pfam Description: Pollen proteins Ole e I family
  misc_feature (13)..(176): Homolog of NCBI NO: 15238066 NR Description: pollen allergen -related protein [Arabidopsis
  misc_feature (20)..(173): Homolog of NCBI NO: 6561156 NR Description: allergen-like protein BRSn20 [Sambucus nigra]
  misc_feature (20)..(167): Homolog of NCBI NO: 18413144 NR Description: expressed protein [Arabidopsis thaliana] SAH7 protein [Arabidopsis thaliana] >gi|18491199|gb|AAL69502.1| protein [Arabidopsis thaliana] >gi|21280951|gb|AAM45117.1|
  misc_feature (18)..(173): Homolog of NCBI NO: 38347168 NR Description: OSJNBa0039C07.14 [Oryza sativa (japonica
  misc_feature (18)..(173): Homolog of NCBI NO: 322854 NR Description: pollen-specific protein - rice
  misc_feature (13)..(172): Homolog of NCBI NO: 15218200 NR Description: allergen -related [Arabidopsis thaliana] allergen, putative [Arabidopsis thaliana]
  misc_feature (43)..(161): Homolog of NCBI NO: 29836467 NR Description: putative SAH7 protein [Gossypium raimondii]
  misc_feature (14)..(173): Homolog of NCBI NO: 416731 NR Description: Pollen specific protein C13 precursor
  misc_feature (43)..(161): Homolog of NCBI NO: 29836465 NR Description: putative SAH7 protein [Gossypium herbaceum]
  misc_feature (20)..(165): Homolog of NCBI NO: 22074346 NR Description: Che a 1 allergen precursor [Chenopodium album]
NTQNPFTNNNLQMAKSFVPLIAVLCVLVLPLAAMAVGTPFHIEGSVYCDTCRFGFETIATQYIRGARVRIVCKDRVTLKSELVGVAVTGPDGKYKVAVRGDRQDQQCLAELVHSPLSRCQEADPGRSTATVILTRSNGAASTRHYANAMGFFRDEPLRGCAALRKRYLADGDNRAI

SEQ ID NO: 102262 - protein, 164 aa, Arabidopsis thaliana
  peptide (1)..(164): Ceres Seq. ID no. 13609839
  misc_feature (30)..(150): Pfam Name: Pollen proteins Ole e I family Pfam Description: Pollen proteins Ole e I family
  misc_feature (1)..(164): Homolog of NCBI NO: 15238066 NR Description: pollen allergen -related protein [Arabidopsis
  misc_feature (8)..(161): Homolog of NCBI NO: 6561156 NR Description: allergen-like protein BRSn20 [Sambucus nigra]
  misc_feature (8)..(155): Homolog of NCBI NO: 18413144 NR Description: expressed protein [Arabidopsis thaliana] SAH7 protein [Arabidopsis thaliana] >gi|18491199|gb|AAL69502.1| protein [Arabidopsis thaliana] >gi|21280951|gb|AAM45117.1|
  misc_feature (6)..(161): Homolog of NCBI NO: 38347168 NR Description: OSJNBa0039C07.14 [Oryza sativa (japonica
  misc_feature (6)..(161): Homolog of NCBI NO: 322854 NR Description: pollen-specific protein - rice
  misc_feature (1)..(160): Homolog of NCBI NO: 15218200 NR Description: allergen -related [Arabidopsis thaliana] allergen, putative [Arabidopsis thaliana]
  misc_feature (31)..(149): Homolog of NCBI NO: 29836467 NR Description: putative SAH7 protein [Gossypium raimondii]
  misc_feature (2)..(161): Homolog of NCBI NO: 416731 NR Description: Pollen specific protein C13 precursor
  misc_feature (31)..(149): Homolog of NCBI NO: 29836465 NR Description: putative SAH7 protein [Gossypium herbaceum]
  misc_feature (8)..(153): Homolog of NCBI NO: 22074346 NR Description: Che a 1 allergen precursor [Chenopodium album]
MAKSFVPLIAVLCVLVLPLAAMAVGTPFHIEGSVYCDTCRFGFETIATQYIRGARVRIVCKDRVTLKSELVGVAVTGPDGKYKVAVRGDRQDQQCLAELVHSPLSRCQEADPGRSTATVILTRSNGAASTRHYANAMGFFRDEPLRGCAALRKRYLADGDNRAI

SEQ ID NO: 102263 - protein, 143 aa, Arabidopsis thaliana; identical to SEQ ID NO: 36943
  peptide (1)..(143): Ceres Seq. ID no. 13609840
  misc_feature (9)..(129): Pfam Name: Pollen proteins Ole e I family Pfam Description: Pollen proteins Ole e I family
  misc_feature (1)..(143): Homolog of NCBI NO: 15238066 NR Description: pollen allergen -related protein [Arabidopsis
  misc_feature (1)..(140): Homolog of NCBI NO: 6561156 NR Description: allergen-like protein BRSn20 [Sambucus nigra]
  misc_feature (1)..(134): Homolog of NCBI NO: 18413144 NR Description: expressed protein [Arabidopsis thaliana] SAH7 protein [Arabidopsis thaliana] >gi|18491199|gb|AAL69502.1| protein [Arabidopsis thaliana] >gi|21280951|gb|AAM45117.1|
  misc_feature (1)..(140): Homolog of NCBI NO: 38347168 NR Description: OSJNBa0039C07.14 [Oryza sativa (japonica
  misc_feature (1)..(140): Homolog of NCBI NO: 322854 NR Description: pollen-specific protein - rice
  misc_feature (1)..(139): Homolog of NCBI NO: 15218200 NR Description: allergen -related [Arabidopsis thaliana] allergen, putative [Arabidopsis thaliana]
  misc_feature (10)..(128): Homolog of NCBI NO: 29836467 NR Description: putative SAH7 protein [Gossypium raimondii]
  misc_feature (1)..(140): Homolog of NCBI NO: 416731 NR Description: Pollen specific protein C13 precursor
  misc_feature (10)..(128): Homolog of NCBI NO: 29836465 NR Description: putative SAH7 protein [Gossypium herbaceum]
  misc_feature (1)..(132): Homolog of NCBI NO: 22074346 NR Description: Che a 1 allergen precursor [Chenopodium album]

SEQ ID NO: 102264 - DNA, 811 bp, Arabidopsis thaliana
  misc_feature (1)..(811): Ceres Seq. ID no. 13609847
  misc_feature: MA Experiment ID: 20000180 Result: Up-regulated in Transcription
  misc_feature: MA Experiment 20000180 PARAMETER Experiment Name: At_Germinating_Seeds_P Parameter: Age (hr) Value: 24 vs. 0
  misc_feature: MA Experiment 20000180 PARAMETER Experiment Name: At_Germinating_Seeds_P Parameter: Tissue Value: Germinating Seeds
atggtggattctcatggctccgacacggaatgttcctccaagaagaaaaaggagaaaacgaaagaaaagggggtatatcgtggggctcgcatgaggagctgggggaaatgggtctcggagattcgggagccccgtaagaaatcaagaatctggctcgggactttccccacggcggagatggcagcgcgtgcccatgatgttgcggcattgagtatcaaaggaagttccgcaatccttaacttccctgagctcgcggattttctgccaagaccagtctcgctcagccaacaggatatccaggccgcagccgccgaagccgctcttatggatttcaaaactgtaccattccatcttcaggatgactcaacgccgttgcaaactaggtgtgatactgagaagatcgaaaagtggtcatcctcatcgtcctcagcctcatcctcatcctcatcttcgtcctcgtcctcatcatctatgctttcgggggagctaggagatattgtggagttgccgagtcttgaaaacaatgtaaaatacgattgtgcgctgtatgactcgttggaggggctggtgtcgatgcccccatggttagatgctaccgaaaatgattttaggtatggagatgattcggtactgttggacccatgtctcaaagaaagctttttgtggaattatgagtaaggtttttttttggaaagaaatgtggttttttgtttcctcctctcttttatactttcgatctttttttctaagcatatatatcttctacatatgtaatacttttccattagtaaacaatgattcggtttcgggt

SEQ ID NO: 102265 - protein, 225 aa, Arabidopsis thaliana
  peptide (1)..(225): Ceres Seq. ID no. 13609848
  misc_feature (25)..(86): Pfam Name: AP2 domain Pfam Description: AP2 domain
  misc_feature (1)..(225): Homolog of NCBI NO: 25352180 NR Description: TINY-like AP2 domain transcription factor
  misc_feature (60)..(225): Homolog of NCBI NO: 18400951 NR Description: TINY-related AP2 domain transcription factor thaliana] >gi|13878157|gb|AAK44156.1|AF370341_1 putative TINY AP2 transcription factor [Arabidopsis thaliana]
  misc_feature (12)..(224): Homolog of NCBI NO: 15233928 NR Description: AP2 domain transcription factor TINY, putative
  misc_feature (5)..(208): Homolog of NCBI NO: 15223860 NR Description: AP2 domain transcription factor TINY, putative
  misc_feature (13)..(206): Homolog of NCBI NO: 15239113 NR Description: AP2 domain transcription factor TINY, putative
  misc_feature (26)..(211): Homolog of NCBI NO: 25992102 NR Description: dehydration responsive element binding protein
  misc_feature (8)..(172): Homolog of NCBI NO: 15232340 NR Description: AP2 domain transcription factor TINY, putative
  misc_feature (12)..(224): Homolog of NCBI NO: 15239501 NR Description: AP2 domain transcription factor TINY [Arabidopsis
  misc_feature (6)..(172): Homolog of NCBI NO: 37536842 NR Description: putative DNA binding protein [Oryza sativa
  misc_feature (26)..(167): Homolog of NCBI NO: 14140155 NR Description: putative AP2 domain transcription factor [Oryza
MVDSHGSDTECSSKKKKEKTKEKGVYRGARMRSWGKWVSEIREPRKKSRIWLGTFPTAEMAARAHDVAALSIKGSSAILNFPELADFLPRPVSLSQQDIQAAAAEAALMDFKTVPFHLQDDSTPLQTRCDTEKIEKWSSSSSSASSSSSSSSSSSSSMLSGELGDIVELPSLENNVKYDCALYDSLEGLVSMPPWLDATENDFRYGDDSVLLDPCLKESFLWNYE

SEQ ID NO: 102266 - protein, 195 aa, Arabidopsis thaliana
  peptide (1)..(195): Ceres Seq. ID no. 13609849
  misc_feature (1)..(56): Pfam Name: AP2 domain Pfam Description: AP2 domain
  misc_feature (1)..(195): Homolog of NCBI NO: 25352180 NR Description: TINY-like AP2 domain transcription factor
  misc_feature (30)..(195): Homolog of NCBI NO: 18400951 NR Description: TINY-related AP2 domain transcription factor thaliana] >gi|13878157|gb|AAK44156.1|AF370341_1 putative TINY AP2 transcription factor [Arabidopsis thaliana]
  misc_feature (1)..(194): Homolog of NCBI NO: 15233928 NR Description: AP2 domain transcription factor TINY, putative
  misc_feature (1)..(178): Homolog of NCBI NO: 15223860 NR Description: AP2 domain transcription factor TINY, putative
  misc_feature (1)..(176): Homolog of NCBI NO: 15239113 NR Description: AP2 domain transcription factor TINY, putative
  misc_feature (1)..(181): Homolog of NCBI NO: 25992102 NR Description: dehydration responsive element binding protein
  misc_feature (1)..(142): Homolog of NCBI NO: 15232340 NR Description: AP2 domain transcription factor TINY, putative
  misc_feature (1)..(194): Homolog of NCBI NO: 15239501 NR Description: AP2 domain transcription factor TINY [Arabidopsis
  misc_feature (1)..(142): Homolog of NCBI NO: 37536842 NR Description: putative DNA binding protein [Oryza sativa
  misc_feature (1)..(137): Homolog of NCBI NO: 14140155 NR Description: putative AP2 domain transcription factor [Oryza
MRSWGKWVSEIREPRKKSRIWLGTFPTAEMAARAHDVAALSIKGSSAILNFPELADFLPRPVSLSQQDIQAAAAEAALMDFKTVPFHLQDDSTPLQTRCDTEKIEKWSSSSSSASSSSSSSSSSSSSMLSGELGDIVELPSLENNVKYDCALYDSLEGLVSMPPWLDATENDFRYGDDSVLLDPCLKESFLWNYE

SEQ ID NO: 102267 - protein, 166 aa, Arabidopsis thaliana
  peptide (1)..(166): Ceres Seq. ID no. 13609850
  misc_feature (60)..(116): Pfam Name: Lipoprotein amino terminal region Pfam Description: Lipoprotein amino terminal region
  misc_feature (1)..(166): Homolog of NCBI NO: 25352180 NR Description: TINY-like AP2 domain transcription factor
  misc_feature (1)..(166): Homolog of NCBI NO: 18400951 NR Description: TINY-related AP2 domain transcription factor thaliana] >gi|13878157|gb|AAK44156.1|AF370341_1 putative TINY AP2 transcription factor [Arabidopsis thaliana]
  misc_feature (1)..(165): Homolog of NCBI NO: 15233928 NR Description: AP2 domain transcription factor TINY, putative
  misc_feature (1)..(149): Homolog of NCBI NO: 15223860 NR Description: AP2 domain transcription factor TINY, putative
  misc_feature (1)..(147): Homolog of NCBI NO: 15239113 NR Description: AP2 domain transcription factor TINY, putative
  misc_feature (1)..(152): Homolog of NCBI NO: 25992102 NR Description: dehydration responsive element binding protein
  misc_feature (1)..(113): Homolog of NCBI NO: 15232340 NR Description: AP2 domain transcription factor TINY, putative
  misc_feature (1)..(165): Homolog of NCBI NO: 15239501 NR Description: AP2 domain transcription factor TINY [Arabidopsis
  misc_feature (1)..(113): Homolog of NCBI NO: 37536842 NR Description: putative DNA binding protein [Oryza sativa
  misc_feature (1)..(108): Homolog of NCBI NO: 14140155 NR Description: putative AP2 domain transcription factor [Oryza
MAARAHDVAALSIKGSSAILNFPELADFLPRPVSLSQQDIQAAAAEAALMDFKTVPFHLQDDSTPLQTRCDTEKIEKWSSSSSSASSSSSSSSSSSSSMLSGELGDIVELPSLENNVKYDCALYDSLEGLVSMPPWLDATENDFRYGDDSVLLDPCLKESFLWNYE

SEQ ID NO: 102268 - DNA, 1398 bp, Arabidopsis thaliana
  misc_feature (1)..(1398): Ceres Seq. ID no. 13609851
  misc_feature: MA Experiment ID: 108461 Result: Up-regulated in Transcription
  misc_feature: MA Experiment 108461 PARAMETER Experiment Name: At_Germinating_Seeds_cDNA_P Parameter: Age (day) Value: 1 vs. 0
  misc_feature: MA Experiment 108461 PARAMETER Experiment Name: At_Germinating_Seeds_cDNA_P Parameter: Tissue Value: Germinating Seeds
  misc_feature: MA Experiment ID: 20000227 Result: Up-regulated in Transcription
  misc_feature: MA Experiment 20000227 PARAMETER Experiment Name: At_Root-Tips-vs-Tops_P Parameter: Tissue Value: Root Tips vs. Root Tops
atccgttggtgaatctggacagtcccctcaaataaaagttgtgagagctgtttcgtcgctttgatcgaaatggcgtcgtcttctccaactcagctagctcacgtcccgattcctccagaaccaggaggaaggtcgccgacacaagaagctaatgagccaccagttccgatttacattgtgacggatccgtttcaacttcctgctgatttcctaaacccttctcctgaaaagaaattggttatcggttttgactgtgagggtgttgacctctgccgacatgggaaactttgtatcatgcagattgcattctctaatgcaatatacttggttgatgtcatcgaaggtggagaggtgattatgaaagcgtgtaagcctgcactcgagtctaattacatcacgaaagttattcacgattgcaagcgtgacagtgaggctctatacttccagtttgggataagattgcacaatgttgtggacactcagattgcttattctctgattgaagaacaagaagggcggaggagacctctagatgattacatatcgtttgtttcactccttgctgatccacgttactgcggtatatcctatgaagagaaagaagaagttcgagttctcatgcgccaggacccaaagttttggacatacaggcctatgactgagctcatgatccgcgcagctgctgatgatgtccgcttccttctgtatctctatcacaaaatgatgggaaagctaaatcagcggtcactatggcatcttgcagttcgtggtgctttgtactgtcggtgtctctgctgcatgaatgatgctgattttgctgattggccaaccgttcctccaattccagataacctgaagtcagaagatcaatgtcttgaagaagagatcctgtcagtgcttgatgttccaccaggaaagatgggacgtgtgattggaaggaaaggagcatcgatcctcgccattaaggaagcttgcaacgcggaaattctaattggaggggcaaagggtccacctgataagatatttgtgattggaccggtgagagaagtgcgtaaggcggaggctatactgagaggaagaatgatagactattgaaggaaatgagggtcctttgtaatctgtctcattgcccctataaaaaaaaatactaaaaccctcttaaaacttggaaactccatggttcagtacggacccgagagagtcgtcccctcttcaataaaagttacatcattaacttccgtttatactgtggaacttaccattccatttcccgcaagggacttcatagtttgatgaaacaaaaagaccatatcaagtatggtttattggcaaatgcaagagtagtttatctgattgaccgttaagattgattttatttactttgcgactcaaattgag

SEQ ID NO: 102269 - protein, 341 aa, Arabidopsis thaliana; identical to SEQ ID NO: 36191
  peptide (1)..(341): Ceres Seq. ID no. 13609852
  misc_feature (276)..(323): Pfam Name: KH domain Pfam Description: KH domain
  misc_feature (1)..(341): Homolog of NCBI NO: 18400976 NR Description: expressed protein [Arabidopsis thaliana] At2g25910/F17H15.6 [Arabidopsis thaliana]
  misc_feature (55)..(341): Homolog of NCBI NO: 34914238 NR Description: P0002B05.11 [Oryza sativa (japonica
  misc_feature (76)..(334): Homolog of NCBI NO: 25407824 NR Description: hypothetical protein At2g25910 [imported] -
  misc_feature (258)..(321): Homolog of NCBI NO: 25407824 NR Description: hypothetical protein At2g25910 [imported] -
  misc_feature (54)..(222): Homolog of NCBI NO: 24762379 NR Description: egalitarian CG4051-PA [Drosophila melanogaster]
  misc_feature (54)..(222): Homolog of NCBI NO: 33589402 NR Description: RE33408p [Drosophila melanogaster]
  misc_feature (54)..(222): Homolog of NCBI NO: 38681451 NR Description: egalitarian [Drosophila melanogaster]
  misc_feature (57)..(227): Homolog of NCBI NO: 23612774 NR Description: exonuclease, putative [Plasmodium falciparum 3D7]
  misc_feature (35)..(214): Homolog of NCBI NO: 27370298 NR Description: hypothetical protein 4932702D22 [Mus musculus]
  misc_feature (35)..(214): Homolog of NCBI NO: 34303939 NR Description: hypothetical protein MGC33637 [Homo sapiens]

SEQ ID NO: 102270 - protein, 266 aa, Arabidopsis thaliana; identical to SEQ ID NO: 36192
  peptide (1)..(266): Ceres Seq. ID no. 13609853
  misc_feature (201)..(248): Pfam Name: KH domain Pfam Description: KH domain
  misc_feature (1)..(266): Homolog of NCBI NO: 18400976 NR Description: expressed protein [Arabidopsis thaliana] At2g25910/F17H15.6 [Arabidopsis thaliana]
  misc_feature (1)..(266): Homolog of NCBI NO: 34914238 NR Description: P0002B05.11 [Oryza sativa (japonica
  misc_feature (1)..(259): Homolog of NCBI NO: 25407824 NR Description: hypothetical protein At2g25910 [imported] -
  misc_feature (183)..(246): Homolog of NCBI NO: 25407824 NR Description: hypothetical protein At2g25910 [imported] -
  misc_feature (1)..(147): Homolog of NCBI NO: 24762379 NR Description: egalitarian CG4051-PA [Drosophila melanogaster]
  misc_feature (1)..(147): Homolog of NCBI NO: 33589402 NR Description: RE33408p [Drosophila melanogaster]
  misc_feature (1)..(147): Homolog of NCBI NO: 38681451 NR Description: egalitarian [Drosophila melanogaster]
  misc_feature (1)..(152): Homolog of NCBI NO: 23612774 NR Description: exonuclease, putative [Plasmodium falciparum 3D7]
  misc_feature (1)..(139): Homolog of NCBI NO: 27370298 NR Description: hypothetical protein 4932702D22 [Mus musculus]
  misc_feature (1)..(139): Homolog of NCBI NO: 34303939 NR Description: hypothetical protein MGC33637 [Homo sapiens]

SEQ ID NO: 102271 - protein, 245 aa, Arabidopsis thaliana; identical to SEQ ID NO: 36193
  peptide (1)..(245): Ceres Seq. ID no. 13609854
  misc_feature (180)..(227): Pfam Name: KH domain Pfam Description: KH domain
  misc_feature (1)..(245): Homolog of NCBI NO: 18400976 NR Description: expressed protein [Arabidopsis thaliana] At2g25910/F17H15.6 [Arabidopsis thaliana]
  misc_feature (1)..(245): Homolog of NCBI NO: 34914238 NR Description: P0002B05.11 [Oryza sativa (japonica
  misc_feature (1)..(238): Homolog of NCBI NO: 25407824 NR Description: hypothetical protein At2g25910 [imported] -
  misc_feature (162)..(225): Homolog of NCBI NO: 25407824 NR Description: hypothetical protein At2g25910 [imported] -
  misc_feature (1)..(126): Homolog of NCBI NO: 24762379 NR Description: egalitarian CG4051-PA [Drosophila melanogaster]
  misc_feature (1)..(126): Homolog of NCBI NO: 33589402 NR Description: RE33408p [Drosophila melanogaster]
  misc_feature (1)..(126): Homolog of NCBI NO: 38681451 NR Description: egalitarian [Drosophila melanogaster]
  misc_feature (1)..(131): Homolog of NCBI NO: 23612774 NR Description: exonuclease, putative [Plasmodium falciparum 3D7]
  misc_feature (1)..(118): Homolog of NCBI NO: 27370298 NR Description: hypothetical protein 4932702D22 [Mus musculus]
  misc_feature (1)..(118): Homolog of NCBI NO: 34303939 NR Description: hypothetical protein MGC33637 [Homo sapiens]

SEQ ID NO: 102272 - DNA, 1311 bp, Arabidopsis thaliana
  misc_feature (1)..(1311): Ceres Seq. ID no. 13609859
  misc_feature: MA Experiment ID: 108434 Result: Up-regulated in Transcription
  misc_feature: MA Experiment 108434 PARAMETER Experiment Name: At_Root_Tips_cDNA_P Parameter: Tissue Value: Root Tips
  misc_feature: MA Experiment ID: 108595 Result: Down-regulated in Transcription
  misc_feature: MA Experiment 108595 PARAMETER Experiment Name: At_Ler-pi_Ovule_cDNA_P Parameter: Plant Line Value: null
  misc_feature: MA Experiment ID: 20000071 Result: Up-regulated in Transcription
  misc_feature: MA Experiment 20000071 PARAMETER Experiment Name: At_100uM_ABA_Mutants_cDNA_P Parameter: Plant Line Value: CS8104
  misc_feature: MA Experiment 20000071 PARAMETER Experiment Name: At_100uM_ABA_Mutants_cDNA_P Parameter: Timepoint (hr) Value: 6
  misc_feature: MA Experiment 20000071 PARAMETER Experiment Name: At_100uM_ABA_Mutants_cDNA_P Parameter: Tissue Value: Aerial
  misc_feature: MA Experiment 20000071 PARAMETER Experiment Name: At_100uM_ABA_Mutants_cDNA_P Parameter: Treatment Value: 100uM ABA vs. No Treatment
  misc_feature: MA Experiment ID: 20000495 Result: Down-regulated in Transcription
  misc_feature: MA Experiment 20000495 PARAMETER Experiment Name: At_Guard_Cells_P Parameter: Harvest Date Value: 8/2/2002
  misc_feature: MA Experiment 20000495 PARAMETER Experiment Name: At_Guard_Cells_P Parameter: Organism Value: A. thaliana
  misc_feature: MA Experiment 20000495 PARAMETER Experiment Name: At_Guard_Cells_P Parameter: Tissue Value: Guard Cells vs. Leaves
gtatttgcagaagaagaagagaaaaagtttgaaagaaaatgggagcagcgaagaatatctgggcattagccaacgccgaagatgcagctaacgacgccgaacaaatcccttattcttcgttcgtcgtcgacacgtctttgcctcttcctctcatgattcctcgtatcatagagttatgtaaagatctgttcaagaattggggagagcttgatgattcactcttctctgttgagagagtatctggaggcattacaaatcttttgctgaaggtttctgtgaaagaggacactaataaagaagtgtctgttacagtgagactgtatgggcctaacactgagtatgttattaaccgggagagagagattctggctatcaagtatctctcggctgccggatttggtgccaagttgcttggtggttttggaaatggcatggtgcaatcgttcatcaatgcaagaaccttagagccatcagacatgagagagccaaagattgctgcacaaattgccagagaacttggaaagtttcataaagtggacataccaggttccaaggaacctcagctgtgggttgatatcttgaagttctatgaaaaagcatctactcttacgtttgaagaacctgataagcagaagctctttgagactatttcgtttgaagaactccacaaagaaattattgagctaagggaattcacaggcttacttaacgcacctgtggtgtttgctcataacgatttactatcaggaaacttcatgctgaatgatgaagaagagaaactatacttgattgatttcgagtatggatcatacaactatagaggctttgacatcggaaatcacttcaatgaatatgcaggatacgactgtgattacagcctgtacccaagtaaagaggaacaatatcatttcatcaagcattacttacagccagacaaaccagacgaggtcagtatcgctgaagtagaatcagtctttgtagagacagatgcgtataaattagcatctcatttgtactgggcaatatgggcgatcatccaggcaaggatgtctcccattgagtttgaatatttgggttacttctttttgcggtacaatgaatacaagaagcagaagccacttactttttcacttgttacatctcacctctcagcatcgctgtagcctttggttggccaaaatggttaaatctttttttgttttttttgttgtgttgttatcaattcttgtaaaatttgtttgtgttgttagttaaaccttgtatgatttgtatgaatgaacttgatttgtggaagtagttgcactttatatt

SEQ ID NO: 102273 - protein, 374 aa, Arabidopsis thaliana
  peptide (1)..(374): Ceres Seq. ID no. 13609860
  misc_feature (86)..(357): Pfam Name: Choline/ethanolamine kinase Pfam Description: Choline/ethanolamine kinase
  misc_feature (1)..(374): Homolog of NCBI NO: 15225800 NR Description: choline kinase -related [Arabidopsis thaliana]
  misc_feature (1)..(374): Homolog of NCBI NO: 21593269 NR Description: putative choline kinase [Arabidopsis thaliana]
  misc_feature (58)..(355): Homolog of NCBI NO: 28829950 NR Description: similar to Arabidopsis thaliana (Mouse-ear
  misc_feature (8)..(360): Homolog of NCBI NO: 26328955 NR Description: unnamed protein product [Mus musculus]
  misc_feature (8)..(360): Homolog of NCBI NO: 14194720 NR Description: ETHANOLAMINE KINASE (EKI)
  misc_feature (44)..(360): Homolog of NCBI NO: 26340554 NR Description: unnamed protein product [Mus musculus]
  misc_feature (8)..(360): Homolog of NCBI NO: 10092615 NR Description: ethanolamine kinase [Homo sapiens] Ethanolamine kinase (EKI) >gi|9998952|gb|AAF71220.2|AF207600_1
  misc_feature (65)..(365): Homolog of NCBI NO: 37786753 NR Description: putative ethanolamine kinase [Mus musculus]
  misc_feature (39)..(365): Homolog of NCBI NO: 14603244 NR Description: Similar to hypothetical protein FLJ10761 [Homo
  misc_feature (14)..(368): Homolog of NCBI NO: 7488654 NR Description: choline kinase (EC 2.7.1.32) CK3 - soybean
MGAAKNIWALANAEDAANDAEQIPYSSFVVDTSLPLPLMIPRIIELCKDLFKNWGELDDSLFSVERVSGGITNLLLKVSVKEDTNKEVSVTVRLYGPNTEYVINREREILAIKYLSAAGFGAKLLGGFGNGMVQSFINARTLEPSDMREPKIAAQIARELGKFHKVDIPGSKEPQLWVDILKFYEKASTLTFEEPDKQKLFETISFEELHKEIIELREFTGLLNAPVVFAHNDLLSGNFMLNDEEEKLYLIDFEYGSYNYRGFDIGNHFNEYAGYDCDYSLYPSKEEQYHFIKHYLQPDKPDEVSIAEVESVFVETDAYKLASHLYWAIWAIIQARMSPIEFEYLGYFFLRYNEYKKQKPLTFSLVTSHLSASL

SEQ ID NO: 102274 - protein, 336 aa, Arabidopsis thaliana
  peptide (1)..(336): Ceres Seq. ID no. 13609861
  misc_feature (48)..(319): Pfam Name: Choline/ethanolamine kinase Pfam Description: Choline/ethanolamine kinase
  misc_feature (1)..(336): Homolog of NCBI NO: 15225800 NR Description: choline kinase -related [Arabidopsis thaliana]
  misc_feature (1)..(336): Homolog of NCBI NO: 21593269 NR Description: putative choline kinase [Arabidopsis thaliana]
  misc_feature (20)..(317): Homolog of NCBI NO: 28829950 NR Description: similar to Arabidopsis thaliana (Mouse-ear
  misc_feature (1)..(322): Homolog of NCBI NO: 26328955 NR Description: unnamed protein product [Mus musculus]
  misc_feature (1)..(322): Homolog of NCBI NO: 14194720 NR Description: ETHANOLAMINE KINASE (EKI)
  misc_feature (6)..(322): Homolog of NCBI NO: 26340554 NR Description: unnamed protein product [Mus musculus]
  misc_feature (1)..(322): Homolog of NCBI NO: 10092615 NR Description: ethanolamine kinase [Homo sapiens] Ethanolamine kinase (EKI) >gi|9998952|gb|AAF71220.2|AF207600_1
  misc_feature (27)..(327): Homolog of NCBI NO: 37786753 NR Description: putative ethanolamine kinase [Mus musculus]
  misc_feature (1)..(327): Homolog of NCBI NO: 14603244 NR Description: Similar to hypothetical protein FLJ10761 [Homo
  misc_feature (1)..(330): Homolog of NCBI NO: 7488654 NR Description: choline kinase (EC 2.7.1.32) CK3 - soybean
MIPRIIELCKDLFKNWGELDDSLFSVERVSGGITNLLLKVSVKEDTNKEVSVTVRLYGPNTEYVINREREILAIKYLSAAGFGAKLLGGFGNGMVQSFINARTLEPSDMREPKIAAQIARELGKFHKVDIPGSKEPQLWVDILKFYEKASTLTFEEPDKQKLFETISFEELHKEIIELREFTGLLNAPVVFAHNDLLSGNFMLNDEEEKLYLIDFEYGSYNYRGFDIGNHFNEYAGYDCDYSLYPSKEEQYHFIKHYLQPDKPDEVSIAEVESVFVETDAYKLASHLYWAIWAIIQARMSPIEFEYLGYFFLRYNEYKKQKPLTFSLVTSHLSASL

SEQ ID NO: 102275 - protein, 243 aa, Arabidopsis thaliana; identical to SEQ ID NO: 75472
  peptide (1)..(243): Ceres Seq. ID no. 13609862
  misc_feature (1)..(226): Pfam Name: Choline/ethanolamine kinase Pfam Description: Choline/ethanolamine kinase
  misc_feature (1)..(243): Homolog of NCBI NO: 15225800 NR Description: choline kinase -related [Arabidopsis thaliana]
  misc_feature (1)..(243): Homolog of NCBI NO: 21593269 NR Description: putative choline kinase [Arabidopsis thaliana]
  misc_feature (1)..(224): Homolog of NCBI NO: 28829950 NR Description: similar to Arabidopsis thaliana (Mouse-ear
  misc_feature (1)..(229): Homolog of NCBI NO: 26328955 NR Description: unnamed protein product [Mus musculus]
  misc_feature (1)..(229): Homolog of NCBI NO: 14194720 NR Description: ETHANOLAMINE KINASE (EKI)
  misc_feature (1)..(229): Homolog of NCBI NO: 26340554 NR Description: unnamed protein product [Mus musculus]
  misc_feature (1)..(229): Homolog of NCBI NO: 10092615 NR Description: ethanolamine kinase [Homo sapiens] Ethanolamine kinase (EKI) >gi|9998952|gb|AAF71220.2|AF207600_1
  misc_feature (1)..(234): Homolog of NCBI NO: 37786753 NR Description: putative ethanolamine kinase [Mus musculus]
  misc_feature (1)..(234): Homolog of NCBI NO: 14603244 NR Description: Similar to hypothetical protein FLJ10761 [Homo
  misc_feature (1)..(237): Homolog of NCBI NO: 7488654 NR Description: choline kinase (EC 2.7.1.32) CK3 - soybean

SEQ ID NO: 102276 - DNA, 1599 bp, Arabidopsis thaliana
  misc_feature (1)..(1599): Ceres Seq. ID no. 13609867
  misc_feature: MA Experiment ID: 108434 Result: Up-regulated in Transcription
  misc_feature: MA Experiment 108434 PARAMETER Experiment Name: At_Root_Tips_cDNA_P Parameter: Tissue Value: Root Tips
  misc_feature: MA Experiment ID: 108462 Result: Down-regulated in Transcription
  misc_feature: MA Experiment 108462 PARAMETER Experiment Name: At_Germinating_Seeds_cDNA_P Parameter: Age (day) Value: 2 vs. 0
  misc_feature: MA Experiment 108462 PARAMETER Experiment Name: At_Germinating_Seeds_cDNA_P Parameter: Tissue Value: Germinating Seeds
  misc_feature: MA Experiment ID: 20000184 Result: Down-regulated in Transcription
  misc_feature: MA Experiment 20000184 PARAMETER Experiment Name: At_Shoots__P Parameter: Age (day) Value: 7
  misc_feature: MA Experiment 20000184 PARAMETER Experiment Name: At_Shoots__P Parameter: Tissue Value: Shoots vs. Whole Plant
  misc_feature: MA Experiment ID: 20000224 Result: Up-regulated in Transcription
  misc_feature: MA Experiment ID: 20001451 Result: Up-regulated in Transcription
  misc_feature: MA Experiment 20001451 PARAMETER Experiment Name: At_Far-red-induction_P Parameter: Age (day) Value: 7
  misc_feature: MA Experiment 20001451 PARAMETER Experiment Name: At_Far-red-induction_P Parameter: Light Value: Far-red vs. White
  misc_feature: MA Experiment 20001451 PARAMETER Experiment Name: At_Far-red-induction_P Parameter: Organism Value: A. thaliana
  misc_feature: MA Experiment 20001451 PARAMETER Experiment Name: At_Far-red-induction_P Parameter: Plant Line Value: Columbia
  misc_feature: MA Experiment 20001451 PARAMETER Experiment Name: At_Far-red-induction_P Parameter: Timepoint (hr) Value: 24
  misc_feature: MA Experiment 20001451 PARAMETER Experiment Name: At_Far-red-induction_P Parameter: Tissue Value: Whole Plant
acttcttccaccttcttcttctcttcttcttctcttcttcttctacttccgcaaaaaccctttgagaaagagaagcaaaattctctaatcgttctttctctgccctaatccacgtatcgtttggtgttcttcttcatcgaatcgacatggcttcagatgctgacatggaggactatggattcgagtattctgatgaggagcaagaggaacaagatgttgacattgagaaccagtattataactctaaaggtatggttgagactgaacctgaagaagcactttctggatttgctgaggttgttcagatggaacctgagaaagctgactggggtttcaaagctcttaagcagactgtgaagatctattatcgtctaggtaaatacaaagaaatgatggaagcctatacagagatgcttacatatatcaagtcagcagtcaccaggaattacagcgaaaaatgtataaacaatatcatggatttcgtctctggatctgctagccagaacactggcctgctgcaagagttctatcagaccactttgaaagcccttgaagaggctaagaatgagagactctggttcaagacaaatcttaaactctgcaacatctggtttgacattggtgaatacagacggatgactaagattctgaaggaactccataagtcttgtcaaaaggaagatggaactgatgatcagaagaaaggaagtcagctgcttgaggtttatgcaattgaaattcagatttacactgaaacgaaggacaacaaaaagcttaagcaactataccataaggcacttgccatcaagtctgccatacctcatcctaggatcatgggtataatccgcgagtgtggtggaaaaatgcacatggcagaacgtcagtgggaagaagcagcgacagacttctttgaggcttttaaaaattacgatgaagctggcaaccaaagacgtatacagtgcctgaagtatcttgttctggcgaatatgctgatggagtcagaagtgaatccgtttgatggccaagaggcaaagccgtacaaaaacgaccctgagattttggcaatgacaaatttgatcgcagcatatcaacgaaatgagatcatagagtttgagagaatactaaagagtaaccggaggacgataatggatgatccattcatcagaaactacatggaagatctgctgaagaaagtgagaacacaagtgttactgaagctgattaagccatacacaaagatagggattccgttcatatcaaaggaactgaacgtgccagagacggatgtgacggagttactagtgtcgctgatactcgacagcagaatcgatggtcacattgatgaaatgaaccgttacttactgagaggcgacagtggcaatggaaggaagttgcataaggcggttgataaatggaactcacagctcaagtctctttcttcaaatatcaccagccgagtctgttaacttggaaacctctcttttggatagattttgtgatttggcgttgattctttgtggattatctgtttctcttcacatagctggatttgatggagtttataaaccacttcaatgccaagaaaaaggatttgaaact

SEQ ID NO: 102277 - protein, 439 aa, Arabidopsis thaliana; identical to SEQ ID NO: 23813
  peptide (1)..(439): Ceres Seq. ID no. 13609868
  misc_feature (305)..(409): Pfam Name: PCI domain Pfam Description: PCI domain
  misc_feature (1)..(439): Homolog of NCBI NO: 18401293 NR Description: COP9 complex subunit CSN2, putative [Arabidopsis >gi|18056655|gb|AAL58101.1|AF395058_1 CSN complex subunit 2 thaliana] >gi|20197415|gb|AAC77857.2| COP9 complex subunit CSN2,
  misc_feature (1)..(439): Homolog of NCBI NO: 15215816 NR Description: At2g26990/T20P8.4 [Arabidopsis thaliana]
  misc_feature (7)..(439): Homolog of NCBI NO: 25407849 NR Description: probable PCI domain protein [imported] -
  misc_feature (7)..(390): Homolog of NCBI NO: 34903328 NR Description: unnamed protein product [Oryza sativa (japonica group)] >gi|10944284|dbj|BAA87824.2| unnamed protein product
  misc_feature (363)..(409): Homolog of NCBI NO: 34903328 NR Description: unnamed protein product [Oryza sativa (japonica group)] >gi|10944284|dbj|BAA87824.2| unnamed protein product
  misc_feature (1)..(438): Homolog of NCBI NO: 4759264 NR Description: thyroid receptor interacting protein 15 [Homo >gi|23463271|ref|NP_695209.1| tyroid receptor interacting protein [Rattus norvegicus] >gi|12643293|sp|Q15647|CSN2_HUMAN COP9
  misc_feature (1)..(438): Homolog of NCBI NO: 6753486 NR Description: COP9 (constitutive photomorphogenic) homolog, homologue; expressed sequence C85265 [Mus musculus]
  misc_feature (1)..(438): Homolog of NCBI NO: 18606281 NR Description: COP9 (constitutive photomorphogenic) homolog,
  misc_feature (1)..(438): Homolog of NCBI NO: 5410310 NR Description: thyroid receptor interactor trip15 [Homo sapiens]
  misc_feature (1)..(438): Homolog of NCBI NO: 13445486 NR Description: TRIP15-ISO [Homo sapiens]

SEQ ID NO: 102278 - protein, 433 aa, Arabidopsis thaliana; identical to SEQ ID NO: 23814
  peptide (1)..(433): Ceres Seq. ID no. 13609869
  misc_feature (299)..(403): Pfam Name: PCI domain Pfam Description: PCI domain
  misc_feature (1)..(433): Homolog of NCBI NO: 18401293 NR Description: COP9 complex subunit CSN2, putative [Arabidopsis >gi|18056655|gb|AAL58101.1|AF395058_1 CSN complex subunit 2 thaliana] >gi|20197415|gb|AAC77857.2| COP9 complex subunit CSN2,
  misc_feature (1)..(433): Homolog of NCBI NO: 15215816 NR Description: At2g26990/T20P8.4 [Arabidopsis thaliana]
  misc_feature (1)..(433): Homolog of NCBI NO: 25407849 NR Description: probable PCI domain protein [imported] -
  misc_feature (1)..(384): Homolog of NCBI NO: 34903328 NR Description: unnamed protein product [Oryza sativa (japonica group)] >gi|10944284|dbj|BAA87824.2| unnamed protein product
  misc_feature (357)..(403): Homolog of NCBI NO: 34903328 NR Description: unnamed protein product [Oryza sativa (japonica group)] >gi|10944284|dbj|BAA87824.2| unnamed protein product
  misc_feature (1)..(432): Homolog of NCBI NO: 4759264 NR Description: thyroid receptor interacting protein 15 [Homo >gi|23463271|ref|NP_695209.1| tyroid receptor interacting protein [Rattus norvegicus] >gi|12643293|sp|Q15647|CSN2_HUMAN COP9
  misc_feature (1)..(432): Homolog of NCBI NO: 6753486 NR Description: COP9 (constitutive photomorphogenic) homolog, homologue; expressed sequence C85265 [Mus musculus]
  misc_feature (1)..(432): Homolog of NCBI NO: 18606281 NR Description: COP9 (constitutive photomorphogenic) homolog,
  misc_feature (1)..(432): Homolog of NCBI NO: 5410310 NR Description: thyroid receptor interactor trip15 [Homo sapiens]
  misc_feature (1)..(432): Homolog of NCBI NO: 13445486 NR Description: TRIP15-ISO [Homo sapiens]

SEQ ID NO: 102279 - protein, 404 aa, Arabidopsis thaliana; identical to SEQ ID NO: 23815
  peptide (1)..(404): Ceres Seq. ID no. 13609870
  misc_feature (270)..(374): Pfam Name: PCI domain Pfam Description: PCI domain
  misc_feature (1)..(404): Homolog of NCBI NO: 18401293 NR Description: COP9 complex subunit CSN2, putative [Arabidopsis >gi|18056655|gb|AAL58101.1|AF395058_1 CSN complex subunit 2 thaliana] >gi|20197415|gb|AAC77857.2| COP9 complex subunit CSN2,
  misc_feature (1)..(404): Homolog of NCBI NO: 15215816 NR Description: At2g26990/T20P8.4 [Arabidopsis thaliana]
  misc_feature (1)..(404): Homolog of NCBI NO: 25407849 NR Description: probable PCI domain protein [imported] -
  misc_feature (1)..(355): Homolog of NCBI NO: 34903328 NR Description: unnamed protein product [Oryza sativa (japonica group)] >gi|10944284|dbj|BAA87824.2| unnamed protein product
  misc_feature (328)..(374): Homolog of NCBI NO: 34903328 NR Description: unnamed protein product [Oryza sativa (japonica group)] >gi|10944284|dbj|BAA87824.2| unnamed protein product
  misc_feature (1)..(403): Homolog of NCBI NO: 4759264 NR Description: thyroid receptor interacting protein 15 [Homo >gi|23463271|ref|NP_695209.1| tyroid receptor interacting protein [Rattus norvegicus] >gi|12643293|sp|Q15647|CSN2_HUMAN COP9
  misc_feature (1)..(403): Homolog of NCBI NO: 6753486 NR Description: COP9 (constitutive photomorphogenic) homolog, homologue; expressed sequence C85265 [Mus musculus]
  misc_feature (1)..(403): Homolog of NCBI NO: 18606281 NR Description: COP9 (constitutive photomorphogenic) homolog,
  misc_feature (1)..(403): Homolog of NCBI NO: 5410310 NR Description: thyroid receptor interactor trip15 [Homo sapiens]
  misc_feature (1)..(403): Homolog of NCBI NO: 13445486 NR Description: TRIP15-ISO [Homo sapiens]

SEQ ID NO: 102280 - DNA, 804 bp, Arabidopsis thaliana
  misc_feature (1)..(804): Ceres Seq. ID no. 13609871
  misc_feature: MA Experiment ID: 20000173 Result: Down-regulated in Transcription
  misc_feature: MA Experiment 20000173 PARAMETER Experiment Name: At_42deg_Heat_P Parameter: Age (day) Value: 14
  misc_feature: MA Experiment 20000173 PARAMETER Experiment Name: At_42deg_Heat_P Parameter: Organism Value: A. thaliana
  misc_feature: MA Experiment 20000173 PARAMETER Experiment Name: At_42deg_Heat_P Parameter: Plant Line Value: WS
  misc_feature: MA Experiment 20000173 PARAMETER Experiment Name: At_42deg_Heat_P Parameter: Temperature (deg C) Value: 42 vs. 22
  misc_feature: MA Experiment 20000173 PARAMETER Experiment Name: At_42deg_Heat_P Parameter: Timepoint (hr) Value: 6
  misc_feature: MA Experiment 20000173 PARAMETER Experiment Name: At_42deg_Heat_P Parameter: Tissue Value: Aerial
  misc_feature: MA Experiment ID: 20000185 Result: Up-regulated in Transcription
  misc_feature: MA Experiment 20000185 PARAMETER Experiment Name: At_Roots__P Parameter: Age (day) Value: 7 vs. 21
  misc_feature: MA Experiment 20000185 PARAMETER Experiment Name: At_Roots__P Parameter: Organism Value: A. thaliana
  misc_feature: MA Experiment 20000185 PARAMETER Experiment Name: At_Roots__P Parameter: Tissue Value: Roots vs. Whole Plant
  misc_feature: MA Experiment ID: 20000227 Result: Up-regulated in Transcription
  misc_feature: MA Experiment 20000227 PARAMETER Experiment Name: At_Root-Tips-vs-Tops_P Parameter: Tissue Value: Root Tips vs. Root Tops
  misc_feature: MA Experiment ID: 20000234 Result: Up-regulated in Transcription
  misc_feature: MA Experiment 20000234 PARAMETER Experiment Name: At_Siliques_P Parameter: Age (day) Value: 21
  misc_feature: MA Experiment 20000234 PARAMETER Experiment Name: At_Siliques_P Parameter: Organism Value: A. thaliana
  misc_feature: MA Experiment 20000234 PARAMETER Experiment Name: At_Siliques_P Parameter: Plant Line Value: WS
  misc_feature: MA Experiment 20000234 PARAMETER Experiment Name: At_Siliques_P Parameter: Tissue Value: Less Than 5mm Siliques vs. Whole Plant
  misc_feature: MA Experiment ID: 20000264 Result: Up-regulated in Transcription
  misc_feature: MA Experiment 20000264 PARAMETER Experiment Name: At_Open_Flower_P Parameter: Age (day) Value: 21
  misc_feature: MA Experiment 20000264 PARAMETER Experiment Name: At_Open_Flower_P Parameter: Plant Line Value: WS
  misc_feature: MA Experiment 20000264 PARAMETER Experiment Name: At_Open_Flower_P Parameter: Tissue Value: Open Flower vs. Whole Plant
  misc_feature: MA Experiment ID: 20000265 Result: Up-regulated in Transcription
  misc_feature: MA Experiment 20000265 PARAMETER Experiment Name: At_Open_Flower_P Parameter: Age (day) Value: 21
  misc_feature: MA Experiment 20000265 PARAMETER Experiment Name: At_Open_Flower_P Parameter: Plant Line Value: WS
  misc_feature: MA Experiment 20000265 PARAMETER Experiment Name: At_Open_Flower_P Parameter: Tissue Value: Closed Flower vs. Whole Plant
  misc_feature: MA Experiment ID: 20000286 Result: Up-regulated in Transcription
  misc_feature: MA Experiment 20000286 PARAMETER Experiment Name: At_Open_Flower_P Parameter: Age (day) Value: 21
  misc_feature: MA Experiment 20000286 PARAMETER Experiment Name: At_Open_Flower_P Parameter: Plant Line Value: WS
  misc_feature: MA Experiment 20000286 PARAMETER Experiment Name: At_Open_Flower_P Parameter: Tissue Value: Half Open vs. Whole Plant
  misc_feature: MA Experiment ID: 20000439 Result: Up-regulated in Transcription
  misc_feature: MA Experiment 20000439 PARAMETER Experiment Name: At_Roots__P Parameter: Age (day) Value: 14 vs. 21
  misc_feature: MA Experiment 20000439 PARAMETER Experiment Name: At_Roots__P Parameter: Organism Value: A. thaliana
  misc_feature: MA Experiment 20000439 PARAMETER Experiment Name: At_Roots__P Parameter: Tissue Value: Roots vs. Whole Plant
atatcgcatctaaagcccccccaaaaaaaaaatcctattactcactcatacgctctctcgtcaaacaaaaaaaaaaaacctaaagaaacttcgacatgaaaggcggcgaatccaaagctgaagcaacgagcactgatcagagactcaaaaccagaggtagaaaggctgggaagaagacgaagaaggatccaaatcaacctaagagacctccaagtgctttcttcgtcttccttgaggatttccgaaaagagtttaacctagcgaatcctaataacaaatccgtcgctactgttggtaaggctgctggagctagatggaaggcaatgactgatgaagataaagctccttacgtcgctaaggctgagagcagaaagactgaatatattaagaatgtgcaacagtacaacttgaaactggctagtggaaccaatagagaagaggatgactctgacaaatccaagtctgaagttgatgaagcagtaagcgaagaggaggcagaagacgacgattgaagcatctaggtcttgctattgacttgactcagatttgagaatgtaaacttgcttaggtttatgaccaaaaacttttaaaaaactcttatttatgctttgtgtttgtgatatttgaacctcatttgctacatcaatgttgttttaggtcagtctgtagggataatatcacttgactgctatatttcccctatttccttatgttttactagtattcatatgttcttcaactttgtatgagttttagtatcagttttatttctacttatgcttatttgttgacttctgtttctac

SEQ ID NO: 102281 - protein, 138 aa, Arabidopsis thaliana; identical to SEQ ID NO: 35594
  peptide (1)..(138): Ceres Seq. ID no. 13609872
  misc_feature (35)..(104): Pfam Name: HMG (high mobility group) box Pfam Description: HMG (high mobility group) box
  misc_feature (1)..(138): Homolog of NCBI NO: 15227862 NR Description: HMG protein -related [Arabidopsis thaliana]
  misc_feature (1)..(138): Homolog of NCBI NO: 13877775 NR Description: putative HMG protein [Arabidopsis thaliana]
  misc_feature (1)..(138): Homolog of NCBI NO: 21592453 NR Description: putative HMG protein [Arabidopsis thaliana]
  misc_feature (1)..(138): Homolog of NCBI NO: 11346367 NR Description: high mobility group protein HMG-gamma [validated] Arabidopsis thaliana >gi|2832355|emb|CAA74403.1| HMG protein
  misc_feature (1)..(127): Homolog of NCBI NO: 15237040 NR Description: HMG delta protein [Arabidopsis thaliana]

SEQ ID NO: 102282 - DNA, 731 bp, Arabidopsis thaliana
  misc_feature (1)..(731): Ceres Seq. ID no. 13609873
  misc_feature: MA Experiment ID: 20000173 Result: Down-regulated in Transcription
  misc_feature: MA Experiment 20000173 PARAMETER Experiment Name: At_42deg_Heat_P Parameter: Age (day) Value: 14
  misc_feature: MA Experiment 20000173 PARAMETER Experiment Name: At_42deg_Heat_P Parameter: Organism Value: A. thaliana
  misc_feature: MA Experiment 20000173 PARAMETER Experiment Name: At_42deg_Heat_P Parameter: Plant Line Value: WS
  misc_feature: MA Experiment 20000173 PARAMETER Experiment Name: At_42deg_Heat_P Parameter: Temperature (deg C) Value: 42 vs. 22
  misc_feature: MA Experiment 20000173 PARAMETER Experiment Name: At_42deg_Heat_P Parameter: Timepoint (hr) Value: 6
  misc_feature: MA Experiment 20000173 PARAMETER Experiment Name: At_42deg_Heat_P Parameter: Tissue Value: Aerial
  misc_feature: MA Experiment ID: 20000185 Result: Up-regulated in Transcription
  misc_feature: MA Experiment 20000185 PARAMETER Experiment Name: At_Roots__P Parameter: Age (day) Value: 7 vs. 21
  misc_feature: MA Experiment 20000185 PARAMETER Experiment Name: At_Roots__P Parameter: Organism Value: A. thaliana
  misc_feature: MA Experiment 20000185 PARAMETER Experiment Name: At_Roots__P Parameter: Tissue Value: Roots vs. Whole Plant
  misc_feature: MA Experiment ID: 20000227 Result: Up-regulated in Transcription
  misc_feature: MA Experiment 20000227 PARAMETER Experiment Name: At_Root-Tips-vs-Tops_P Parameter: Tissue Value: Root Tips vs. Root Tops
  misc_feature: MA Experiment ID: 20000234 Result: Up-regulated in Transcription
  misc_feature: MA Experiment 20000234 PARAMETER Experiment Name: At_Siliques_P Parameter: Age (day) Value: 21
  misc_feature: MA Experiment 20000234 PARAMETER Experiment Name: At_Siliques_P Parameter: Organism Value: A. thaliana
  misc_feature: MA Experiment 20000234 PARAMETER Experiment Name: At_Siliques_P Parameter: Plant Line Value: WS
  misc_feature: MA Experiment 20000234 PARAMETER Experiment Name: At_Siliques_P Parameter: Tissue Value: Less Than 5mm Siliques vs. Whole Plant
  misc_feature: MA Experiment ID: 20000264 Result: Up-regulated in Transcription
  misc_feature: MA Experiment 20000264 PARAMETER Experiment Name: At_Open_Flower_P Parameter: Age (day) Value: 21
  misc_feature: MA Experiment 20000264 PARAMETER Experiment Name: At_Open_Flower_P Parameter: Plant Line Value: WS
  misc_feature: MA Experiment 20000264 PARAMETER Experiment Name: At_Open_Flower_P Parameter: Tissue Value: Open Flower vs. Whole Plant
  misc_feature: MA Experiment ID: 20000265 Result: Up-regulated in Transcription
  misc_feature: MA Experiment 20000265 PARAMETER Experiment Name: At_Open_Flower_P Parameter: Age (day) Value: 21
  misc_feature: MA Experiment 20000265 PARAMETER Experiment Name: At_Open_Flower_P Parameter: Plant Line Value: WS
  misc_feature: MA Experiment 20000265 PARAMETER Experiment Name: At_Open_Flower_P Parameter: Tissue Value: Closed Flower vs. Whole Plant
  misc_feature: MA Experiment ID: 20000286 Result: Up-regulated in Transcription
  misc_feature: MA Experiment 20000286 PARAMETER Experiment Name: At_Open_Flower_P Parameter: Age (day) Value: 21
  misc_feature: MA Experiment 20000286 PARAMETER Experiment Name: At_Open_Flower_P Parameter: Plant Line Value: WS
  misc_feature: MA Experiment 20000286 PARAMETER Experiment Name: At_Open_Flower_P Parameter: Tissue Value: Half Open vs. Whole Plant
  misc_feature: MA Experiment ID: 20000439 Result: Up-regulated in Transcription
  misc_feature: MA Experiment 20000439 PARAMETER Experiment Name: At_Roots__P Parameter: Age (day) Value: 14 vs. 21
  misc_feature: MA Experiment 20000439 PARAMETER Experiment Name: At_Roots__P Parameter: Organism Value: A. thaliana
  misc_feature: MA Experiment 20000439 PARAMETER Experiment Name: At_Roots__P Parameter: Tissue Value: Roots vs. Whole Plant
attactcactcatacgctctctcgtcaaacaaaaaaaaaaaacctaaaggaaacttcgacatgaaaggcggcgaatccaaagctgaagcaacgagcactgatcagagactcaaaaccagaggtagaaaggctgggaagaagacgaagaaggatccaaatcaacctaagagacctccaagtgctttcttcgtcttccttgaggatttccgaaaagagtttaacctagcgaatcctaataacaaatccgtcgctactgttggtaaggctgctggagctagatggaaggcaatgactgatgaagataaagctccttacgtcgctaaggctgagagcagaaagactgaatatattaagaatgtgcaacagtacaacttgaaactggctagtggaaccaatagagaagaggatgactctgacaaatccaagtctgaagttgatgaagcagtaagcgaagaggaggcagaagacgacgattgaagcatctaggtcttgctattgacttgactcagatttgagaatgtaaacttgcttaggtttatgaccaaaaacttttaaaaaactcttatttatgctttgtgtttgtgatatttgaacctcatttgctacatcaatgttgttttaggtcagtctgtagggataatatcacttgactgctatatttcccctatttccttatgttttactagtattcatatgttcttcaactttgtatgagttttagtatcagtttt

SEQ ID NO: 102283 - protein, 158 aa, Arabidopsis thaliana
  peptide (1)..(158): Ceres Seq. ID no. 13609874
  misc_feature (55)..(124): Pfam Name: HMG (high mobility group) box Pfam Description: HMG (high mobility group) box
  misc_feature (21)..(158): Homolog of NCBI NO: 15227862 NR Description: HMG protein -related [Arabidopsis thaliana]
  misc_feature (21)..(158): Homolog of NCBI NO: 13877775 NR Description: putative HMG protein [Arabidopsis thaliana]
  misc_feature (21)..(158): Homolog of NCBI NO: 21592453 NR Description: putative HMG protein [Arabidopsis thaliana]
  misc_feature (21)..(158): Homolog of NCBI NO: 11346367 NR Description: high mobility group protein HMG-gamma [validated] Arabidopsis thaliana >gi|2832355|emb|CAA74403.1| HMG protein
  misc_feature (21)..(147): Homolog of NCBI NO: 15237040 NR Description: HMG delta protein [Arabidopsis thaliana]
ITHSYALSSNKKKKPKGNFDMKGGESKAEATSTDQRLKTRGRKAGKKTKKDPNQPKRPPSAFFVFLEDFRKEFNLANPNNKSVATVGKAAGARWKAMTDEDKAPYVAKAESRKTEYIKNVQQYNLKLASGTNREEDDSDKSKSEVDEAVSEEEAEDDD

SEQ ID NO: 102284 - protein, 138 aa, Arabidopsis thaliana; identical to SEQ ID NO: 35594
  peptide (1)..(138): Ceres Seq. ID no. 13609875
  misc_feature (35)..(104): Pfam Name: HMG (high mobility group) box Pfam Description: HMG (high mobility group) box
  misc_feature (1)..(138): Homolog of NCBI NO: 15227862 NR Description: HMG protein -related [Arabidopsis thaliana]
  misc_feature (1)..(138): Homolog of NCBI NO: 13877775 NR Description: putative HMG protein [Arabidopsis thaliana]
  misc_feature (1)..(138): Homolog of NCBI NO: 21592453 NR Description: putative HMG protein [Arabidopsis thaliana]
  misc_feature (1)..(138): Homolog of NCBI NO: 11346367 NR Description: high mobility group protein HMG-gamma [validated] Arabidopsis thaliana >gi|2832355|emb|CAA74403.1| HMG protein
  misc_feature (1)..(127): Homolog of NCBI NO: 15237040 NR Description: HMG delta protein [Arabidopsis thaliana]

SEQ ID NO: 102285 - DNA, 1496 bp, Arabidopsis thaliana
  misc_feature (1)..(1496): Ceres Seq. ID no. 13609884
  misc_feature: MA Experiment ID: 108434 Result: Down-regulated in Transcription
  misc_feature: MA Experiment 108434 PARAMETER Experiment Name: At_Root_Tips_cDNA_P Parameter: Tissue Value: Root Tips
  misc_feature: MA Experiment ID: 108435 Result: Down-regulated in Transcription
  misc_feature: MA Experiment 108435 PARAMETER Experiment Name: At_stm_Mutants_cDNA_P Parameter: Plant Line Value: wt Landsburg vs stm
  misc_feature: MA Experiment 108435 PARAMETER Experiment Name: At_stm_Mutants_cDNA_P Parameter: Tissue Value: Shoot Apical Meristem Region
  misc_feature: MA Experiment ID: 108462 Result: Up-regulated in Transcription
  misc_feature: MA Experiment 108462 PARAMETER Experiment Name: At_Germinating_Seeds_cDNA_P Parameter: Age (day) Value: 2 vs. 0
  misc_feature: MA Experiment 108462 PARAMETER Experiment Name: At_Germinating_Seeds_cDNA_P Parameter: Tissue Value: Germinating Seeds
  misc_feature: MA Experiment ID: 108464 Result: Up-regulated in Transcription
  misc_feature: MA Experiment 108464 PARAMETER Experiment Name: At_Germinating_Seeds_cDNA_P Parameter: Age (day) Value: 4 vs. 0
  misc_feature: MA Experiment 108464 PARAMETER Experiment Name: At_Germinating_Seeds_cDNA_P Parameter: Tissue Value: Germinating Seeds
  misc_feature: MA Experiment ID: 108573 Result: Down-regulated in Transcription
  misc_feature: MA Experiment 108573 PARAMETER Experiment Name: At_Drought_cDNA_P Parameter: Timepoint (hr) Value: 6
  misc_feature: MA Experiment 108573 PARAMETER Experiment Name: At_Drought_cDNA_P Parameter: Tissue Value: Aerial
  misc_feature: MA Experiment 108573 PARAMETER Experiment Name: At_Drought_cDNA_P Parameter: Treatment Value: Drought vs. No Drought
  misc_feature: MA Experiment ID: 108585 Result: Down-regulated in Transcription
  misc_feature: MA Experiment 108585 PARAMETER Experiment Name: At_5mM_NaNP_cDNA_P Parameter: Timepoint (hr) Value: 6
  misc_feature: MA Experiment 108585 PARAMETER Experiment Name: At_5mM_NaNP_cDNA_P Parameter: Tissue Value: Aerial
  misc_feature: MA Experiment 108585 PARAMETER Experiment Name: At_5mM_NaNP_cDNA_P Parameter: Treatment Value: null
  misc_feature: MA Experiment ID: 108595 Result: Down-regulated in Transcription
  misc_feature: MA Experiment 108595 PARAMETER Experiment Name: At_Ler-pi_Ovule_cDNA_P Parameter: Plant Line Value: null
  misc_feature: MA Experiment ID: 20000087 Result: Down-regulated in Transcription
  misc_feature: MA Experiment 20000087 PARAMETER Experiment Name: At_100uM_ABA_Mutants_cDNA_P Parameter: Plant Line Value: WS
  misc_feature: MA Experiment 20000087 PARAMETER Experiment Name: At_100uM_ABA_Mutants_cDNA_P Parameter: Timepoint (hr) Value: 6
  misc_feature: MA Experiment 20000087 PARAMETER Experiment Name: At_100uM_ABA_Mutants_cDNA_P Parameter: Tissue Value: Aerial
  misc_feature: MA Experiment 20000087 PARAMETER Experiment Name: At_100uM_ABA_Mutants_cDNA_P Parameter: Treatment Value: 100uM ABA vs. No Treatment
  misc_feature: MA Experiment ID: 20000117 Result: Down-regulated in Transcription
  misc_feature: MA Experiment 20000117 PARAMETER Experiment Name: At_100uM_ABA_Mutants_cDNA_P Parameter: Plant Line Value: Columbia
  misc_feature: MA Experiment 20000117 PARAMETER Experiment Name: At_100uM_ABA_Mutants_cDNA_P Parameter: Timepoint (hr) Value: 6
  misc_feature: MA Experiment 20000117 PARAMETER Experiment Name: At_100uM_ABA_Mutants_cDNA_P Parameter: Tissue Value: Aerial
  misc_feature: MA Experiment 20000117 PARAMETER Experiment Name: At_100uM_ABA_Mutants_cDNA_P Parameter: Treatment Value: 100uM ABA vs. No Treatment
  misc_feature: MA Experiment ID: 20000173 Result: Down-regulated in Transcription
  misc_feature: MA Experiment 20000173 PARAMETER Experiment Name: At_42deg_Heat_P Parameter: Age (day) Value: 14
  misc_feature: MA Experiment 20000173 PARAMETER Experiment Name: At_42deg_Heat_P Parameter: Organism Value: A. thaliana
  misc_feature: MA Experiment 20000173 PARAMETER Experiment Name: At_42deg_Heat_P Parameter: Plant Line Value: WS
  misc_feature: MA Experiment 20000173 PARAMETER Experiment Name: At_42deg_Heat_P Parameter: Temperature (deg C) Value: 42 vs. 22
  misc_feature: MA Experiment 20000173 PARAMETER Experiment Name: At_42deg_Heat_P Parameter: Timepoint (hr) Value: 6
  misc_feature: MA Experiment 20000173 PARAMETER Experiment Name: At_42deg_Heat_P Parameter: Tissue Value: Aerial
  misc_feature: MA Experiment ID: 20000185 Result: Down-regulated in Transcription
  misc_feature: MA Experiment 20000185 PARAMETER Experiment Name: At_Roots__P Parameter: Age (day) Value: 7 vs. 21
  misc_feature: MA Experiment 20000185 PARAMETER Experiment Name: At_Roots__P Parameter: Organism Value: A. thaliana
  misc_feature: MA Experiment 20000185 PARAMETER Experiment Name: At_Roots__P Parameter: Tissue Value: Roots vs. Whole Plant
  misc_feature: MA Experiment ID: 20000436 Result: Down-regulated in Transcription
  misc_feature: MA Experiment 20000436 PARAMETER Experiment Name: At_Drought_P Parameter: Age (day) Value: 7
  misc_feature: MA Experiment 20000436 PARAMETER Experiment Name: At_Drought_P Parameter: Organism Value: A. thaliana
  misc_feature: MA Experiment 20000436 PARAMETER Experiment Name: At_Drought_P Parameter: Plant Line Value: WS
  misc_feature: MA Experiment 20000436 PARAMETER Experiment Name: At_Drought_P Parameter: Timepoint (hr) Value: 12
  misc_feature: MA Experiment 20000436 PARAMETER Experiment Name: At_Drought_P Parameter: Tissue Value: Whole Plant
  misc_feature: MA Experiment 20000436 PARAMETER Experiment Name: At_Drought_P Parameter: Treatment Value: Drought vs. No Drought
  misc_feature: MA Experiment ID: 20000437 Result: Down-regulated in Transcription
  misc_feature: MA Experiment 20000437 PARAMETER Experiment Name: At_Drought_P Parameter: Age (day) Value: 8
  misc_feature: MA Experiment 20000437 PARAMETER Experiment Name: At_Drought_P Parameter: Organism Value: A. thaliana
  misc_feature: MA Experiment 20000437 PARAMETER Experiment Name: At_Drought_P Parameter: Plant Line Value: WS
  misc_feature: MA Experiment 20000437 PARAMETER Experiment Name: At_Drought_P Parameter: Timepoint (hr) Value: 24
  misc_feature: MA Experiment 20000437 PARAMETER Experiment Name: At_Drought_P Parameter: Tissue Value: Whole Plant
  misc_feature: MA Experiment 20000437 PARAMETER Experiment Name: At_Drought_P Parameter: Treatment Value: Drought vs. No Drought
  misc_feature: MA Experiment ID: 20000439 Result: Down-regulated in Transcription
  misc_feature: MA Experiment 20000439 PARAMETER Experiment Name: At_Roots__P Parameter: Age (day) Value: 14 vs. 21
  misc_feature: MA Experiment 20000439 PARAMETER Experiment Name: At_Roots__P Parameter: Organism Value: A. thaliana
  misc_feature: MA Experiment 20000439 PARAMETER Experiment Name: At_Roots__P Parameter: Tissue Value: Roots vs. Whole Plant
  misc_feature: MA Experiment ID: 20000527 Result: Down-regulated in Transcription
  misc_feature: MA Experiment 20000527 PARAMETER Experiment Name: At_10percent_PEG_P Parameter: Age (day) Value: 20
  misc_feature: MA Experiment 20000527 PARAMETER Experiment Name: At_10percent_PEG_P Parameter: Organism Value: A. thaliana
  misc_feature: MA Experiment 20000527 PARAMETER Experiment Name: At_10percent_PEG_P Parameter: Plant Line Value: WS
  misc_feature: MA Experiment 20000527 PARAMETER Experiment Name: At_10percent_PEG_P Parameter: Timepoint (day) Value: 20
  misc_feature: MA Experiment 20000527 PARAMETER Experiment Name: At_10percent_PEG_P Parameter: Tissue Value: Whole Plant
  misc_feature: MA Experiment 20000527 PARAMETER Experiment Name: At_10percent_PEG_P Parameter: Treatment Value: 10percent PEG vs. No Treatment
  misc_feature: MA Experiment ID: 20001555 Result: Down-regulated in Transcription
  misc_feature: MA Experiment 20001555 PARAMETER Experiment Name: At_Drought_Soil_Dry_P Parameter: Age (day) Value: 24
  misc_feature: MA Experiment 20001555 PARAMETER Experiment Name: At_Drought_Soil_Dry_P Parameter: Organism Value: A. thaliana
  misc_feature: MA Experiment 20001555 PARAMETER Experiment Name: At_Drought_Soil_Dry_P Parameter: Plant Line Value: WS
  misc_feature: MA Experiment 20001555 PARAMETER Experiment Name: At_Drought_Soil_Dry_P Parameter: Post Timepoint (hr) Value: None
  misc_feature: MA Experiment 20001555 PARAMETER Experiment Name: At_Drought_Soil_Dry_P Parameter: Post-Treatment Value: None
  misc_feature: MA Experiment 20001555 PARAMETER Experiment Name: At_Drought_Soil_Dry_P Parameter: Timepoint (day) Value: 10
  misc_feature: MA Experiment 20001555 PARAMETER Experiment Name: At_Drought_Soil_Dry_P Parameter: Treatment Value: Drought vs. No Drought
  misc_feature: MA Experiment ID: 20001556 Result: Down-regulated in Transcription
  misc_feature: MA Experiment 20001556 PARAMETER Experiment Name: At_Drought_Soil_Dry_P Parameter: Age (day) Value: 26
  misc_feature: MA Experiment 20001556 PARAMETER Experiment Name: At_Drought_Soil_Dry_P Parameter: Organism Value: A. thaliana
  misc_feature: MA Experiment 20001556 PARAMETER Experiment Name: At_Drought_Soil_Dry_P Parameter: Plant Line Value: WS
  misc_feature: MA Experiment 20001556 PARAMETER Experiment Name: At_Drought_Soil_Dry_P Parameter: Post Timepoint (hr) Value: None
  misc_feature: MA Experiment 20001556 PARAMETER Experiment Name: At_Drought_Soil_Dry_P Parameter: Post-Treatment Value: None
  misc_feature: MA Experiment 20001556 PARAMETER Experiment Name: At_Drought_Soil_Dry_P Parameter: Timepoint (day) Value: 12
  misc_feature: MA Experiment 20001556 PARAMETER Experiment Name: At_Drought_Soil_Dry_P Parameter: Treatment Value: Drought vs. No Drought
  misc_feature: MA Experiment ID: 20001559 Result: Down-regulated in Transcription
  misc_feature: MA Experiment 20001559 PARAMETER Experiment Name: At_Drought_Soil_Dry_P Parameter: Age (day) Value: 28
  misc_feature: MA Experiment 20001559 PARAMETER Experiment Name: At_Drought_Soil_Dry_P Parameter: Organism Value: A. thaliana
  misc_feature: MA Experiment 20001559 PARAMETER Experiment Name: At_Drought_Soil_Dry_P Parameter: Plant Line Value: WS
  misc_feature: MA Experiment 20001559 PARAMETER Experiment Name: At_Drought_Soil_Dry_P Parameter: Post Timepoint (hr) Value: 29
  misc_feature: MA Experiment 20001559 PARAMETER Experiment Name: At_Drought_Soil_Dry_P Parameter: Post-Treatment Value: Re-Water vs. No Drought
  misc_feature: MA Experiment 20001559 PARAMETER Experiment Name: At_Drought_Soil_Dry_P Parameter: Timepoint (day) Value: 14
  misc_feature: MA Experiment 20001559 PARAMETER Experiment Name: At_Drought_Soil_Dry_P Parameter: Treatment Value: Drought vs. No Drought
  misc_feature: MA Experiment ID: 20001904 Result: Down-regulated in Transcription
  misc_feature: MA Experiment 20001904 PARAMETER Experiment Name: At_Drought_Reproduction_P Parameter: Age (day) Value: 37
  misc_feature: MA Experiment 20001904 PARAMETER Experiment Name: At_Drought_Reproduction_P Parameter: Organism Value: A. thaliana
  misc_feature: MA Experiment 20001904 PARAMETER Experiment Name: At_Drought_Reproduction_P Parameter: Plant Line Value: WS
  misc_feature: MA Experiment 20001904 PARAMETER Experiment Name: At_Drought_Reproduction_P Parameter: Timepoint (day) Value: 7
  misc_feature: MA Experiment 20001904 PARAMETER Experiment Name: At_Drought_Reproduction_P Parameter: Tissue Value: Rosettes
  misc_feature: MA Experiment 20001904 PARAMETER Experiment Name: At_Drought_Reproduction_P Parameter: Treatment Value: Drought vs. No Drought
  misc_feature: MA Experiment ID: 20001905 Result: Down-regulated in Transcription
  misc_feature: MA Experiment 20001905 PARAMETER Experiment Name: At_Drought_Reproduction_P Parameter: Age (day) Value: 40
  misc_feature: MA Experiment 20001905 PARAMETER Experiment Name: At_Drought_Reproduction_P Parameter: Organism Value: A. thaliana
  misc_feature: MA Experiment 20001905 PARAMETER Experiment Name: At_Drought_Reproduction_P Parameter: Plant Line Value: WS
  misc_feature: MA Experiment 20001905 PARAMETER Experiment Name: At_Drought_Reproduction_P Parameter: Timepoint (day) Value: 10
  misc_feature: MA Experiment 20001905 PARAMETER Experiment Name: At_Drought_Reproduction_P Parameter: Tissue Value: Rosettes
  misc_feature: MA Experiment 20001905 PARAMETER Experiment Name: At_Drought_Reproduction_P Parameter: Treatment Value: Drought vs. No Drought
  misc_feature: MA Experiment ID: 20001906 Result: Down-regulated in Transcription
  misc_feature: MA Experiment 20001906 PARAMETER Experiment Name: At_Drought_Reproduction_P Parameter: Age (day) Value: 35
  misc_feature: MA Experiment 20001906 PARAMETER Experiment Name: At_Drought_Reproduction_P Parameter: Organism Value: A. thaliana
  misc_feature: MA Experiment 20001906 PARAMETER Experiment Name: At_Drought_Reproduction_P Parameter: Plant Line Value: WS
  misc_feature: MA Experiment 20001906 PARAMETER Experiment Name: At_Drought_Reproduction_P Parameter: Timepoint (day) Value: 5
  misc_feature: MA Experiment 20001906 PARAMETER Experiment Name: At_Drought_Reproduction_P Parameter: Tissue Value: Siliques
  misc_feature: MA Experiment 20001906 PARAMETER Experiment Name: At_Drought_Reproduction_P Parameter: Treatment Value: Drought vs. No Drought
  misc_feature: MA Experiment ID: 20001908 Result: Down-regulated in Transcription
  misc_feature: MA Experiment 20001908 PARAMETER Experiment Name: At_Drought_Reproduction_P Parameter: Age (day) Value: 40
  misc_feature: MA Experiment 20001908 PARAMETER Experiment Name: At_Drought_Reproduction_P Parameter: Organism Value: A. thaliana
  misc_feature: MA Experiment 20001908 PARAMETER Experiment Name: At_Drought_Reproduction_P Parameter: Plant Line Value: WS
  misc_feature: MA Experiment 20001908 PARAMETER Experiment Name: At_Drought_Reproduction_P Parameter: Timepoint (day) Value: 10
  misc_feature: MA Experiment 20001908 PARAMETER Experiment Name: At_Drought_Reproduction_P Parameter: Tissue Value: Siliques
  misc_feature: MA Experiment 20001908 PARAMETER Experiment Name: At_Drought_Reproduction_P Parameter: Treatment Value: Drought vs. No Drought
  misc_feature: MA Experiment ID: 20001911 Result: Down-regulated in Transcription
  misc_feature: MA Experiment 20001911 PARAMETER Experiment Name: At_Drought_Reproduction_P Parameter: Age (day) Value: 40
  misc_feature: MA Experiment 20001911 PARAMETER Experiment Name: At_Drought_Reproduction_P Parameter: Organism Value: A. thaliana
  misc_feature: MA Experiment 20001911 PARAMETER Experiment Name: At_Drought_Reproduction_P Parameter: Plant Line Value: WS
  misc_feature: MA Experiment 20001911 PARAMETER Experiment Name: At_Drought_Reproduction_P Parameter: Timepoint (day) Value: 10
  misc_feature: MA Experiment 20001911 PARAMETER Experiment Name: At_Drought_Reproduction_P Parameter: Tissue Value: Flowers
  misc_feature: MA Experiment 20001911 PARAMETER Experiment Name: At_Drought_Reproduction_P Parameter: Treatment Value: Drought vs. No Drought
gcccagaattaaacgcaatccacttcaatccaaaatcccatactaaattaaaaccaacacacaggaagaaagaagaaacctctcatcttcccctctcttctgttgaagaaagcttaaacctttctgggtttcttttaactatggcgacaagggttagtttcttcttagctctggtaatgacggtggtgattcttgctccttctgtcgtctctggagaaaatgggttttccgatcttaaaatccgtactcacttgaaacgactcaacaagccagctctcaaatcgattaagagcccagatggagatatgattgactgtgttccaatcactgaccaaccagcttttgctcatcctctgctcattaatcacactgtccagatgtggccaagtttgaacccagaaagtgtatttagtgagagtaaagtttcatcaaaaaccaagaatcagcagtctaatgctatacatcagctttggcatgtgaatgggaaatgtccaaagaacacaattcccatcagaagaacgagaagacaagatctttacagagcgagttccgttgagaattacggtatgaagaatcagaagagtatccctaaacctaaatcttctgagccacctaatgtccttacacaaaatggtcatcagcacgcgataatgtatgtcgaagatggggttttctacggggctaaagcgaagataaatgtatggaagccggatgttgaaatgcctaatgagtttagcttagctcagatttgggttttaggtggaaatttcaactctgatcttaatagtattgaagctggctggcaggtcagcccacaattgtatggtgataataggaccagactcttcacttattggactagtgatgcataccaaggcacaggctgctataatcttctatgctcaggatttgttcaaatcaatagagaaatcgcaatgggtggatcaatctctcctttatcaaactatggaaactctcaatatgacatcaccatactcatctggaaggatccaaaagaaggacattggtggttacagtttggagagaaatacataataggatactggccagcttcactcttctcttacttatcagaaagtgcatcgatgatcgaatggggaggcgaagtggttaactcgcagtccgaggaaggacaacacacaaccactcagatgggaagtgggaggtttgcagaggaaggttggggaaaagcgagttacttcaagaacgttcaagtagttgatggatcgaatgaactgagaaacccggagaatcttcaagtgtttactgatcaagagaactgttacaatgtgaaaagtgggaatggaggttcttggggaagttacttctactatggtggtcctggtcgaaaccctaattgcccttaaagatttggtcgacttactcacattgcagatcattccaaatcaattgtataaaaaacatataatatatatatatacacattcttaagtatattattaatttcaggtttg

SEQ ID NO: 102286 - protein, 461 aa, Arabidopsis thaliana
  peptide (1)..(461): Ceres Seq. ID no. 13609885
  misc_feature (224)..(421): Pfam Name: Arabidopsis proteins of unknown function Pfam Description: Arabidopsis proteins of unknown function
  misc_feature (47)..(461): Homolog of NCBI NO: 18406483 NR Description: expressed protein [Arabidopsis thaliana]
  misc_feature (79)..(461): Homolog of NCBI NO: 34393554 NR Description: putative carboxyl-terminal proteinase [Oryza
  misc_feature (43)..(461): Homolog of NCBI NO: 18400044 NR Description: expressed protein [Arabidopsis thaliana] gb|AAC16072.1~gene_id:MRP15.17~strong similarity to unknown [Arabidopsis thaliana] >gi|18700165|gb|AAL77694.1|
  misc_feature (53)..(461): Homolog of NCBI NO: 21593294 NR Description: putative carboxyl-terminal peptidase [Arabidopsis
  misc_feature (70)..(461): Homolog of NCBI NO: 15222707 NR Description: expressed protein [Arabidopsis thaliana]
  misc_feature (70)..(461): Homolog of NCBI NO: 27311623 NR Description: unknown protein [Arabidopsis thaliana]
  misc_feature (77)..(460): Homolog of NCBI NO: 15241244 NR Description: expressed protein [Arabidopsis thaliana]
  misc_feature (79)..(461): Homolog of NCBI NO: 34393299 NR Description: putative DD1A protein [Oryza sativa (japonica
  misc_feature (54)..(461): Homolog of NCBI NO: 30103019 NR Description: unknown protein [Oryza sativa (japonica
  misc_feature (50)..(461): Homolog of NCBI NO: 7486433 NR Description: hypothetical protein At2g44220 [imported] - thaliana >gi|3128169|gb|AAC16073.1| hypothetical protein
PELNAIHFNPKSHTKLKPTHRKKEETSHLPLSSVEESLNLSGFLLTMATRVSFFLALVMTVVILAPSVVSGENGFSDLKIRTHLKRLNKPALKSIKSPDGDMIDCVPITDQPAFAHPLLINHTVQMWPSLNPESVFSESKVSSKTKNQQSNAIHQLWHVNGKCPKNTIPIRRTRRQDLYRASSVENYGMKNQKSIPKPKSSEPPNVLTQNGHQHAIMYVEDGVFYGAKAKINVWKPDVEMPNEFSLAQIWVLGGNFNSDLNSIEAGWQVSPQLYGDNRTRLFTYWTSDAYQGTGCYNLLCSGFVQINREIAMGGSISPLSNYGNSQYDITILIWKDPKEGHWWLQFGEKYIIGYWPASLFSYLSESASMIEWGGEVVNSQSEEGQHTTTQMGSGRFAEEGWGKASYFKNVQVVDGSNELRNPENLQVFTDQENCYNVKSGNGGSWGSYFYYGGPGRNPNCP

SEQ ID NO: 102287 - protein, 415 aa, Arabidopsis thaliana; identical to SEQ ID NO: 24820
  peptide (1)..(415): Ceres Seq. ID no. 13609886
  misc_feature (178)..(375): Pfam Name: Arabidopsis proteins of unknown function Pfam Description: Arabidopsis proteins of unknown function
  misc_feature (1)..(415): Homolog of NCBI NO: 18406483 NR Description: expressed protein [Arabidopsis thaliana]
  misc_feature (33)..(415): Homolog of NCBI NO: 34393554 NR Description: putative carboxyl-terminal proteinase [Oryza
  misc_feature (1)..(415): Homolog of NCBI NO: 18400044 NR Description: expressed protein [Arabidopsis thaliana] gb|AAC16072.1~gene_id:MRP15.17~strong similarity to unknown [Arabidopsis thaliana] >gi|18700165|gb|AAL77694.1|
  misc_feature (7)..(415): Homolog of NCBI NO: 21593294 NR Description: putative carboxyl-terminal peptidase [Arabidopsis
  misc_feature (24)..(415): Homolog of NCBI NO: 15222707 NR Description: expressed protein [Arabidopsis thaliana]
  misc_feature (24)..(415): Homolog of NCBI NO: 27311623 NR Description: unknown protein [Arabidopsis thaliana]
  misc_feature (31)..(414): Homolog of NCBI NO: 15241244 NR Description: expressed protein [Arabidopsis thaliana]
  misc_feature (33)..(415): Homolog of NCBI NO: 34393299 NR Description: putative DD1A protein [Oryza sativa (japonica
  misc_feature (8)..(415): Homolog of NCBI NO: 30103019 NR Description: unknown protein [Oryza sativa (japonica
  misc_feature (4)..(415): Homolog of NCBI NO: 7486433 NR Description: hypothetical protein At2g44220 [imported] - thaliana >gi|3128169|gb|AAC16073.1| hypothetical protein

SEQ ID NO: 102288 - protein, 403 aa, Arabidopsis thaliana; identical to SEQ ID NO: 24821
  peptide (1)..(403): Ceres Seq. ID no. 13609887
  misc_feature (166)..(363): Pfam Name: Arabidopsis proteins of unknown function Pfam Description: Arabidopsis proteins of unknown function
  misc_feature (1)..(403): Homolog of NCBI NO: 18406483 NR Description: expressed protein [Arabidopsis thaliana]
  misc_feature (21)..(403): Homolog of NCBI NO: 34393554 NR Description: putative carboxyl-terminal proteinase [Oryza
  misc_feature (1)..(403): Homolog of NCBI NO: 18400044 NR Description: expressed protein [Arabidopsis thaliana] gb|AAC16072.1~gene_id:MRP15.17~strong similarity to unknown [Arabidopsis thaliana] >gi|18700165|gb|AAL77694.1|
  misc_feature (1)..(403): Homolog of NCBI NO: 21593294 NR Description: putative carboxyl-terminal peptidase [Arabidopsis
  misc_feature (12)..(403): Homolog of NCBI NO: 15222707 NR Description: expressed protein [Arabidopsis thaliana]
  misc_feature (12)..(403): Homolog of NCBI NO: 27311623 NR Description: unknown protein [Arabidopsis thaliana]
  misc_feature (19)..(402): Homolog of NCBI NO: 15241244 NR Description: expressed protein [Arabidopsis thaliana]
  misc_feature (21)..(403): Homolog of NCBI NO: 34393299 NR Description: putative DD1A protein [Oryza sativa (japonica
  misc_feature (1)..(403): Homolog of NCBI NO: 30103019 NR Description: unknown protein [Oryza sativa (japonica
  misc_feature (1)..(403): Homolog of NCBI NO: 7486433 NR Description: hypothetical protein At2g44220 [imported] - thaliana >gi|3128169|gb|AAC16073.1| hypothetical protein

SEQ ID NO: 102289 - DNA, 937 bp, Arabidopsis thaliana
  misc_feature (1)..(937): Ceres Seq. ID no. 13609888
  misc_feature: MA Experiment ID: 108434 Result: Up-regulated in Transcription
  misc_feature: MA Experiment 108434 PARAMETER Experiment Name: At_Root_Tips_cDNA_P Parameter: Tissue Value: Root Tips
  misc_feature: MA Experiment ID: 108435 Result: Up-regulated in Transcription
  misc_feature: MA Experiment 108435 PARAMETER Experiment Name: At_stm_Mutants_cDNA_P Parameter: Plant Line Value: wt Landsburg vs stm
  misc_feature: MA Experiment 108435 PARAMETER Experiment Name: At_stm_Mutants_cDNA_P Parameter: Tissue Value: Shoot Apical Meristem Region
  misc_feature: MA Experiment ID: 108462 Result: Down-regulated in Transcription
  misc_feature: MA Experiment 108462 PARAMETER Experiment Name: At_Germinating_Seeds_cDNA_P Parameter: Age (day) Value: 2 vs. 0
  misc_feature: MA Experiment 108462 PARAMETER Experiment Name: At_Germinating_Seeds_cDNA_P Parameter: Tissue Value: Germinating Seeds
  misc_feature: MA Experiment ID: 108463 Result: Down-regulated in Transcription
  misc_feature: MA Experiment 108463 PARAMETER Experiment Name: At_Germinating_Seeds_cDNA_P Parameter: Age (day) Value: 3 vs. 0
  misc_feature: MA Experiment 108463 PARAMETER Experiment Name: At_Germinating_Seeds_cDNA_P Parameter: Tissue Value: Germinating Seeds
  misc_feature: MA Experiment ID: 108464 Result: Down-regulated in Transcription
  misc_feature: MA Experiment 108464 PARAMETER Experiment Name: At_Germinating_Seeds_cDNA_P Parameter: Age (day) Value: 4 vs. 0
  misc_feature: MA Experiment 108464 PARAMETER Experiment Name: At_Germinating_Seeds_cDNA_P Parameter: Tissue Value: Germinating Seeds
  misc_feature: MA Experiment ID: 108488 Result: Up-regulated in Transcription
  misc_feature: MA Experiment ID: 108573 Result: Down-regulated in Transcription
  misc_feature: MA Experiment 108573 PARAMETER Experiment Name: At_Drought_cDNA_P Parameter: Timepoint (hr) Value: 6
  misc_feature: MA Experiment 108573 PARAMETER Experiment Name: At_Drought_cDNA_P Parameter: Tissue Value: Aerial
  misc_feature: MA Experiment 108573 PARAMETER Experiment Name: At_Drought_cDNA_P Parameter: Treatment Value: Drought vs. No Drought
  misc_feature: MA Experiment ID: 108595 Result: Down-regulated in Transcription
  misc_feature: MA Experiment 108595 PARAMETER Experiment Name: At_Ler-pi_Ovule_cDNA_P Parameter: Plant Line Value: null
  misc_feature: MA Experiment ID: 20000234 Result: Up-regulated in Transcription
  misc_feature: MA Experiment 20000234 PARAMETER Experiment Name: At_Siliques_P Parameter: Age (day) Value: 21
  misc_feature: MA Experiment 20000234 PARAMETER Experiment Name: At_Siliques_P Parameter: Organism Value: A. thaliana
  misc_feature: MA Experiment 20000234 PARAMETER Experiment Name: At_Siliques_P Parameter: Plant Line Value: WS
  misc_feature: MA Experiment 20000234 PARAMETER Experiment Name: At_Siliques_P Parameter: Tissue Value: Less Than 5mm Siliques vs. Whole Plant
  misc_feature: MA Experiment ID: 20000495 Result: Up-regulated in Transcription
  misc_feature: MA Experiment 20000495 PARAMETER Experiment Name: At_Guard_Cells_P Parameter: Harvest Date Value: 8/2/2002
  misc_feature: MA Experiment 20000495 PARAMETER Experiment Name: At_Guard_Cells_P Parameter: Organism Value: A. thaliana
  misc_feature: MA Experiment 20000495 PARAMETER Experiment Name: At_Guard_Cells_P Parameter: Tissue Value: Guard Cells vs. Leaves
  misc_feature: MA Experiment ID: 20000794 Result: Down-regulated in Transcription
  misc_feature: MA Experiment 20000794 PARAMETER Experiment Name: At_Petals_P Parameter: Age (day) Value: 23-25 days
  misc_feature: MA Experiment 20000794 PARAMETER Experiment Name: At_Petals_P Parameter: Plant Line Value: WS
  misc_feature: MA Experiment 20000794 PARAMETER Experiment Name: At_Petals_P Parameter: Tissue Value: Petals vs. Whole plant
  misc_feature: MA Experiment ID: 20001557 Result: Up-regulated in Transcription
  misc_feature: MA Experiment 20001557 PARAMETER Experiment Name: At_Drought_Soil_Dry_P Parameter: Age (day) Value: 27
  misc_feature: MA Experiment 20001557 PARAMETER Experiment Name: At_Drought_Soil_Dry_P Parameter: Organism Value: A. thaliana
  misc_feature: MA Experiment 20001557 PARAMETER Experiment Name: At_Drought_Soil_Dry_P Parameter: Plant Line Value: WS
  misc_feature: MA Experiment 20001557 PARAMETER Experiment Name: At_Drought_Soil_Dry_P Parameter: Post Timepoint (hr) Value: 3
  misc_feature: MA Experiment 20001557 PARAMETER Experiment Name: At_Drought_Soil_Dry_P Parameter: Post-Treatment Value: Re-Water vs. No Drought
  misc_feature: MA Experiment 20001557 PARAMETER Experiment Name: At_Drought_Soil_Dry_P Parameter: Timepoint (day) Value: 13
  misc_feature: MA Experiment 20001557 PARAMETER Experiment Name: At_Drought_Soil_Dry_P Parameter: Treatment Value: Drought vs. No Drought
  misc_feature: MA Experiment ID: 20001558 Result: Up-regulated in Transcription
  misc_feature: MA Experiment 20001558 PARAMETER Experiment Name: At_Drought_Soil_Dry_P Parameter: Age (day) Value: 27
  misc_feature: MA Experiment 20001558 PARAMETER Experiment Name: At_Drought_Soil_Dry_P Parameter: Organism Value: A. thaliana
  misc_feature: MA Experiment 20001558 PARAMETER Experiment Name: At_Drought_Soil_Dry_P Parameter: Plant Line Value: WS
  misc_feature: MA Experiment 20001558 PARAMETER Experiment Name: At_Drought_Soil_Dry_P Parameter: Post Timepoint (hr) Value: 6
  misc_feature: MA Experiment 20001558 PARAMETER Experiment Name: At_Drought_Soil_Dry_P Parameter: Post-Treatment Value: Re-Water vs. No Drought
  misc_feature: MA Experiment 20001558 PARAMETER Experiment Name: At_Drought_Soil_Dry_P Parameter: Timepoint (day) Value: 13
  misc_feature: MA Experiment 20001558 PARAMETER Experiment Name: At_Drought_Soil_Dry_P Parameter: Treatment Value: Drought vs. No Drought
  misc_feature: MA Experiment ID: 20001560 Result: Up-regulated in Transcription
  misc_feature: MA Experiment 20001560 PARAMETER Experiment Name: At_Drought_Soil_Dry_P Parameter: Age (day) Value: 28
  misc_feature: MA Experiment 20001560 PARAMETER Experiment Name: At_Drought_Soil_Dry_P Parameter: Organism Value: A. thaliana
  misc_feature: MA Experiment 20001560 PARAMETER Experiment Name: At_Drought_Soil_Dry_P Parameter: Plant Line Value: WS
  misc_feature: MA Experiment 20001560 PARAMETER Experiment Name: At_Drought_Soil_Dry_P Parameter: Post Timepoint (hr) Value: None
  misc_feature: MA Experiment 20001560 PARAMETER Experiment Name: At_Drought_Soil_Dry_P Parameter: Post-Treatment Value: None
  misc_feature: MA Experiment 20001560 PARAMETER Experiment Name: At_Drought_Soil_Dry_P Parameter: Timepoint (day) Value: 14
  misc_feature: MA Experiment 20001560 PARAMETER Experiment Name: At_Drought_Soil_Dry_P Parameter: Treatment Value: Drought vs. No Drought
  misc_feature: MA Experiment ID: 20001757 Result: Up-regulated in Transcription
  misc_feature: MA Experiment 20001757 PARAMETER Experiment Name: At_50mM_NH4NO3_L-to-H_P Parameter: Timepoint (hr) Value: 6
  misc_feature: MA Experiment 20001757 PARAMETER Experiment Name: At_50mM_NH4NO3_L-to-H_P Parameter: Tissue Value: Leaf
  misc_feature: MA Experiment 20001757 PARAMETER Experiment Name: At_50mM_NH4NO3_L-to-H_P Parameter: Treatment Value: 50mM NH4NO3 vs 100mM Mannitol
gttttgtcctccttctacgccgcacactatctcttcctctctctcagacgagatttcctcttcatctcaagagaaatggctgaatccaaggtagtggttccagagtctgtgctaaagaagatcaagaggcaagaggaatgggcattggccaagaaagatgaagctgtagctgctaagaagaagagtgttgaggcccgcaagcttatcttcaagagagctgagcagtatgccaaagaatacgctgagaaggataacgagttgatccgattgaagcgggaggctaagttgaaaggaggtttctacgttgaccctgaggctaagttgctctttatcattcgtatccgtggtatcaatgccattgacccaaaaaccaagaagattctgcagctcctgcgtttgagacagatcttcaatggtgtgtttcttaaggtgaacaaggcaacagtaaacatgctgcgccgagttgaaccatacgtgacttacggatacccaaacttgaagagcgttaaggaactgatctacaaaagaggttatggaaagctgaaccaccagaggatagcacttactgacaactccattgtggatcaggctctcggaaagcatgggatcatctgcgttgaggatctcatccacgagatcatgactgttggacctcacttcaaggaagccaacaacttcctgtggccattccaattgaaggcaccactcggtggccttaagaagaagagaaaccactacgtcgaaggtggtgatgctggaaacagggagaatttcatcaacgagcttgtcaggagaatgaattgatgaaagcttccttctttatctttgcaaatttcaaagattttgggaccgagtttttttttttttgttcaagttatcagagacttgtgatcttttatccgagataggctttttatgactaatcatgttattttcc

SEQ ID NO: 102290 - protein, 267 aa, Arabidopsis thaliana; identical to SEQ ID NO: 97854
  peptide (1)..(267): Ceres Seq. ID no. 13609889
  misc_feature (107)..(159): Pfam Name: Ribosomal protein L30p/L7e Pfam Description: Ribosomal protein L30p/L7e
  misc_feature (25)..(267): Homolog of NCBI NO: 30689623 NR Description: 60S ribosomal protein L7 (RPL7C) [Arabidopsis >gi|6174958|sp|Q42208|RL7_ARATH 60S ribosomal protein L7
  misc_feature (26)..(267): Homolog of NCBI NO: 30689617 NR Description: 60S ribosomal protein L7 (RPL7C) [Arabidopsis >gi|15450713|gb|AAK96628.1| At2g44120/F6E13.25 [Arabidopsis >gi|17386142|gb|AAL38617.1|AF446884_1 At2g44120/F6E13.25
  misc_feature (26)..(267): Homolog of NCBI NO: 27311547 NR Description: Unknown protein [Arabidopsis thaliana]
  misc_feature (26)..(267): Homolog of NCBI NO: 15226212 NR Description: 60S ribosomal protein L7 (RPL7B) [Arabidopsis
  misc_feature (27)..(267): Homolog of NCBI NO: 15231288 NR Description: 60S ribosomal protein L7 (RPL7D) [Arabidopsis >gi|11994560|dbj|BAB02600.1| 60S ribosomal protein L7 thaliana] >gi|14532552|gb|AAK64004.1| AT3g13580/K20M4_2
  misc_feature (26)..(267): Homolog of NCBI NO: 445613 NR Description: ribosomal protein L7
  misc_feature (22)..(267): Homolog of NCBI NO: 38637548 NR Description: putative 60S ribosomal protein L7 [Oryza sativa
  misc_feature (29)..(267): Homolog of NCBI NO: 38346542 NR Description: OSJNBa0035M09.3 [Oryza sativa (japonica
  misc_feature (33)..(266): Homolog of NCBI NO: 28630259 NR Description: ribosomal protein L7 [Branchiostoma lanceolatum]
  misc_feature (26)..(267): Homolog of NCBI NO: 11383729 NR Description: ribosomal protein L7, cytosolic [validated] - rat

SEQ ID NO: 102291 - protein, 242 aa, Arabidopsis thaliana; identical to SEQ ID NO: 23649
  peptide (1)..(242): Ceres Seq. ID no. 13609890
  misc_feature (82)..(134): Pfam Name: Ribosomal protein L30p/L7e Pfam Description: Ribosomal protein L30p/L7e
  misc_feature (1)..(242): Homolog of NCBI NO: 30689623 NR Description: 60S ribosomal protein L7 (RPL7C) [Arabidopsis >gi|6174958|sp|Q42208|RL7_ARATH 60S ribosomal protein L7
  misc_feature (1)..(242): Homolog of NCBI NO: 30689617 NR Description: 60S ribosomal protein L7 (RPL7C) [Arabidopsis >gi|15450713|gb|AAK96628.1| At2g44120/F6E13.25 [Arabidopsis >gi|17386142|gb|AAL38617.1|AF446884_1 At2g44120/F6E13.25
  misc_feature (1)..(242): Homolog of NCBI NO: 27311547 NR Description: Unknown protein [Arabidopsis thaliana]
  misc_feature (1)..(242): Homolog of NCBI NO: 15226212 NR Description: 60S ribosomal protein L7 (RPL7B) [Arabidopsis
  misc_feature (2)..(242): Homolog of NCBI NO: 15231288 NR Description: 60S ribosomal protein L7 (RPL7D) [Arabidopsis >gi|11994560|dbj|BAB02600.1| 60S ribosomal protein L7 thaliana] >gi|14532552|gb|AAK64004.1| AT3g13580/K20M4_2
  misc_feature (1)..(242): Homolog of NCBI NO: 445613 NR Description: ribosomal protein L7
  misc_feature (1)..(242): Homolog of NCBI NO: 38637548 NR Description: putative 60S ribosomal protein L7 [Oryza sativa
  misc_feature (4)..(242): Homolog of NCBI NO: 38346542 NR Description: OSJNBa0035M09.3 [Oryza sativa (japonica
  misc_feature (8)..(241): Homolog of NCBI NO: 28630259 NR Description: ribosomal protein L7 [Branchiostoma lanceolatum]
  misc_feature (1)..(242): Homolog of NCBI NO: 11383729 NR Description: ribosomal protein L7, cytosolic [validated] - rat

SEQ ID NO: 102292 - DNA, 1369 bp, Arabidopsis thaliana
  misc_feature (1)..(1369): Ceres Seq. ID no. 13609891
atgagattctctctttctcccgtacgtccgcatagtgtagtagtaccttcactaccaaaacaggacgtcgtttcttatataagtggtacgacgtcgaatcgtcaatgtcgatgtgtacttacacttccttctccttcagtttccacttcccgaccaccggttttacccaaaccggaaacctgggagagtttgctgctaaaccatgatcaaattccaggcgaattctcacccactggttcgagtatcccggttaagcttggccggagatggatggagtatcaggggcttcaaaattgggacggtcttttagacccattggacgacaatctccggcgagagattctccggtacggtcaatttgtcgaatcggcttatcaagcatttgatttcgatccttcctctccaacctacgggacatgccggtttccgaggagcacgttgttagagcgatccggtttacccaactccggttatcgactaacgaagaaccttcgtgccacgtcaggtattaacttgccacgttggattgagaaagcgccaagctggatggctacacaatctagctggattggttacgtggcagtttgccaggacaaagaagagatctcgcggcttgggcgtagagacgtcgtcatctccttccgtggaaccgccacgtgtctcgagtggttagagaaccttcgcgccacgctgactcatctccctaatgggcctactggagcaaatctaaacgggtctaactctgggcccatggttgagagcgggtttttaagcttgtatacttcaggtgttcacagtttgagagacatggtaagagaagagatcgcaaggctactccaatcttacggcgacgagccgttaagtgtaacgataaccggtcacagcctcggcgctgcgatcgcgacactagcagcttacgatatcaaaacgacgtttaaacgtgcgcctatggttaccgtaatatctttcggaggtccacgtgtcggaaacagatgctttcggaaactccttgagaagcaaggcacgaaggttctaagaatcgtgaactccgacgacgtcatcaccaaagttcctggagttgttttagaaaacagagagcaagataacgttaagatgacagcgtcgataatgccgagctggatacagagacgcgtggaggagacgccgtgggtttacgctgaaatcggtaaggagcttcggctgagtagccgtgactcgccgcacttgagcagcatcaatgtggccacgtgtcatgagctgaaaacgtatttacatttggtagacgggtttgtgagctccacgtgtccattcagagaaacagctcggagagttctccatagatgaagattcattgatccgacattcgtaa

SEQ ID NO: 102293 - protein, 447 aa, Arabidopsis thaliana
  peptide (1)..(447): Ceres Seq. ID no. 13609892
  misc_feature (1)..(447): Homolog of NCBI NO: 16215706 NR Description: DEFECTIVE IN ANTHER DEHISCENCE1 [Arabidopsis
  misc_feature (1)..(447): Homolog of NCBI NO: 24898901 NR Description: DAD1 [Brassica rapa]
  misc_feature (91)..(447): Homolog of NCBI NO: 15224963 NR Description: defective in anther dehiscence1 [Arabidopsis
  misc_feature (85)..(447): Homolog of NCBI NO: 7488220 NR Description: probable triacylglycerol lipase - Arabidopsis >gi|2245036|emb|CAB10455.1| triacylglycerol lipase like protein thaliana] >gi|7268433|emb|CAB80953.1| triacylglycerol lipase like
  misc_feature (85)..(447): Homolog of NCBI NO: 18414755 NR Description: lipase (class 3) family [Arabidopsis thaliana]
  misc_feature (65)..(360): Homolog of NCBI NO: 14140134 NR Description: lipase-like protein [Oryza sativa]
  misc_feature (384)..(447): Homolog of NCBI NO: 14140134 NR Description: lipase-like protein [Oryza sativa]
  misc_feature (28)..(447): Homolog of NCBI NO: 37536870 NR Description: putative lipase [Oryza sativa (japonica
  misc_feature (85)..(432): Homolog of NCBI NO: 30684625 NR Description: lipase (class 3) family [Arabidopsis thaliana]
  misc_feature (85)..(430): Homolog of NCBI NO: 18402385 NR Description: lipase (class 3) family [Arabidopsis thaliana] putative lipase [Arabidopsis thaliana]
MRFSLSPVRPHSVVVPSLPKQDVVSYISGTTSNRQCRCVLTLPSPSVSTSRPPVLPKPETWESLLLNHDQIPGEFSPTGSSIPVKLGRRWMEYQGLQNWDGLLDPLDDNLRREILRYGQFVESAYQAFDFDPSSPTYGTCRFPRSTLLERSGLPNSGYRLTKNLRATSGINLPRWIEKAPSWMATQSSWIGYVAVCQDKEEISRLGRRDVVISFRGTATCLEWLENLRATLTHLPNGPTGANLNGSNSGPMVESGFLSLYTSGVHSLRDMVREEIARLLQSYGDEPLSVTITGHSLGAAIATLAAYDIKTTFKRAPMVTVISFGGPRVGNRCFRKLLEKQGTKVLRIVNSDDVITKVPGVVLENREQDNVKMTASIMPSWIQRRVEETPWVYAEIGKELRLSSRDSPHLSSINVATCHELKTYLHLVDGFVSSTCPFRETARRVLHR

SEQ ID NO: 102294 - protein, 357 aa, Arabidopsis thaliana; identical to SEQ ID NO: 72106
  peptide (1)..(357): Ceres Seq. ID no. 13609893
  misc_feature (1)..(357): Homolog of NCBI NO: 16215706 NR Description: DEFECTIVE IN ANTHER DEHISCENCE1 [Arabidopsis
  misc_feature (1)..(357): Homolog of NCBI NO: 24898901 NR Description: DAD1 [Brassica rapa]
  misc_feature (1)..(357): Homolog of NCBI NO: 15224963 NR Description: defective in anther dehiscence1 [Arabidopsis
  misc_feature (1)..(357): Homolog of NCBI NO: 7488220 NR Description: probable triacylglycerol lipase - Arabidopsis >gi|2245036|emb|CAB10455.1| triacylglycerol lipase like protein thaliana] >gi|7268433|emb|CAB80953.1| triacylglycerol lipase like
  misc_feature (1)..(357): Homolog of NCBI NO: 18414755 NR Description: lipase (class 3) family [Arabidopsis thaliana]
  misc_feature (1)..(270): Homolog of NCBI NO: 14140134 NR Description: lipase-like protein [Oryza sativa]
  misc_feature (294)..(357): Homolog of NCBI NO: 14140134 NR Description: lipase-like protein [Oryza sativa]
  misc_feature (1)..(357): Homolog of NCBI NO: 37536870 NR Description: putative lipase [Oryza sativa (japonica
  misc_feature (1)..(342): Homolog of NCBI NO: 30684625 NR Description: lipase (class 3) family [Arabidopsis thaliana]
  misc_feature (1)..(340): Homolog of NCBI NO: 18402385 NR Description: lipase (class 3) family [Arabidopsis thaliana] putative lipase [Arabidopsis thaliana]

SEQ ID NO: 102295 - protein, 265 aa, Arabidopsis thaliana; identical to SEQ ID NO: 72107
  peptide (1)..(265): Ceres Seq. ID no. 13609894
  misc_feature (1)..(265): Homolog of NCBI NO: 16215706 NR Description: DEFECTIVE IN ANTHER DEHISCENCE1 [Arabidopsis
  misc_feature (1)..(265): Homolog of NCBI NO: 24898901 NR Description: DAD1 [Brassica rapa]
  misc_feature (1)..(265): Homolog of NCBI NO: 15224963 NR Description: defective in anther dehiscence1 [Arabidopsis
  misc_feature (1)..(265): Homolog of NCBI NO: 7488220 NR Description: probable triacylglycerol lipase - Arabidopsis >gi|2245036|emb|CAB10455.1| triacylglycerol lipase like protein thaliana] >gi|7268433|emb|CAB80953.1| triacylglycerol lipase like
  misc_feature (1)..(265): Homolog of NCBI NO: 18414755 NR Description: lipase (class 3) family [Arabidopsis thaliana]
  misc_feature (1)..(178): Homolog of NCBI NO: 14140134 NR Description: lipase-like protein [Oryza sativa]
  misc_feature (202)..(265): Homolog of NCBI NO: 14140134 NR Description: lipase-like protein [Oryza sativa]
  misc_feature (1)..(265): Homolog of NCBI NO: 37536870 NR Description: putative lipase [Oryza sativa (japonica
  misc_feature (1)..(250): Homolog of NCBI NO: 30684625 NR Description: lipase (class 3) family [Arabidopsis thaliana]
  misc_feature (1)..(248): Homolog of NCBI NO: 18402385 NR Description: lipase (class 3) family [Arabidopsis thaliana] putative lipase [Arabidopsis thaliana]

SEQ ID NO: 102296 - DNA, 1299 bp, Arabidopsis thaliana
  misc_feature (1)..(1299): Ceres Seq. ID no. 13609902
  misc_feature: MA Experiment ID: 20000113 Result: Down-regulated in Transcription
  misc_feature: MA Experiment 20000113 PARAMETER Experiment Name: At_42deg_Heat_cDNA_P Parameter: Temperature (deg C) Value: 42 vs. 22
  misc_feature: MA Experiment 20000113 PARAMETER Experiment Name: At_42deg_Heat_cDNA_P Parameter: Timepoint (hr) Value: 8
  misc_feature: MA Experiment 20000113 PARAMETER Experiment Name: At_42deg_Heat_cDNA_P Parameter: Tissue Value: Aerial
  misc_feature: MA Experiment ID: 20000224 Result: Down-regulated in Transcription
acagggaaaagcagagcactctttatctcttcttctctctttcttctactctgtgatcaaactatcgaagaaaaaacaaaccctagatttatccgcccctcttcttcctctgatgataagaaagtcgaagactttgagaatctaaagctgaaaaattttgttttttttcattgagggaatcgaatcgagttatgtacaaggatcggagtggaggaggaataatgggtggtggtggatcatcgagatcggagatccttggtggagctattgatcggaaacgaatcaatgatgctttagacaaacatcttaagaaatcttcaccttctacatctagggttttcacttctaaggacaaagattctgtcccttctacttcaactgctaaatctcagcttcattctcgttcccccgatgttgaatctgacacggatagtgaaggatcagatgtgagtggttcagaaggtgatgatacctcttggatctcatggttttgtaatttgagagggaatgagtttttctgtgaagtagatgaagattatatacaagatgatttcaatctctgtggtttgagtggtcaagttccttactatgattatgcacttgatctcattttagatgttgaatcatcaaatggtgatatgtttactgaagaacagcatgagatggtggaatcagctgctgagatgttatatggtcttattcatgttcgttatattctcactactaaaggaatggctgctatgatggagaagtataagaattatgatttcgggagatgccccagagttttctgttgcggacagtcttgtcttccggttggccaatctgatatcccgaggtcgagcactgtgaagatatactgcccaaaatgcgaggatatttactacccgcgatctaaataccaagacattgatggagcttactttggaactactttccctcatttgtttctcatggcctatgggaacatgaaaccgcagaagccggctcaaaactacgttcctaagatctttggctttaaggtacacaacaaacaatgatactctctcctctcaacagtcttgtggttgaatacaatctcggtggctaaaccaccattcttctgatggtcacgggtttgaaatggatgatactaaactgcgtttggaggatgagaagagctaatgaagaaaggtcgacacttaaaagtttttcactatgtaatctcaaaagttctaagtagaatcttcaacatagaaccgttctttgatgggtcttgggaaattctttacctgtgagtaatcaattaaatcatttacc

SEQ ID NO: 102297 - protein, 282 aa, Arabidopsis thaliana
  peptide (1)..(282): Ceres Seq. ID no. 13609903
  misc_feature (92)..(269): Pfam Name: Casein kinase II regulatory subunit Pfam Description: Casein kinase II regulatory subunit
  misc_feature (1)..(282): Homolog of NCBI NO: 30689795 NR Description: casein kinase II beta chain, putative thaliana] >gi|15529282|gb|AAK97735.1| At2g44680/F16B22.17 thaliana] >gi|16974421|gb|AAL31136.1| At2g44680/F16B22.17 kinase
  misc_feature (1)..(282): Homolog of NCBI NO: 15224934 NR Description: casein kinase II beta chain, putative
  misc_feature (1)..(279): Homolog of NCBI NO: 15232283 NR Description: casein kinase II beta chain, putative
  misc_feature (1)..(279): Homolog of NCBI NO: 21261784 NR Description: protein kinase Ck2 regulatory subunit 2
  misc_feature (1)..(279): Homolog of NCBI NO: 34901776 NR Description: OJ1058_B11.17 [Oryza sativa (japonica >gi|29243371|dbj|BAC66224.1| putative protein kinase CK2
  misc_feature (23)..(279): Homolog of NCBI NO: 11527004 NR Description: protein kinase CK2 regulatory subunit CK2B3 [Zea
  misc_feature (15)..(281): Homolog of NCBI NO: 37536920 NR Description: putative casein kinase II beta subunit [Oryza
  misc_feature (26)..(279): Homolog of NCBI NO: 11527002 NR Description: protein kinase CK2 regulatory subunit CK2B2 [Zea
  misc_feature (1)..(279): Homolog of NCBI NO: 15236597 NR Description: casein kinase II beta chain, putative thaliana] >gi|729882|sp|P40229|KC2C_ARATH Casein kinase II beta'
  misc_feature (1)..(279): Homolog of NCBI NO: 15238013 NR Description: casein kinase II beta chain, putative thaliana] >gi|729880|sp|P40228|KC2B_ARATH Casein kinase II beta
MYKDRSGGGIMGGGGSSRSEILGGAIDRKRINDALDKHLKKSSPSTSRVFTSKDKDSVPSTSTAKSQLHSRSPDVESDTDSEGSDVSGSEGDDTSWISWFCNLRGNEFFCEVDEDYIQDDFNLCGLSGQVPYYDYALDLILDVESSNGDMFTEEQHEMVESAAEMLYGLIHVRYILTTKGMAAMMEKYKNYDFGRCPRVFCCGQSCLPVGQSDIPRSSTVKIYCPKCEDIYYPRSKYQDIDGAYFGTTFPHLFLMAYGNMKPQKPAQNYVPKIFGFKVHNKQ

SEQ ID NO: 102298 - protein, 272 aa, Arabidopsis thaliana
  peptide (1)..(272): Ceres Seq. ID no. 13609904
  misc_feature (82)..(259): Pfam Name: Casein kinase II regulatory subunit Pfam Description: Casein kinase II regulatory subunit
  misc_feature (1)..(272): Homolog of NCBI NO: 30689795 NR Description: casein kinase II beta chain, putative thaliana] >gi|15529282|gb|AAK97735.1| At2g44680/F16B22.17 thaliana] >gi|16974421|gb|AAL31136.1| At2g44680/F16B22.17 kinase
  misc_feature (1)..(272): Homolog of NCBI NO: 15224934 NR Description: casein kinase II beta chain, putative
  misc_feature (1)..(269): Homolog of NCBI NO: 15232283 NR Description: casein kinase II beta chain, putative
  misc_feature (1)..(269): Homolog of NCBI NO: 21261784 NR Description: protein kinase Ck2 regulatory subunit 2
  misc_feature (1)..(269): Homolog of NCBI NO: 34901776 NR Description: OJ1058_B11.17 [Oryza sativa (japonica >gi|29243371|dbj|BAC66224.1| putative protein kinase CK2
  misc_feature (13)..(269): Homolog of NCBI NO: 11527004 NR Description: protein kinase CK2 regulatory subunit CK2B3 [Zea
  misc_feature (5)..(271): Homolog of NCBI NO: 37536920 NR Description: putative casein kinase II beta subunit [Oryza
  misc_feature (16)..(269): Homolog of NCBI NO: 11527002 NR Description: protein kinase CK2 regulatory subunit CK2B2 [Zea
  misc_feature (1)..(269): Homolog of NCBI NO: 15236597 NR Description: casein kinase II beta chain, putative thaliana] >gi|729882|sp|P40229|KC2C_ARATH Casein kinase II beta'
  misc_feature (1)..(269): Homolog of NCBI NO: 15238013 NR Description: casein kinase II beta chain, putative thaliana] >gi|729880|sp|P40228|KC2B_ARATH Casein kinase II beta
MGGGGSSRSEILGGAIDRKRINDALDKHLKKSSPSTSRVFTSKDKDSVPSTSTAKSQLHSRSPDVESDTDSEGSDVSGSEGDDTSWISWFCNLRGNEFFCEVDEDYIQDDFNLCGLSGQVPYYDYALDLILDVESSNGDMFTEEQHEMVESAAEMLYGLIHVRYILTTKGMAAMMEKYKNYDFGRCPRVFCCGQSCLPVGQSDIPRSSTVKIYCPKCEDIYYPRSKYQDIDGAYFGTTFPHLFLMAYGNMKPQKPAQNYVPKIFGFKVHNKQ

SEQ ID NO: 102299 - DNA, 1237 bp, Arabidopsis thaliana
  misc_feature (1)..(1237): Ceres Seq. ID no. 13609940
  misc_feature: MA Experiment ID: 20000173 Result: Down-regulated in Transcription
  misc_feature: MA Experiment 20000173 PARAMETER Experiment Name: At_42deg_Heat_P Parameter: Age (day) Value: 14
  misc_feature: MA Experiment 20000173 PARAMETER Experiment Name: At_42deg_Heat_P Parameter: Organism Value: A. thaliana
  misc_feature: MA Experiment 20000173 PARAMETER Experiment Name: At_42deg_Heat_P Parameter: Plant Line Value: WS
  misc_feature: MA Experiment 20000173 PARAMETER Experiment Name: At_42deg_Heat_P Parameter: Temperature (deg C) Value: 42 vs. 22
  misc_feature: MA Experiment 20000173 PARAMETER Experiment Name: At_42deg_Heat_P Parameter: Timepoint (hr) Value: 6
  misc_feature: MA Experiment 20000173 PARAMETER Experiment Name: At_42deg_Heat_P Parameter: Tissue Value: Aerial
  misc_feature: MA Experiment ID: 20000184 Result: Down-regulated in Transcription
  misc_feature: MA Experiment 20000184 PARAMETER Experiment Name: At_Shoots__P Parameter: Age (day) Value: 7
  misc_feature: MA Experiment 20000184 PARAMETER Experiment Name: At_Shoots__P Parameter: Tissue Value: Shoots vs. Whole Plant
  misc_feature: MA Experiment ID: 20000437 Result: Up-regulated in Transcription
  misc_feature: MA Experiment 20000437 PARAMETER Experiment Name: At_Drought_P Parameter: Age (day) Value: 8
  misc_feature: MA Experiment 20000437 PARAMETER Experiment Name: At_Drought_P Parameter: Organism Value: A. thaliana
  misc_feature: MA Experiment 20000437 PARAMETER Experiment Name: At_Drought_P Parameter: Plant Line Value: WS
  misc_feature: MA Experiment 20000437 PARAMETER Experiment Name: At_Drought_P Parameter: Timepoint (hr) Value: 24
  misc_feature: MA Experiment 20000437 PARAMETER Experiment Name: At_Drought_P Parameter: Tissue Value: Whole Plant
  misc_feature: MA Experiment 20000437 PARAMETER Experiment Name: At_Drought_P Parameter: Treatment Value: Drought vs. No Drought
gaaaaaaaaaatccaatttagaaaaccgcgcgttggagggaaagccatagaaaactaaaagataacaaacattttaacaaacccaaacccaaaaattctcaaggaggccgaagaagaagaagaagaaatgagcgttaatggtgagaacaaggtctcaggaggagatagttcatcttcagatcgacctgttagagtctacgccgatgggatcttcgatttgttccatttcggccacgctcgtgccatcgaacaagccaaaaaatcgttcccgaatacgtatctgcttgttggatgttgcaatgacgaaattacgaacaaattcaaggggaaaactgtgatgactgaatctgagcgatacgaatctcttcgacattgcaagtgggttgatgaagtgattccagatgcaccatgggttcttacaacagagtttcttgataagcataagatagattacgtagctcacgatgctcttccctatgcggatactagtggagctggaaatgatgtttatgagtttgtaaagtcgattgggaagtttaaggagactaaacgaacagaggggatatcgacatctgatataatcatgagaatagtgaaagattataaccagtatgtgttgcgtaatcctggaccgaggtattcaagagaagaactctcgtgtcagctcgaggtacgagaagaggcttagagtgaatatgagattgaagaaactacaagagaaagttaaagaacaacaagaaaagatacaaaccgtagcaaaaactgctgggatgcaccatgatgagtggcttgaaaatgctgatcgttgggtggctggatttcttgaaatgtttgaggaaggttgtcataaaatgggaacagccatcagagatgggattcagcaacggctaatgaggcaagaatcggaagagaaccggcgattgcttcaaaatggactgacgatttccaaagacaatgacgatgaacaaatgtctgatgacaacgagtttgcagaagaaagactgcgtcaatgtgagcaacaaagggattgaaacagtaaagaaatgagagattttgggtcatggttgaagtatttccagatacagaaccaaaatctactagatttcaccagtaatggtattaggcttgtttattcaactgtacatcaaactctgtttcaaaatctctacttgtgtctaaaactcaaatgcatcagaaatcaaaagcagtcatggatatatctatgatcaaacactcc

SEQ ID NO: 102300 - protein, 186 aa, Arabidopsis thaliana
  peptide (1)..(186): Ceres Seq. ID no. 13609941
  misc_feature (1)..(183): Homolog of NCBI NO: 25288640 NR Description: probable phosphocholine cytidylyltransferase - Arabidopsis thaliana >gi|5280991|emb|CAB45996.1| putative cytidylyltransferase [Arabidopsis thaliana]
  misc_feature (1)..(181): Homolog of NCBI NO: 30683147 NR Description: cholinephosphate cytidylyltransferase transferase/CTP:phosphocholine cytidylyltransferase), putative
  misc_feature (1)..(185): Homolog of NCBI NO: 21668498 NR Description: CTP:phosphorylcholine cytidylyltransferase thaliana] >gi|21668500|dbj|BAC01277.1| CTP:phosphorylcholine
  misc_feature (1)..(181): Homolog of NCBI NO: 7488145 NR Description: probable phosphocholine cytidylyltransferase -
  misc_feature (4)..(185): Homolog of NCBI NO: 7488446 NR Description: choline-phosphate cytidylyltransferase (EC
  misc_feature (4)..(176): Homolog of NCBI NO: 7488485 NR Description: probable choline-phosphate cytidylyltransferase
  misc_feature (1)..(185): Homolog of NCBI NO: 7488483 NR Description: probable choline-phosphate cytidylyltransferase
  misc_feature (14)..(185): Homolog of NCBI NO: 7488484 NR Description: probable choline-phosphate cytidylyltransferase
  misc_feature (14)..(185): Homolog of NCBI NO: 15225218 NR Description: cholinephosphate cytidylyltransferase transferase/CTP:phosphocholine cytidylyltransferase), putative thaliana] >gi|25288639|pir||H84730 probable
  misc_feature (17)..(185): Homolog of NCBI NO: 7488791 NR Description: choline-phosphate cytidylyltransferase (EC - garden pea >gi|1657382|emb|CAA70317.1| cholinephosphate
MSVNGENKVSGGDSSSSDRPVRVYADGIFDLFHFGHARAIEQAKKSFPNTYLLVGCCNDEITNKFKGKTVMTESERYESLRHCKWVDEVIPDAPWVLTTEFLDKHKIDYVAHDALPYADTSGAGNDVYEFVKSIGKFKETKRTEGISTSDIIMRIVKDYNQYVLRNPGPRYSREELSCQLEVREEA

SEQ ID NO: 102301 - protein, 139 aa, Arabidopsis thaliana
  peptide (1)..(139): Ceres Seq. ID no. 13609942
  misc_feature (4)..(139): Homolog of NCBI NO: 25288640 NR Description: probable phosphocholine cytidylyltransferase - Arabidopsis thaliana >gi|5280991|emb|CAB45996.1| putative cytidylyltransferase [Arabidopsis thaliana]
  misc_feature (22)..(139): Homolog of NCBI NO: 30683147 NR Description: cholinephosphate cytidylyltransferase transferase/CTP:phosphocholine cytidylyltransferase), putative
  misc_feature (6)..(129): Homolog of NCBI NO: 21668498 NR Description: CTP:phosphorylcholine cytidylyltransferase thaliana] >gi|21668500|dbj|BAC01277.1| CTP:phosphorylcholine
  misc_feature (20)..(139): Homolog of NCBI NO: 7488145 NR Description: probable phosphocholine cytidylyltransferase -
  misc_feature (6)..(139): Homolog of NCBI NO: 7488446 NR Description: choline-phosphate cytidylyltransferase (EC
  misc_feature (6)..(139): Homolog of NCBI NO: 7488485 NR Description: probable choline-phosphate cytidylyltransferase
  misc_feature (6)..(123): Homolog of NCBI NO: 7488483 NR Description: probable choline-phosphate cytidylyltransferase
  misc_feature (6)..(123): Homolog of NCBI NO: 7488484 NR Description: probable choline-phosphate cytidylyltransferase
  misc_feature (6)..(138): Homolog of NCBI NO: 15225218 NR Description: cholinephosphate cytidylyltransferase transferase/CTP:phosphocholine cytidylyltransferase), putative thaliana] >gi|25288639|pir||H84730 probable
  misc_feature (6)..(128): Homolog of NCBI NO: 7488791 NR Description: choline-phosphate cytidylyltransferase (EC - garden pea >gi|1657382|emb|CAA70317.1| cholinephosphate
MCCVILDRGIQEKNSRVSSRYEKRLRVNMRLKKLQEKVKEQQEKIQTVAKTAGMHHDEWLENADRWVAGFLEMFEEGCHKMGTAIRDGIQQRLMRQESEENRRLLQNGLTISKDNDDEQMSDDNEFAEERLRQCEQQRD

SEQ ID NO: 102302 - protein, 116 aa, Arabidopsis thaliana
  peptide (1)..(116): Ceres Seq. ID no. 13609943
  misc_feature (1)..(113): Homolog of NCBI NO: 25288640 NR Description: probable phosphocholine cytidylyltransferase - Arabidopsis thaliana >gi|5280991|emb|CAB45996.1| putative cytidylyltransferase [Arabidopsis thaliana]
  misc_feature (1)..(111): Homolog of NCBI NO: 30683147 NR Description: cholinephosphate cytidylyltransferase transferase/CTP:phosphocholine cytidylyltransferase), putative
  misc_feature (1)..(115): Homolog of NCBI NO: 21668498 NR Description: CTP:phosphorylcholine cytidylyltransferase thaliana] >gi|21668500|dbj|BAC01277.1| CTP:phosphorylcholine
  misc_feature (1)..(111): Homolog of NCBI NO: 7488145 NR Description: probable phosphocholine cytidylyltransferase -
  misc_feature (1)..(115): Homolog of NCBI NO: 7488446 NR Description: choline-phosphate cytidylyltransferase (EC
  misc_feature (1)..(106): Homolog of NCBI NO: 7488485 NR Description: probable choline-phosphate cytidylyltransferase
  misc_feature (1)..(115): Homolog of NCBI NO: 7488483 NR Description: probable choline-phosphate cytidylyltransferase
  misc_feature (1)..(115): Homolog of NCBI NO: 7488484 NR Description: probable choline-phosphate cytidylyltransferase
  misc_feature (1)..(115): Homolog of NCBI NO: 15225218 NR Description: cholinephosphate cytidylyltransferase transferase/CTP:phosphocholine cytidylyltransferase), putative thaliana] >gi|25288639|pir||H84730 probable
  misc_feature (1)..(115): Homolog of NCBI NO: 7488791 NR Description: choline-phosphate cytidylyltransferase (EC - garden pea >gi|1657382|emb|CAA70317.1| cholinephosphate
MTESERYESLRHCKWVDEVIPDAPWVLTTEFLDKHKIDYVAHDALPYADTSGAGNDVYEFVKSIGKFKETKRTEGISTSDIIMRIVKDYNQYVLRNPGPRYSREELSCQLEVREEA

SEQ ID NO: 102303 - DNA, 1677 bp, Arabidopsis thaliana
  misc_feature (1)..(1677): Ceres Seq. ID no. 13609944
  misc_feature: MA Experiment ID: 108463 Result: Up-regulated in Transcription
  misc_feature: MA Experiment 108463 PARAMETER Experiment Name: At_Germinating_Seeds_cDNA_P Parameter: Age (day) Value: 3 vs. 0
  misc_feature: MA Experiment 108463 PARAMETER Experiment Name: At_Germinating_Seeds_cDNA_P Parameter: Tissue Value: Germinating Seeds
  misc_feature: MA Experiment ID: 108464 Result: Up-regulated in Transcription
  misc_feature: MA Experiment 108464 PARAMETER Experiment Name: At_Germinating_Seeds_cDNA_P Parameter: Age (day) Value: 4 vs. 0
  misc_feature: MA Experiment 108464 PARAMETER Experiment Name: At_Germinating_Seeds_cDNA_P Parameter: Tissue Value: Germinating Seeds
  misc_feature: MA Experiment ID: 108569 Result: Up-regulated in Transcription
  misc_feature: MA Experiment 108569 PARAMETER Experiment Name: At_0.001%_MeJA__cDNA_P Parameter: Timepoint (hr) Value: 6
  misc_feature: MA Experiment 108569 PARAMETER Experiment Name: At_0.001%_MeJA__cDNA_P Parameter: Tissue Value: Aerial
  misc_feature: MA Experiment 108569 PARAMETER Experiment Name: At_0.001%_MeJA__cDNA_P Parameter: Treatment Value: 0.001% MeJA vs. No Treatment
  misc_feature: MA Experiment ID: 108572 Result: Up-regulated in Transcription
  misc_feature: MA Experiment 108572 PARAMETER Experiment Name: At_Drought_cDNA_P Parameter: Timepoint (hr) Value: 1
  misc_feature: MA Experiment 108572 PARAMETER Experiment Name: At_Drought_cDNA_P Parameter: Tissue Value: Aerial
  misc_feature: MA Experiment 108572 PARAMETER Experiment Name: At_Drought_cDNA_P Parameter: Treatment Value: Drought vs. No Drought
  misc_feature: MA Experiment ID: 108573 Result: Up-regulated in Transcription
  misc_feature: MA Experiment 108573 PARAMETER Experiment Name: At_Drought_cDNA_P Parameter: Timepoint (hr) Value: 6
  misc_feature: MA Experiment 108573 PARAMETER Experiment Name: At_Drought_cDNA_P Parameter: Tissue Value: Aerial
  misc_feature: MA Experiment 108573 PARAMETER Experiment Name: At_Drought_cDNA_P Parameter: Treatment Value: Drought vs. No Drought
  misc_feature: MA Experiment ID: 108574 Result: Up-regulated in Transcription
  misc_feature: MA Experiment 108574 PARAMETER Experiment Name: At_Wounding__cDNA_P Parameter: Timepoint (hr) Value: 1
  misc_feature: MA Experiment 108574 PARAMETER Experiment Name: At_Wounding__cDNA_P Parameter: Tissue Value: Aerial
  misc_feature: MA Experiment 108574 PARAMETER Experiment Name: At_Wounding__cDNA_P Parameter: Treatment Value: Wounding vs. No Wounding
  misc_feature: MA Experiment ID: 108595 Result: Up-regulated in Transcription
  misc_feature: MA Experiment 108595 PARAMETER Experiment Name: At_Ler-pi_Ovule_cDNA_P Parameter: Plant Line Value: null
  misc_feature: MA Experiment ID: 108609 Result: Up-regulated in Transcription
  misc_feature: MA Experiment 108609 PARAMETER Experiment Name: At_100uM_ABA_cDNA_P Parameter: Timepoint (hr) Value: 24
  misc_feature: MA Experiment 108609 PARAMETER Experiment Name: At_100uM_ABA_cDNA_P Parameter: Tissue Value: Aerial
  misc_feature: MA Experiment 108609 PARAMETER Experiment Name: At_100uM_ABA_cDNA_P Parameter: Treatment Value: 100uM ABA vs. No Treatment
  misc_feature: MA Experiment ID: 20000113 Result: Down-regulated in Transcription
  misc_feature: MA Experiment 20000113 PARAMETER Experiment Name: At_42deg_Heat_cDNA_P Parameter: Temperature (deg C) Value: 42 vs. 22
  misc_feature: MA Experiment 20000113 PARAMETER Experiment Name: At_42deg_Heat_cDNA_P Parameter: Timepoint (hr) Value: 8
  misc_feature: MA Experiment 20000113 PARAMETER Experiment Name: At_42deg_Heat_cDNA_P Parameter: Tissue Value: Aerial
  misc_feature: MA Experiment ID: 20000184 Result: Down-regulated in Transcription
  misc_feature: MA Experiment 20000184 PARAMETER Experiment Name: At_Shoots__P Parameter: Age (day) Value: 7
  misc_feature: MA Experiment 20000184 PARAMETER Experiment Name: At_Shoots__P Parameter: Tissue Value: Shoots vs. Whole Plant
  misc_feature: MA Experiment ID: 20000185 Result: Down-regulated in Transcription
  misc_feature: MA Experiment 20000185 PARAMETER Experiment Name: At_Roots__P Parameter: Age (day) Value: 7 vs. 21
  misc_feature: MA Experiment 20000185 PARAMETER Experiment Name: At_Roots__P Parameter: Organism Value: A. thaliana
  misc_feature: MA Experiment 20000185 PARAMETER Experiment Name: At_Roots__P Parameter: Tissue Value: Roots vs. Whole Plant
  misc_feature: MA Experiment ID: 20000224 Result: Up-regulated in Transcription
  misc_feature: MA Experiment ID: 20000234 Result: Up-regulated in Transcription
  misc_feature: MA Experiment 20000234 PARAMETER Experiment Name: At_Siliques_P Parameter: Age (day) Value: 21
  misc_feature: MA Experiment 20000234 PARAMETER Experiment Name: At_Siliques_P Parameter: Organism Value: A. thaliana
  misc_feature: MA Experiment 20000234 PARAMETER Experiment Name: At_Siliques_P Parameter: Plant Line Value: WS
  misc_feature: MA Experiment 20000234 PARAMETER Experiment Name: At_Siliques_P Parameter: Tissue Value: Less Than 5mm Siliques vs. Whole Plant
  misc_feature: MA Experiment ID: 20000264 Result: Up-regulated in Transcription
  misc_feature: MA Experiment 20000264 PARAMETER Experiment Name: At_Open_Flower_P Parameter: Age (day) Value: 21
  misc_feature: MA Experiment 20000264 PARAMETER Experiment Name: At_Open_Flower_P Parameter: Plant Line Value: WS
  misc_feature: MA Experiment 20000264 PARAMETER Experiment Name: At_Open_Flower_P Parameter: Tissue Value: Open Flower vs. Whole Plant
  misc_feature: MA Experiment ID: 20000265 Result: Up-regulated in Transcription
  misc_feature: MA Experiment 20000265 PARAMETER Experiment Name: At_Open_Flower_P Parameter: Age (day) Value: 21
  misc_feature: MA Experiment 20000265 PARAMETER Experiment Name: At_Open_Flower_P Parameter: Plant Line Value: WS
  misc_feature: MA Experiment 20000265 PARAMETER Experiment Name: At_Open_Flower_P Parameter: Tissue Value: Closed Flower vs. Whole Plant
  misc_feature: MA Experiment ID: 20000267 Result: Up-regulated in Transcription
  misc_feature: MA Experiment 20000267 PARAMETER Experiment Name: At_Drought_P Parameter: Age (day) Value: 7
  misc_feature: MA Experiment 20000267 PARAMETER Experiment Name: At_Drought_P Parameter: Organism Value: A. thaliana
  misc_feature: MA Experiment 20000267 PARAMETER Experiment Name: At_Drought_P Parameter: Plant Line Value: WS
  misc_feature: MA Experiment 20000267 PARAMETER Experiment Name: At_Drought_P Parameter: Timepoint (hr) Value: 6
  misc_feature: MA Experiment 20000267 PARAMETER Experiment Name: At_Drought_P Parameter: Tissue Value: Whole Plant
  misc_feature: MA Experiment 20000267 PARAMETER Experiment Name: At_Drought_P Parameter: Treatment Value: Drought vs. No Drought
  misc_feature: MA Experiment ID: 20000286 Result: Up-regulated in Transcription
  misc_feature: MA Experiment 20000286 PARAMETER Experiment Name: At_Open_Flower_P Parameter: Age (day) Value: 21
  misc_feature: MA Experiment 20000286 PARAMETER Experiment Name: At_Open_Flower_P Parameter: Plant Line Value: WS
  misc_feature: MA Experiment 20000286 PARAMETER Experiment Name: At_Open_Flower_P Parameter: Tissue Value: Half Open vs. Whole Plant
  misc_feature: MA Experiment ID: 20000438 Result: Down-regulated in Transcription
  misc_feature: MA Experiment 20000438 PARAMETER Experiment Name: At_Shoots__P Parameter: Age (day) Value: 14
  misc_feature: MA Experiment 20000438 PARAMETER Experiment Name: At_Shoots__P Parameter: Tissue Value: Shoots vs. Whole Plant
  misc_feature: MA Experiment ID: 20000439 Result: Down-regulated in Transcription
  misc_feature: MA Experiment 20000439 PARAMETER Experiment Name: At_Roots__P Parameter: Age (day) Value: 14 vs. 21
  misc_feature: MA Experiment 20000439 PARAMETER Experiment Name: At_Roots__P Parameter: Organism Value: A. thaliana
  misc_feature: MA Experiment 20000439 PARAMETER Experiment Name: At_Roots__P Parameter: Tissue Value: Roots vs. Whole Plant
  misc_feature: MA Experiment ID: 20000452 Result: Up-regulated in Transcription
  misc_feature: MA Experiment 20000452 PARAMETER Experiment Name: At_CS6879_Shoots-Roots_P Parameter: Age (day) Value: 14
  misc_feature: MA Experiment 20000452 PARAMETER Experiment Name: At_CS6879_Shoots-Roots_P Parameter: Organism Value: A. thaliana
  misc_feature: MA Experiment 20000452 PARAMETER Experiment Name: At_CS6879_Shoots-Roots_P Parameter: Plant Line Value: CS6879 vs. WS
  misc_feature: MA Experiment 20000452 PARAMETER Experiment Name: At_CS6879_Shoots-Roots_P Parameter: Tissue Value: Shoots
  misc_feature: MA Experiment ID: 20000453 Result: Up-regulated in Transcription
  misc_feature: MA Experiment 20000453 PARAMETER Experiment Name: At_100uM_ABA_P Parameter: Age (day) Value: 15
  misc_feature: MA Experiment 20000453 PARAMETER Experiment Name: At_100uM_ABA_P Parameter: Organism Value: A. thaliana
  misc_feature: MA Experiment 20000453 PARAMETER Experiment Name: At_100uM_ABA_P Parameter: Plant Line Value: WS
  misc_feature: MA Experiment 20000453 PARAMETER Experiment Name: At_100uM_ABA_P Parameter: Timepoint (hr) Value: 24
  misc_feature: MA Experiment 20000453 PARAMETER Experiment Name: At_100uM_ABA_P Parameter: Tissue Value: Aerial
  misc_feature: MA Experiment 20000453 PARAMETER Experiment Name: At_100uM_ABA_P Parameter: Treatment Value: 100uM ABA vs. No Treatment
  misc_feature: MA Experiment ID: 20000456 Result: Down-regulated in Transcription
  misc_feature: MA Experiment 20000456 PARAMETER Experiment Name: At_100uM_BA_P Parameter: Age (day) Value: 14
  misc_feature: MA Experiment 20000456 PARAMETER Experiment Name: At_100uM_BA_P Parameter: Organism Value: A. thaliana
  misc_feature: MA Experiment 20000456 PARAMETER Experiment Name: At_100uM_BA_P Parameter: Plant Line Value: WS
  misc_feature: MA Experiment 20000456 PARAMETER Experiment Name: At_100uM_BA_P Parameter: Timepoint (hr) Value: 6
  misc_feature: MA Experiment 20000456 PARAMETER Experiment Name: At_100uM_BA_P Parameter: Tissue Value: Aerial
  misc_feature: MA Experiment 20000456 PARAMETER Experiment Name: At_100uM_BA_P Parameter: Treatment Value: 100uM BA vs. No Treatment
  misc_feature: MA Experiment ID: 20000495 Result: Up-regulated in Transcription
  misc_feature: MA Experiment 20000495 PARAMETER Experiment Name: At_Guard_Cells_P Parameter: Harvest Date Value: 8/2/2002
  misc_feature: MA Experiment 20000495 PARAMETER Experiment Name: At_Guard_Cells_P Parameter: Organism Value: A. thaliana
  misc_feature: MA Experiment 20000495 PARAMETER Experiment Name: At_Guard_Cells_P Parameter: Tissue Value: Guard Cells vs. Leaves
  misc_feature: MA Experiment ID: 20000527 Result: Down-regulated in Transcription
  misc_feature: MA Experiment 20000527 PARAMETER Experiment Name: At_10percent_PEG_P Parameter: Age (day) Value: 20
  misc_feature: MA Experiment 20000527 PARAMETER Experiment Name: At_10percent_PEG_P Parameter: Organism Value: A. thaliana
  misc_feature: MA Experiment 20000527 PARAMETER Experiment Name: At_10percent_PEG_P Parameter: Plant Line Value: WS
  misc_feature: MA Experiment 20000527 PARAMETER Experiment Name: At_10percent_PEG_P Parameter: Timepoint (day) Value: 20
  misc_feature: MA Experiment 20000527 PARAMETER Experiment Name: At_10percent_PEG_P Parameter: Tissue Value: Whole Plant
  misc_feature: MA Experiment 20000527 PARAMETER Experiment Name: At_10percent_PEG_P Parameter: Treatment Value: 10percent PEG vs. No Treatment
  misc_feature: MA Experiment ID: 20000573 Result: Up-regulated in Transcription
  misc_feature: MA Experiment 20000573 PARAMETER Experiment Name: At_100uM_ABA_Mutants__P Parameter: Organism Value: A. thaliana
  misc_feature: MA Experiment 20000573 PARAMETER Experiment Name: At_100uM_ABA_Mutants__P Parameter: Plant Line Value: CS22 vs. Ler wt
  misc_feature: MA Experiment 20000573 PARAMETER Experiment Name: At_100uM_ABA_Mutants__P Parameter: Timepoint (hr) Value: N/A
  misc_feature: MA Experiment 20000573 PARAMETER Experiment Name: At_100uM_ABA_Mutants__P Parameter: Tissue Value: Whole Plant
  misc_feature: MA Experiment 20000573 PARAMETER Experiment Name: At_100uM_ABA_Mutants__P Parameter: Treatment Value: None
  misc_feature: MA Experiment ID: 20000574 Result: Up-regulated in Transcription
  misc_feature: MA Experiment 20000574 PARAMETER Experiment Name: At_100uM_ABA_Mutants__P Parameter: Organism Value: A. thaliana
  misc_feature: MA Experiment 20000574 PARAMETER Experiment Name: At_100uM_ABA_Mutants__P Parameter: Plant Line Value: CS23 vs. Ler wt
  misc_feature: MA Experiment 20000574 PARAMETER Experiment Name: At_100uM_ABA_Mutants__P Parameter: Timepoint (hr) Value: N/A
  misc_feature: MA Experiment 20000574 PARAMETER Experiment Name: At_100uM_ABA_Mutants__P Parameter: Tissue Value: Whole Plant
  misc_feature: MA Experiment 20000574 PARAMETER Experiment Name: At_100uM_ABA_Mutants__P Parameter: Treatment Value: None
  misc_feature: MA Experiment ID: 20001247 Result: Down-regulated in Transcription
  misc_feature: MA Experiment 20001247 PARAMETER Experiment Name: At_Far-red-induction_P Parameter: Age (day) Value: 7
  misc_feature: MA Experiment 20001247 PARAMETER Experiment Name: At_Far-red-induction_P Parameter: Light Value: Far-red vs. White
  misc_feature: MA Experiment 20001247 PARAMETER Experiment Name: At_Far-red-induction_P Parameter: Organism Value: A. thaliana
  misc_feature: MA Experiment 20001247 PARAMETER Experiment Name: At_Far-red-induction_P Parameter: Plant Line Value: Columbia
  misc_feature: MA Experiment 20001247 PARAMETER Experiment Name: At_Far-red-induction_P Parameter: Timepoint (hr) Value: 1
  misc_feature: MA Experiment 20001247 PARAMETER Experiment Name: At_Far-red-induction_P Parameter: Tissue Value: Whole Plant
  misc_feature: MA Experiment ID: 20001248 Result: Down-regulated in Transcription
  misc_feature: MA Experiment 20001248 PARAMETER Experiment Name: At_Far-red-induction_P Parameter: Age (day) Value: 7
  misc_feature: MA Experiment 20001248 PARAMETER Experiment Name: At_Far-red-induction_P Parameter: Light Value: Far-red vs. White
  misc_feature: MA Experiment 20001248 PARAMETER Experiment Name: At_Far-red-induction_P Parameter: Organism Value: A. thaliana
  misc_feature: MA Experiment 20001248 PARAMETER Experiment Name: At_Far-red-induction_P Parameter: Plant Line Value: Columbia
  misc_feature: MA Experiment 20001248 PARAMETER Experiment Name: At_Far-red-induction_P Parameter: Timepoint (hr) Value: 4
  misc_feature: MA Experiment 20001248 PARAMETER Experiment Name: At_Far-red-induction_P Parameter: Tissue Value: Whole Plant
  misc_feature: MA Experiment ID: 20001450 Result: Down-regulated in Transcription
  misc_feature: MA Experiment 20001450 PARAMETER Experiment Name: At_Far-red-induction_P Parameter: Age (day) Value: 7
  misc_feature: MA Experiment 20001450 PARAMETER Experiment Name: At_Far-red-induction_P Parameter: Light Value: Far-red vs. White
  misc_feature: MA Experiment 20001450 PARAMETER Experiment Name: At_Far-red-induction_P Parameter: Organism Value: A. thaliana
  misc_feature: MA Experiment 20001450 PARAMETER Experiment Name: At_Far-red-induction_P Parameter: Plant Line Value: Columbia
  misc_feature: MA Experiment 20001450 PARAMETER Experiment Name: At_Far-red-induction_P Parameter: Timepoint (hr) Value: 8
  misc_feature: MA Experiment 20001450 PARAMETER Experiment Name: At_Far-red-induction_P Parameter: Tissue Value: Whole Plant
  misc_feature: MA Experiment ID: 20001458 Result: Down-regulated in Transcription
  misc_feature: MA Experiment 20001458 PARAMETER Experiment Name: At_50mM_NH4NO3_L-to-H_P Parameter: Age (day) Value: Undefined
  misc_feature: MA Experiment 20001458 PARAMETER Experiment Name: At_50mM_NH4NO3_L-to-H_P Parameter: Organism Value: Undefined
  misc_feature: MA Experiment 20001458 PARAMETER Experiment Name: At_50mM_NH4NO3_L-to-H_P Parameter: Plant Line Value: Undefined
  misc_feature: MA Experiment 20001458 PARAMETER Experiment Name: At_50mM_NH4NO3_L-to-H_P Parameter: Timepoint (hr) Value: 2
  misc_feature: MA Experiment 20001458 PARAMETER Experiment Name: At_50mM_NH4NO3_L-to-H_P Parameter: Tissue Value: Siliques
  misc_feature: MA Experiment 20001458 PARAMETER Experiment Name: At_50mM_NH4NO3_L-to-H_P Parameter: Treatment Value: 50mM NH4NO3 vs. 100mM Manitol
  misc_feature: MA Experiment ID: 20001554 Result: Up-regulated in Transcription
  misc_feature: MA Experiment 20001554 PARAMETER Experiment Name: At_Drought_Soil_Dry_P Parameter: Age (day) Value: 21
  misc_feature: MA Experiment 20001554 PARAMETER Experiment Name: At_Drought_Soil_Dry_P Parameter: Organism Value: A. thaliana
  misc_feature: MA Experiment 20001554 PARAMETER Experiment Name: At_Drought_Soil_Dry_P Parameter: Plant Line Value: WS
  misc_feature: MA Experiment 20001554 PARAMETER Experiment Name: At_Drought_Soil_Dry_P Parameter: Post Timepoint (hr) Value: None
  misc_feature: MA Experiment 20001554 PARAMETER Experiment Name: At_Drought_Soil_Dry_P Parameter: Post-Treatment Value: None
  misc_feature: MA Experiment 20001554 PARAMETER Experiment Name: At_Drought_Soil_Dry_P Parameter: Timepoint (day) Value: 7
  misc_feature: MA Experiment 20001554 PARAMETER Experiment Name: At_Drought_Soil_Dry_P Parameter: Treatment Value: Drought vs. No Drought
  misc_feature: MA Experiment ID: 20001557 Result: Down-regulated in Transcription
  misc_feature: MA Experiment 20001557 PARAMETER Experiment Name: At_Drought_Soil_Dry_P Parameter: Age (day) Value: 27
  misc_feature: MA Experiment 20001557 PARAMETER Experiment Name: At_Drought_Soil_Dry_P Parameter: Organism Value: A. thaliana
  misc_feature: MA Experiment 20001557 PARAMETER Experiment Name: At_Drought_Soil_Dry_P Parameter: Plant Line Value: WS
  misc_feature: MA Experiment 20001557 PARAMETER Experiment Name: At_Drought_Soil_Dry_P Parameter: Post Timepoint (hr) Value: 3
  misc_feature: MA Experiment 20001557 PARAMETER Experiment Name: At_Drought_Soil_Dry_P Parameter: Post-Treatment Value: Re-Water vs. No Drought
  misc_feature: MA Experiment 20001557 PARAMETER Experiment Name: At_Drought_Soil_Dry_P Parameter: Timepoint (day) Value: 13
  misc_feature: MA Experiment 20001557 PARAMETER Experiment Name: At_Drought_Soil_Dry_P Parameter: Treatment Value: Drought vs. No Drought
  misc_feature: MA Experiment ID: 20001558 Result: Down-regulated in Transcription
  misc_feature: MA Experiment 20001558 PARAMETER Experiment Name: At_Drought_Soil_Dry_P Parameter: Age (day) Value: 27
  misc_feature: MA Experiment 20001558 PARAMETER Experiment Name: At_Drought_Soil_Dry_P Parameter: Organism Value: A. thaliana
  misc_feature: MA Experiment 20001558 PARAMETER Experiment Name: At_Drought_Soil_Dry_P Parameter: Plant Line Value: WS
  misc_feature: MA Experiment 20001558 PARAMETER Experiment Name: At_Drought_Soil_Dry_P Parameter: Post Timepoint (hr) Value: 6
  misc_feature: MA Experiment 20001558 PARAMETER Experiment Name: At_Drought_Soil_Dry_P Parameter: Post-Treatment Value: Re-Water vs. No Drought
  misc_feature: MA Experiment 20001558 PARAMETER Experiment Name: At_Drought_Soil_Dry_P Parameter: Timepoint (day) Value: 13
  misc_feature: MA Experiment 20001558 PARAMETER Experiment Name: At_Drought_Soil_Dry_P Parameter: Treatment Value: Drought vs. No Drought
  misc_feature: MA Experiment ID: 20001906 Result: Down-regulated in Transcription
  misc_feature: MA Experiment 20001906 PARAMETER Experiment Name: At_Drought_Reproduction_P Parameter: Age (day) Value: 35
  misc_feature: MA Experiment 20001906 PARAMETER Experiment Name: At_Drought_Reproduction_P Parameter: Organism Value: A. thaliana
  misc_feature: MA Experiment 20001906 PARAMETER Experiment Name: At_Drought_Reproduction_P Parameter: Plant Line Value: WS
  misc_feature: MA Experiment 20001906 PARAMETER Experiment Name: At_Drought_Reproduction_P Parameter: Timepoint (day) Value: 5
  misc_feature: MA Experiment 20001906 PARAMETER Experiment Name: At_Drought_Reproduction_P Parameter: Tissue Value: Siliques
  misc_feature: MA Experiment 20001906 PARAMETER Experiment Name: At_Drought_Reproduction_P Parameter: Treatment Value: Drought vs. No Drought
atagaaatagaaggcgaagagataatttccaaaaacaagaaaaacctctaagctcaaaagatgttgttgagaacgatggcggcgacttccccgcggccaccaccgtcaacatccctaacatctcagcagccaccatcacccccctcacagcttcccctccgtacaatgccgggatcgtacggctggccgttggttggaccattatcggaccgtttagattccaaggacccgataagtttttccggacaagagctgagaagtataagagcactgtgttccgtacaaatattcctccgacgtttcctttcttcggcaacgttaaccctaacatcgtcgccgttcttgacgtcaagtcttttagccatctttttgacatggatctagttgataaaagagatgttctcatcggagacttccggcctagccttgggttctacggcggcgttcgtgttggagtttatctcgacactactgagccaaagcacgccaagataaaaggtttcgctatggaaacactaaaacgaagctcaaaagtatggctacaagagcttcgttcaaacctaaacattttctggggaacaatcgaatccgaaatctccaaaaacggtgccgcttcatatatcttccctctccaacgttgcatcttcagtttcctctgcgcctctctcgccggcgttgacgcttccgtatcgccggacatcgctgagaacggttggaaaacaatcaatacttggcttgcgttgcaagttattcccactgctaaacttggcgtagttcctcagcctcttgaagagattttacttcatacttggccttatccttctctcttaatcgccggaaattacaaaaagctttacaatttcatcgacgagaacgccggagattgtctccggttaggtcaagaagaattcgggttgacccgagatgaggctattcaaaatcttctctttgttttaggttttaatgcctacgggggcttttccgtcttcttaccttctttgatcgggagaataaccggcgacaattccggtttacaggagaggattagaaccgaagtcaggagagtttgcggatccgggtcggatcttaatttcaagacggttaacgaaatggagctggttaaatccgtggtttacgaaacgctgcgttttagtcctccggttccgctgcaattcgcacgtgcgaggaaagattttcagataagttcacacgatgctgtttttgaggtcaagaaaggtgagcttctttgtggttatcagccgcttgtgatgagagacgctaatgtttttgacgaaccggaggaatttaaaccggaccggtatgtaggtgagaccgggtctgaattgctgaattatctctactggtctaacggtccacaaaccggtaccccgagcgcgtcgaacaaacagtgtgcagctaaggacattgtcactctcacggcttccttgctcgttgccgatttatttctccggtatgatacgattactggtgactccggttcaattaaagctgttgttaaagctaaataagttaaagattgattagtgtttaatgttatgtaatcaatcttcaacggtttcatttgttcggagtgtataaattatatgtaaactaaaataatccgaattgaaactcaaattgttatgttagatggtgttgctatgttagagagatttt

SEQ ID NO: 102304 - protein, 508 aa, Arabidopsis thaliana
  peptide (1)..(508): Ceres Seq. ID no. 13609945
  misc_feature (31)..(508): Homolog of NCBI NO: 11357336 NR Description: hydroperoxide lyase (EC 4.1.2.-) [validated] - thaliana >gi|3822403|gb|AAC69871.1| hydroperoxide lyase
  misc_feature (39)..(508): Homolog of NCBI NO: 25308880 NR Description: hydroperoxide lyase (HPOL) like protein - Arabidopsis thaliana >gi|5281016|emb|CAB45989.1| hydroperoxide (HPOL) like protein [Arabidopsis thaliana]
  misc_feature (116)..(493): Homolog of NCBI NO: 7488048 NR Description: probable allene oxide synthase - Arabidopsis
  misc_feature (125)..(508): Homolog of NCBI NO: 15233810 NR Description: hydroperoxide lyase (HPOL) like protein
  misc_feature (171)..(508): Homolog of NCBI NO: 19424049 NR Description: putative hydroperoxide lyase HPOL [Arabidopsis
  misc_feature (28)..(508): Homolog of NCBI NO: 29373125 NR Description: fatty acid hydroperoxide lyase [Citrus sinensis]
  misc_feature (64)..(508): Homolog of NCBI NO: 5830465 NR Description: hydroperoxide lyase [Medicago sativa]
  misc_feature (38)..(508): Homolog of NCBI NO: 5830467 NR Description: hydroperoxide lyase [Medicago sativa]
  misc_feature (30)..(507): Homolog of NCBI NO: 13183137 NR Description: fatty acid hydroperoxide lyase [Psidium guajava]
  misc_feature (64)..(508): Homolog of NCBI NO: 5830469 NR Description: hydroperoxide lyase [Medicago sativa]
RNRRRRDNFQKQEKPLSSKDVVENDGGDFPAATTVNIPNISAATITPLTASPPYNAGIVRLAVGWTIIGPFRFQGPDKFFRTRAEKYKSTVFRTNIPPTFPFFGNVNPNIVAVLDVKSFSHLFDMDLVDKRDVLIGDFRPSLGFYGGVRVGVYLDTTEPKHAKIKGFAMETLKRSSKVWLQELRSNLNIFWGTIESEISKNGAASYIFPLQRCIFSFLCASLAGVDASVSPDIAENGWKTINTWLALQVIPTAKLGVVPQPLEEILLHTWPYPSLLIAGNYKKLYNFIDENAGDCLRLGQEEFGLTRDEAIQNLLFVLGFNAYGGFSVFLPSLIGRITGDNSGLQERIRTEVRRVCGSGSDLNFKTVNEMELVKSVVYETLRFSPPVPLQFARARKDFQISSHDAVFEVKKGELLCGYQPLVMRDANVFDEPEEFKPDRYVGETGSELLNYLYWSNGPQTGTPSASNKQCAAKDIVTLTASLLVADLFLRYDTITGDSGSIKAVVKAK

SEQ ID NO: 102305 - protein, 384 aa, Arabidopsis thaliana; identical to SEQ ID NO: 71298
  peptide (1)..(384): Ceres Seq. ID no. 13609946
  misc_feature (1)..(384): Homolog of NCBI NO: 11357336 NR Description: hydroperoxide lyase (EC 4.1.2.-) [validated] - thaliana >gi|3822403|gb|AAC69871.1| hydroperoxide lyase
  misc_feature (1)..(384): Homolog of NCBI NO: 25308880 NR Description: hydroperoxide lyase (HPOL) like protein - Arabidopsis thaliana >gi|5281016|emb|CAB45989.1| hydroperoxide (HPOL) like protein [Arabidopsis thaliana]
  misc_feature (1)..(369): Homolog of NCBI NO: 7488048 NR Description: probable allene oxide synthase - Arabidopsis
  misc_feature (1)..(384): Homolog of NCBI NO: 15233810 NR Description: hydroperoxide lyase (HPOL) like protein
  misc_feature (47)..(384): Homolog of NCBI NO: 19424049 NR Description: putative hydroperoxide lyase HPOL [Arabidopsis
  misc_feature (1)..(384): Homolog of NCBI NO: 29373125 NR Description: fatty acid hydroperoxide lyase [Citrus sinensis]
  misc_feature (1)..(384): Homolog of NCBI NO: 5830465 NR Description: hydroperoxide lyase [Medicago sativa]
  misc_feature (1)..(384): Homolog of NCBI NO: 5830467 NR Description: hydroperoxide lyase [Medicago sativa]
  misc_feature (1)..(383): Homolog of NCBI NO: 13183137 NR Description: fatty acid hydroperoxide lyase [Psidium guajava]
  misc_feature (1)..(384): Homolog of NCBI NO: 5830469 NR Description: hydroperoxide lyase [Medicago sativa]

SEQ ID NO: 102306 - protein, 340 aa, Arabidopsis thaliana
  peptide (1)..(340): Ceres Seq. ID no. 13609947
  misc_feature (1)..(340): Homolog of NCBI NO: 11357336 NR Description: hydroperoxide lyase (EC 4.1.2.-) [validated] - thaliana >gi|3822403|gb|AAC69871.1| hydroperoxide lyase
  misc_feature (1)..(340): Homolog of NCBI NO: 25308880 NR Description: hydroperoxide lyase (HPOL) like protein - Arabidopsis thaliana >gi|5281016|emb|CAB45989.1| hydroperoxide (HPOL) like protein [Arabidopsis thaliana]
  misc_feature (1)..(325): Homolog of NCBI NO: 7488048 NR Description: probable allene oxide synthase - Arabidopsis
  misc_feature (1)..(340): Homolog of NCBI NO: 15233810 NR Description: hydroperoxide lyase (HPOL) like protein
  misc_feature (3)..(340): Homolog of NCBI NO: 19424049 NR Description: putative hydroperoxide lyase HPOL [Arabidopsis
  misc_feature (1)..(340): Homolog of NCBI NO: 29373125 NR Description: fatty acid hydroperoxide lyase [Citrus sinensis]
  misc_feature (1)..(340): Homolog of NCBI NO: 5830465 NR Description: hydroperoxide lyase [Medicago sativa]
  misc_feature (1)..(340): Homolog of NCBI NO: 5830467 NR Description: hydroperoxide lyase [Medicago sativa]
  misc_feature (1)..(339): Homolog of NCBI NO: 13183137 NR Description: fatty acid hydroperoxide lyase [Psidium guajava]
  misc_feature (1)..(340): Homolog of NCBI NO: 5830469 NR Description: hydroperoxide lyase [Medicago sativa]
METLKRSSKVWLQELRSNLNIFWGTIESEISKNGAASYIFPLQRCIFSFLCASLAGVDASVSPDIAENGWKTINTWLALQVIPTAKLGVVPQPLEEILLHTWPYPSLLIAGNYKKLYNFIDENAGDCLRLGQEEFGLTRDEAIQNLLFVLGFNAYGGFSVFLPSLIGRITGDNSGLQERIRTEVRRVCGSGSDLNFKTVNEMELVKSVVYETLRFSPPVPLQFARARKDFQISSHDAVFEVKKGELLCGYQPLVMRDANVFDEPEEFKPDRYVGETGSELLNYLYWSNGPQTGTPSASNKQCAAKDIVTLTASLLVADLFLRYDTITGDSGSIKAVVKAK

SEQ ID NO: 102307 - DNA, 1202 bp, Arabidopsis thaliana
  misc_feature (1)..(1202): Ceres Seq. ID no. 13609948
  misc_feature: MA Experiment ID: 20000314 Result: Down-regulated in Transcription
  misc_feature: MA Experiment 20000314 PARAMETER Experiment Name: At_14day_Shoots-Roots_Sub_P Parameter: Age (day) Value: 14
  misc_feature: MA Experiment 20000314 PARAMETER Experiment Name: At_14day_Shoots-Roots_Sub_P Parameter: Organism Value: A. thaliana
  misc_feature: MA Experiment 20000314 PARAMETER Experiment Name: At_14day_Shoots-Roots_Sub_P Parameter: Plant Line Value: WS
  misc_feature: MA Experiment 20000314 PARAMETER Experiment Name: At_14day_Shoots-Roots_Sub_P Parameter: Tissue Value: Roots vs. Whole Plant
  misc_feature: MA Experiment ID: 20000315 Result: Down-regulated in Transcription
  misc_feature: MA Experiment 20000315 PARAMETER Experiment Name: At_14day_Shoots-Roots_Sub_P Parameter: Age (day) Value: 14
  misc_feature: MA Experiment 20000315 PARAMETER Experiment Name: At_14day_Shoots-Roots_Sub_P Parameter: Organism Value: A. thaliana
  misc_feature: MA Experiment 20000315 PARAMETER Experiment Name: At_14day_Shoots-Roots_Sub_P Parameter: Plant Line Value: WS
  misc_feature: MA Experiment 20000315 PARAMETER Experiment Name: At_14day_Shoots-Roots_Sub_P Parameter: Tissue Value: Shoots vs. Whole Plant
  misc_feature: MA Experiment ID: 20000329 Result: Down-regulated in Transcription
  misc_feature: MA Experiment 20000329 PARAMETER Experiment Name: At_4deg_Cold_Sub_P Parameter: Age (day) Value: 14
  misc_feature: MA Experiment 20000329 PARAMETER Experiment Name: At_4deg_Cold_Sub_P Parameter: Organism Value: A. thaliana
  misc_feature: MA Experiment 20000329 PARAMETER Experiment Name: At_4deg_Cold_Sub_P Parameter: Plant Line Value: WS
  misc_feature: MA Experiment 20000329 PARAMETER Experiment Name: At_4deg_Cold_Sub_P Parameter: Temperature (deg C) Value: 4 vs. 22
  misc_feature: MA Experiment 20000329 PARAMETER Experiment Name: At_4deg_Cold_Sub_P Parameter: Timepoint (hr) Value: 6
  misc_feature: MA Experiment 20000329 PARAMETER Experiment Name: At_4deg_Cold_Sub_P Parameter: Tissue Value: Aerial
atgagagaagagacagtttcttggaagtactttaaaagagatgttgttccgttcactgcgatgatcgctatagagtgtacaacggttggatccagcatactgtataaagctgctaccttgagaggatttagcttttatgtctttgtgttttacgcttatgttggtgctacacttgtccttcttctactttcacttatctttggaaggtcgagaagtttgcctacagccaagtcttctcttttcttcaagattttcttacttgcgcttctcgggctcacgtcgcgggtagctggttgtaaaggtatagaatatagttccccaactctttcctctgctatcagcaatcttacaccagctttcaccttcatccttgccatcttcttcaggatggaacaagtaatgttaagaagctctgcaactcaggctaaaatcattggcacaatagtttctatatctggtgctctggttattgttctgtataaaggcccaaaacttcttgttgctgcatcgtttacttcattcgagtcaagttggataattggaggccttttgctcggtctgcagtttttgcttctttcagtctggtttattcttcagactcatatcatggagatataccctgaagaaatagccgtagtcttctgctacaacttatgcgcaactctaatctcagggacagtatgtctacttgtagaaaaagacttgaattcttggcagcttaaaccaggtttctccctcgcttcagtcatatactcgggactctttgatacatcattgggctcagttatccacacatggggtctccatgtgaagggtccagtctacatatccttgttcaagccgctgtctatcgcaattgcagtcgccatggctgctatattcctcggcgacacacttcatcttgggagtgtgattggatcagtgatattgagctttgggttttacactgtgatttggggcaaagcaagagaggattcaaccaaaacagtaagtgattctgagcaatcacttttattgccttcacacgacagagaagaagattgaaaccttgtcatgaaaatatgttggagacaagtgtaatcgttttcttattttattcataattatggtcccattagatgatgatgatccctatttatcttgtaagttgtaagatcttatgacttgtacaaaaaaaatctaacatgatacattgaaatgtg

SEQ ID NO: 102308 - protein, 347 aa, Arabidopsis thaliana
  peptide (1)..(347): Ceres Seq. ID no. 13609949
  misc_feature (28)..(159): Pfam Name: Integral membrane protein DUF6 Pfam Description: Integral membrane protein DUF6
  misc_feature (24)..(347): Homolog of NCBI NO: 19347832 NR Description: unknown protein [Arabidopsis thaliana]
  misc_feature (4)..(347): Homolog of NCBI NO: 15242612 NR Description: nodulin MtN21-related [Arabidopsis thaliana]
  misc_feature (3)..(346): Homolog of NCBI NO: 10177511 NR Description: nodulin-like protein [Arabidopsis thaliana]
  misc_feature (21)..(347): Homolog of NCBI NO: 10177510 NR Description: nodulin-like protein [Arabidopsis thaliana]
  misc_feature (3)..(346): Homolog of NCBI NO: 15242614 NR Description: nodulin MtN21 family protein [Arabidopsis
  misc_feature (130)..(347): Homolog of NCBI NO: 26449991 NR Description: unknown protein [Arabidopsis thaliana]
  misc_feature (1)..(161): Homolog of NCBI NO: 18414474 NR Description: nodulin MtN21 - related [Arabidopsis thaliana]
  misc_feature (222)..(347): Homolog of NCBI NO: 18414474 NR Description: nodulin MtN21 - related [Arabidopsis thaliana]
  misc_feature (1)..(161): Homolog of NCBI NO: 7485048 NR Description: hypothetical protein - Arabidopsis thaliana hypothetical protein [Arabidopsis thaliana]
  misc_feature (222)..(347): Homolog of NCBI NO: 7485048 NR Description: hypothetical protein - Arabidopsis thaliana hypothetical protein [Arabidopsis thaliana]
MREETVSWKYFKRDVVPFTAMIAIECTTVGSSILYKAATLRGFSFYVFVFYAYVGATLVLLLLSLIFGRSRSLPTAKSSLFFKIFLLALLGLTSRVAGCKGIEYSSPTLSSAISNLTPAFTFILAIFFRMEQVMLRSSATQAKIIGTIVSISGALVIVLYKGPKLLVAASFTSFESSWIIGGLLLGLQFLLLSVWFILQTHIMEIYPEEIAVVFCYNLCATLISGTVCLLVEKDLNSWQLKPGFSLASVIYSGLFDTSLGSVIHTWGLHVKGPVYISLFKPLSIAIAVAMAAIFLGDTLHLGSVIGSVILSFGFYTVIWGKAREDSTKTVSDSEQSLLLPSHDREED

SEQ ID NO: 102309 - protein, 327 aa, Arabidopsis thaliana
  peptide (1)..(327): Ceres Seq. ID no. 13609950
  misc_feature (8)..(139): Pfam Name: Integral membrane protein DUF6 Pfam Description: Integral membrane protein DUF6
  misc_feature (4)..(327): Homolog of NCBI NO: 19347832 NR Description: unknown protein [Arabidopsis thaliana]
  misc_feature (1)..(327): Homolog of NCBI NO: 15242612 NR Description: nodulin MtN21-related [Arabidopsis thaliana]
  misc_feature (1)..(326): Homolog of NCBI NO: 10177511 NR Description: nodulin-like protein [Arabidopsis thaliana]
  misc_feature (1)..(327): Homolog of NCBI NO: 10177510 NR Description: nodulin-like protein [Arabidopsis thaliana]
  misc_feature (1)..(326): Homolog of NCBI NO: 15242614 NR Description: nodulin MtN21 family protein [Arabidopsis
  misc_feature (110)..(327): Homolog of NCBI NO: 26449991 NR Description: unknown protein [Arabidopsis thaliana]
  misc_feature (1)..(141): Homolog of NCBI NO: 18414474 NR Description: nodulin MtN21 - related [Arabidopsis thaliana]
  misc_feature (202)..(327): Homolog of NCBI NO: 18414474 NR Description: nodulin MtN21 - related [Arabidopsis thaliana]
  misc_feature (1)..(141): Homolog of NCBI NO: 7485048 NR Description: hypothetical protein - Arabidopsis thaliana hypothetical protein [Arabidopsis thaliana]
  misc_feature (202)..(327): Homolog of NCBI NO: 7485048 NR Description: hypothetical protein - Arabidopsis thaliana hypothetical protein [Arabidopsis thaliana]
MIAIECTTVGSSILYKAATLRGFSFYVFVFYAYVGATLVLLLLSLIFGRSRSLPTAKSSLFFKIFLLALLGLTSRVAGCKGIEYSSPTLSSAISNLTPAFTFILAIFFRMEQVMLRSSATQAKIIGTIVSISGALVIVLYKGPKLLVAASFTSFESSWIIGGLLLGLQFLLLSVWFILQTHIMEIYPEEIAVVFCYNLCATLISGTVCLLVEKDLNSWQLKPGFSLASVIYSGLFDTSLGSVIHTWGLHVKGPVYISLFKPLSIAIAVAMAAIFLGDTLHLGSVIGSVILSFGFYTVIWGKAREDSTKTVSDSEQSLLLPSHDREED

SEQ ID NO: 102310 - protein, 218 aa, Arabidopsis thaliana
  peptide (1)..(218): Ceres Seq. ID no. 13609951
  misc_feature (1)..(218): Homolog of NCBI NO: 19347832 NR Description: unknown protein [Arabidopsis thaliana]
  misc_feature (1)..(218): Homolog of NCBI NO: 15242612 NR Description: nodulin MtN21-related [Arabidopsis thaliana]
  misc_feature (1)..(217): Homolog of NCBI NO: 10177511 NR Description: nodulin-like protein [Arabidopsis thaliana]
  misc_feature (1)..(218): Homolog of NCBI NO: 10177510 NR Description: nodulin-like protein [Arabidopsis thaliana]
  misc_feature (1)..(217): Homolog of NCBI NO: 15242614 NR Description: nodulin MtN21 family protein [Arabidopsis
  misc_feature (1)..(218): Homolog of NCBI NO: 26449991 NR Description: unknown protein [Arabidopsis thaliana]
  misc_feature (1)..(32): Homolog of NCBI NO: 18414474 NR Description: nodulin MtN21 - related [Arabidopsis thaliana]
  misc_feature (93)..(218): Homolog of NCBI NO: 18414474 NR Description: nodulin MtN21 - related [Arabidopsis thaliana]
  misc_feature (1)..(32): Homolog of NCBI NO: 7485048 NR Description: hypothetical protein - Arabidopsis thaliana hypothetical protein [Arabidopsis thaliana]
  misc_feature (93)..(218): Homolog of NCBI NO: 7485048 NR Description: hypothetical protein - Arabidopsis thaliana hypothetical protein [Arabidopsis thaliana]
MEQVMLRSSATQAKIIGTIVSISGALVIVLYKGPKLLVAASFTSFESSWIIGGLLLGLQFLLLSVWFILQTHIMEIYPEEIAVVFCYNLCATLISGTVCLLVEKDLNSWQLKPGFSLASVIYSGLFDTSLGSVIHTWGLHVKGPVYISLFKPLSIAIAVAMAAIFLGDTLHLGSVIGSVILSFGFYTVIWGKAREDSTKTVSDSEQSLLLPSHDREED

SEQ ID NO: 102311 - DNA, 978 bp, Arabidopsis thaliana
  misc_feature (1)..(978): Ceres Seq. ID no. 13609952
  misc_feature: MA Experiment ID: 20000179 Result: Down-regulated in Transcription
  misc_feature: MA Experiment 20000179 PARAMETER Experiment Name: At_Germinating_Seeds_P Parameter: Age (hr) Value: 6 vs. 0
  misc_feature: MA Experiment 20000179 PARAMETER Experiment Name: At_Germinating_Seeds_P Parameter: Tissue Value: Germinating Seeds
  misc_feature: MA Experiment ID: 20000573 Result: Up-regulated in Transcription
  misc_feature: MA Experiment 20000573 PARAMETER Experiment Name: At_100uM_ABA_Mutants__P Parameter: Organism Value: A. thaliana
  misc_feature: MA Experiment 20000573 PARAMETER Experiment Name: At_100uM_ABA_Mutants__P Parameter: Plant Line Value: CS22 vs. Ler wt
  misc_feature: MA Experiment 20000573 PARAMETER Experiment Name: At_100uM_ABA_Mutants__P Parameter: Timepoint (hr) Value: N/A
  misc_feature: MA Experiment 20000573 PARAMETER Experiment Name: At_100uM_ABA_Mutants__P Parameter: Tissue Value: Whole Plant
  misc_feature: MA Experiment 20000573 PARAMETER Experiment Name: At_100uM_ABA_Mutants__P Parameter: Treatment Value: None
  misc_feature: MA Experiment ID: 20000574 Result: Up-regulated in Transcription
  misc_feature: MA Experiment 20000574 PARAMETER Experiment Name: At_100uM_ABA_Mutants__P Parameter: Organism Value: A. thaliana
  misc_feature: MA Experiment 20000574 PARAMETER Experiment Name: At_100uM_ABA_Mutants__P Parameter: Plant Line Value: CS23 vs. Ler wt
  misc_feature: MA Experiment 20000574 PARAMETER Experiment Name: At_100uM_ABA_Mutants__P Parameter: Timepoint (hr) Value: N/A
  misc_feature: MA Experiment 20000574 PARAMETER Experiment Name: At_100uM_ABA_Mutants__P Parameter: Tissue Value: Whole Plant
  misc_feature: MA Experiment 20000574 PARAMETER Experiment Name: At_100uM_ABA_Mutants__P Parameter: Treatment Value: None
  misc_feature: MA Experiment ID: 20000794 Result: Down-regulated in Transcription
  misc_feature: MA Experiment 20000794 PARAMETER Experiment Name: At_Petals_P Parameter: Age (day) Value: 23-25 days
  misc_feature: MA Experiment 20000794 PARAMETER Experiment Name: At_Petals_P Parameter: Plant Line Value: WS
  misc_feature: MA Experiment 20000794 PARAMETER Experiment Name: At_Petals_P Parameter: Tissue Value: Petals vs. Whole plant
aacccaacaacacactatctctcatttctcttcaaaaaaaaaaaaaaaccttgaaactatgagtttccatgaccaaatccaataagtccacccggtaccaattcggatcataaaagtttcgttataaacagcaaaatcatgctcaccaccacaatcttaatcttactcatagtgattcttatggtctctctccacctctactatcgttggtatctcctccgttctagccccttcaatcgcaccaccgctgcaagtacttttttcacggatccttcctccactcctggtggccttaacccctccatcatcaaatctcttccaattttcacgttctccgccgtaaccgcccttttcgcaatggaatgctccgtttgcctctcggagttcaaagataatgaatcgggtcgggttatgcccaattgcaagcatacatttcacgttcactgcattgatatgtggtttcattctcattcctcttgtcctctctgtcgatctcaaatcgaacctttcgccggtggagtaaaatcgtcgatggatgaagtcgcgatttcgatttctgacccggtttacggtgacacgaaccatcacgaaggaactgagactaccggtgattcggttcctgaagattcacagagaaaaccggcagcgattgaaatctcacagaggaatctcggagaaatagagaatgatttgtctcggagtcactcgtttagatcaccgaccgatgagccggatgatatctttcactcggaatttgagtcgagatctggagaagtgcttcttcttcttcttcttctatcagaattcctcatattttgtttccgacggtcagtagcatgcaagtgactgagttagatatcgaattgggaggagaagagactcgttcacttattcaatgttacatcacgtggattgtattaatggttgtaatttatctctttcttttttcagtttagagtttaatatgcaacatgttaa

SEQ ID NO: 102312 - protein, 235 aa, Arabidopsis thaliana
  peptide (1)..(235): Ceres Seq. ID no. 13609953
  misc_feature (76)..(117): Pfam Name: Zinc finger, C3HC4 type (RING finger) Pfam Description: Zinc finger, C3HC4 type (RING finger)
  misc_feature (1)..(235): Homolog of NCBI NO: 7485154 NR Description: hypothetical protein - Arabidopsis thaliana regulatory protein [Arabidopsis thaliana]
  misc_feature (1)..(235): Homolog of NCBI NO: 18414561 NR Description: expressed protein [Arabidopsis thaliana]
  misc_feature (1)..(235): Homolog of NCBI NO: 21537244 NR Description: unknown [Arabidopsis thaliana]
  misc_feature (1)..(194): Homolog of NCBI NO: 21593806 NR Description: putative RING zinc finger protein [Arabidopsis
  misc_feature (1)..(194): Homolog of NCBI NO: 15228302 NR Description: RING zinc finger protein -related [Arabidopsis
  misc_feature (1)..(194): Homolog of NCBI NO: 25456278 NR Description: probable zinc finger protein [imported] - thaliana >gi|3873408|gb|AAC77829.1| putative zinc finger protein
  misc_feature (1)..(168): Homolog of NCBI NO: 15228830 NR Description: RING-H2 zinc finger protein ATL5 [Arabidopsis
  misc_feature (1)..(168): Homolog of NCBI NO: 4928401 NR Description: RING-H2 zinc finger protein ATL5 [Arabidopsis
  misc_feature (1)..(123): Homolog of NCBI NO: 15227929 NR Description: RING zinc finger protein -related [Arabidopsis
  misc_feature (1)..(184): Homolog of NCBI NO: 12003386 NR Description: Avr9/Cf-9 rapidly elicited protein 132 [Nicotiana
MLTTTILILLIVILMVSLHLYYRWYLLRSSPFNRTTAASTFFTDPSSTPGGLNPSIIKSLPIFTFSAVTALFAMECSVCLSEFKDNESGRVMPNCKHTFHVHCIDMWFHSHSSCPLCRSQIEPFAGGVKSSMDEVAISISDPVYGDTNHHEGTETTGDSVPEDSQRKPAAIEISQRNLGEIENDLSRSHSFRSPTDEPDDIFHSEFESRSGEVLLLLLLLSEFLIFCFRRSVACK

SEQ ID NO: 102313 - protein, 221 aa, Arabidopsis thaliana
  peptide (1)..(221): Ceres Seq. ID no. 13609954
  misc_feature (62)..(103): Pfam Name: Zinc finger, C3HC4 type (RING finger) Pfam Description: Zinc finger, C3HC4 type (RING finger)
  misc_feature (1)..(221): Homolog of NCBI NO: 7485154 NR Description: hypothetical protein - Arabidopsis thaliana regulatory protein [Arabidopsis thaliana]
  misc_feature (1)..(221): Homolog of NCBI NO: 18414561 NR Description: expressed protein [Arabidopsis thaliana]
  misc_feature (1)..(221): Homolog of NCBI NO: 21537244 NR Description: unknown [Arabidopsis thaliana]
  misc_feature (1)..(180): Homolog of NCBI NO: 21593806 NR Description: putative RING zinc finger protein [Arabidopsis
  misc_feature (1)..(180): Homolog of NCBI NO: 15228302 NR Description: RING zinc finger protein -related [Arabidopsis
  misc_feature (1)..(180): Homolog of NCBI NO: 25456278 NR Description: probable zinc finger protein [imported] - thaliana >gi|3873408|gb|AAC77829.1| putative zinc finger protein
  misc_feature (1)..(154): Homolog of NCBI NO: 15228830 NR Description: RING-H2 zinc finger protein ATL5 [Arabidopsis
  misc_feature (1)..(154): Homolog of NCBI NO: 4928401 NR Description: RING-H2 zinc finger protein ATL5 [Arabidopsis
  misc_feature (1)..(109): Homolog of NCBI NO: 15227929 NR Description: RING zinc finger protein -related [Arabidopsis
  misc_feature (1)..(170): Homolog of NCBI NO: 12003386 NR Description: Avr9/Cf-9 rapidly elicited protein 132 [Nicotiana
MVSLHLYYRWYLLRSSPFNRTTAASTFFTDPSSTPGGLNPSIIKSLPIFTFSAVTALFAMECSVCLSEFKDNESGRVMPNCKHTFHVHCIDMWFHSHSSCPLCRSQIEPFAGGVKSSMDEVAISISDPVYGDTNHHEGTETTGDSVPEDSQRKPAAIEISQRNLGEIENDLSRSHSFRSPTDEPDDIFHSEFESRSGEVLLLLLLLSEFLIFCFRRSVACK

SEQ ID NO: 102314 - protein, 162 aa, Arabidopsis thaliana
  peptide (1)..(162): Ceres Seq. ID no. 13609955
  misc_feature (3)..(44): Pfam Name: Zinc finger, C3HC4 type (RING finger) Pfam Description: Zinc finger, C3HC4 type (RING finger)
  misc_feature (1)..(162): Homolog of NCBI NO: 7485154 NR Description: hypothetical protein - Arabidopsis thaliana regulatory protein [Arabidopsis thaliana]
  misc_feature (1)..(162): Homolog of NCBI NO: 18414561 NR Description: expressed protein [Arabidopsis thaliana]
  misc_feature (1)..(162): Homolog of NCBI NO: 21537244 NR Description: unknown [Arabidopsis thaliana]
  misc_feature (1)..(121): Homolog of NCBI NO: 21593806 NR Description: putative RING zinc finger protein [Arabidopsis
  misc_feature (1)..(121): Homolog of NCBI NO: 15228302 NR Description: RING zinc finger protein -related [Arabidopsis
  misc_feature (1)..(121): Homolog of NCBI NO: 25456278 NR Description: probable zinc finger protein [imported] - thaliana >gi|3873408|gb|AAC77829.1| putative zinc finger protein
  misc_feature (1)..(95): Homolog of NCBI NO: 15228830 NR Description: RING-H2 zinc finger protein ATL5 [Arabidopsis
  misc_feature (1)..(95): Homolog of NCBI NO: 4928401 NR Description: RING-H2 zinc finger protein ATL5 [Arabidopsis
  misc_feature (1)..(50): Homolog of NCBI NO: 15227929 NR Description: RING zinc finger protein -related [Arabidopsis
  misc_feature (1)..(111): Homolog of NCBI NO: 12003386 NR Description: Avr9/Cf-9 rapidly elicited protein 132 [Nicotiana
MECSVCLSEFKDNESGRVMPNCKHTFHVHCIDMWFHSHSSCPLCRSQIEPFAGGVKSSMDEVAISISDPVYGDTNHHEGTETTGDSVPEDSQRKPAAIEISQRNLGEIENDLSRSHSFRSPTDEPDDIFHSEFESRSGEVLLLLLLLSEFLIFCFRRSVACK

SEQ ID NO: 102315 - DNA, 2145 bp, Arabidopsis thaliana
  misc_feature (1)..(2145): Ceres Seq. ID no. 13609956
  misc_feature: MA Experiment ID: 108462 Result: Down-regulated in Transcription
  misc_feature: MA Experiment 108462 PARAMETER Experiment Name: At_Germinating_Seeds_cDNA_P Parameter: Age (day) Value: 2 vs. 0
  misc_feature: MA Experiment 108462 PARAMETER Experiment Name: At_Germinating_Seeds_cDNA_P Parameter: Tissue Value: Germinating Seeds
  misc_feature: MA Experiment ID: 108463 Result: Down-regulated in Transcription
  misc_feature: MA Experiment 108463 PARAMETER Experiment Name: At_Germinating_Seeds_cDNA_P Parameter: Age (day) Value: 3 vs. 0
  misc_feature: MA Experiment 108463 PARAMETER Experiment Name: At_Germinating_Seeds_cDNA_P Parameter: Tissue Value: Germinating Seeds
  misc_feature: MA Experiment ID: 108464 Result: Down-regulated in Transcription
  misc_feature: MA Experiment 108464 PARAMETER Experiment Name: At_Germinating_Seeds_cDNA_P Parameter: Age (day) Value: 4 vs. 0
  misc_feature: MA Experiment 108464 PARAMETER Experiment Name: At_Germinating_Seeds_cDNA_P Parameter: Tissue Value: Germinating Seeds
  misc_feature: MA Experiment ID: 108595 Result: Down-regulated in Transcription
  misc_feature: MA Experiment 108595 PARAMETER Experiment Name: At_Ler-pi_Ovule_cDNA_P Parameter: Plant Line Value: null
  misc_feature: MA Experiment ID: 20000087 Result: Down-regulated in Transcription
  misc_feature: MA Experiment 20000087 PARAMETER Experiment Name: At_100uM_ABA_Mutants_cDNA_P Parameter: Plant Line Value: WS
  misc_feature: MA Experiment 20000087 PARAMETER Experiment Name: At_100uM_ABA_Mutants_cDNA_P Parameter: Timepoint (hr) Value: 6
  misc_feature: MA Experiment 20000087 PARAMETER Experiment Name: At_100uM_ABA_Mutants_cDNA_P Parameter: Tissue Value: Aerial
  misc_feature: MA Experiment 20000087 PARAMETER Experiment Name: At_100uM_ABA_Mutants_cDNA_P Parameter: Treatment Value: 100uM ABA vs. No Treatment
  misc_feature: MA Experiment ID: 20000171 Result: Up-regulated in Transcription
  misc_feature: MA Experiment 20000171 PARAMETER Experiment Name: At_42deg_Heat_P Parameter: Age (day) Value: 14
  misc_feature: MA Experiment 20000171 PARAMETER Experiment Name: At_42deg_Heat_P Parameter: Organism Value: A. thaliana
  misc_feature: MA Experiment 20000171 PARAMETER Experiment Name: At_42deg_Heat_P Parameter: Plant Line Value: WS
  misc_feature: MA Experiment 20000171 PARAMETER Experiment Name: At_42deg_Heat_P Parameter: Temperature (deg C) Value: 42 vs. 22
  misc_feature: MA Experiment 20000171 PARAMETER Experiment Name: At_42deg_Heat_P Parameter: Timepoint (hr) Value: 1
  misc_feature: MA Experiment 20000171 PARAMETER Experiment Name: At_42deg_Heat_P Parameter: Tissue Value: Aerial
  misc_feature: MA Experiment ID: 20000173 Result: Up-regulated in Transcription
  misc_feature: MA Experiment 20000173 PARAMETER Experiment Name: At_42deg_Heat_P Parameter: Age (day) Value: 14
  misc_feature: MA Experiment 20000173 PARAMETER Experiment Name: At_42deg_Heat_P Parameter: Organism Value: A. thaliana
  misc_feature: MA Experiment 20000173 PARAMETER Experiment Name: At_42deg_Heat_P Parameter: Plant Line Value: WS
  misc_feature: MA Experiment 20000173 PARAMETER Experiment Name: At_42deg_Heat_P Parameter: Temperature (deg C) Value: 42 vs. 22
  misc_feature: MA Experiment 20000173 PARAMETER Experiment Name: At_42deg_Heat_P Parameter: Timepoint (hr) Value: 6
  misc_feature: MA Experiment 20000173 PARAMETER Experiment Name: At_42deg_Heat_P Parameter: Tissue Value: Aerial
  misc_feature: MA Experiment ID: 20000180 Result: Down-regulated in Transcription
  misc_feature: MA Experiment 20000180 PARAMETER Experiment Name: At_Germinating_Seeds_P Parameter: Age (hr) Value: 24 vs. 0
  misc_feature: MA Experiment 20000180 PARAMETER Experiment Name: At_Germinating_Seeds_P Parameter: Tissue Value: Germinating Seeds
  misc_feature: MA Experiment ID: 20001557 Result: Up-regulated in Transcription
  misc_feature: MA Experiment 20001557 PARAMETER Experiment Name: At_Drought_Soil_Dry_P Parameter: Age (day) Value: 27
  misc_feature: MA Experiment 20001557 PARAMETER Experiment Name: At_Drought_Soil_Dry_P Parameter: Organism Value: A. thaliana
  misc_feature: MA Experiment 20001557 PARAMETER Experiment Name: At_Drought_Soil_Dry_P Parameter: Plant Line Value: WS
  misc_feature: MA Experiment 20001557 PARAMETER Experiment Name: At_Drought_Soil_Dry_P Parameter: Post Timepoint (hr) Value: 3
  misc_feature: MA Experiment 20001557 PARAMETER Experiment Name: At_Drought_Soil_Dry_P Parameter: Post-Treatment Value: Re-Water vs. No Drought
  misc_feature: MA Experiment 20001557 PARAMETER Experiment Name: At_Drought_Soil_Dry_P Parameter: Timepoint (day) Value: 13
  misc_feature: MA Experiment 20001557 PARAMETER Experiment Name: At_Drought_Soil_Dry_P Parameter: Treatment Value: Drought vs. No Drought
ctctgtgccttttttcctcttttctcgttcccctctacttcatttagggtttatcatcctctaccaatccgccgattctatacatacacttttcatatatatacatacatcgtctccactctcgttggctcatttttcattcaccgccacgaagcaagaggagattcgtattagccaccatgtctttgagacctaacgctaagactgaggttcgccggaaccgctacaaagtggcggtggatgctgaggaaggaagacggaggagagaggacaacatggtcgagatccgtaagagtaagcgtgaagaaagcttacagaagaagcgtcgtgaaggccttcaagctaatcagctacctcaattcgctcctctcctgttcctgcttcatcaactgttggagaagagttggagagtttgcctgctatggttggtggtgtttggtcagatgatagaagtttacagcttgaagcgactactcagttccggaaattgctttctattgagcgtagtcctccgattgaagaagtgattgatgctggtgttgtgcctcggtttgtggaatttctcactagagaggattatccacagcttcagtttgaggctgcttgggcattgacaaacattgcttctgggacttcagagaatacaaaggtggtcattgaacatggtgctgttccgatttttgttcaactattggcttctcagagtgatgatgtccgtgagcaggctgtgtgggcattagggaatgttgctggtgattctccacggtgcagagatcttgtccttggtcaaggagctttgataccattactctctcagttgaatgagcatgctaaactctcgatgctgagaaatgctacttggaccctctctaatttctgcaggggcaagccacagcctccctttgaccaggtccgtccagcactcccagcccttgaacgcctgattcattcgactgatgaggaagtgttaacggatgcatgttgggctctctcttacctttccgatggcacaaatgacaaaatccaatctgtcattgaggcaggtgttgttcctcgactcgtcgagcttctccagcatcaatcaccatctgtgcttattcctgcccttcgtagtattggtaacattgtcactggagatgatctgcagacacagtgtgtaattagtcatggtgcacttcttagccttttgagccttctgactcacaatcataagaagagcatcaaaaaggaagcttgctggacaatctcaaatatcactgctggaaacagggaccagattcaggctgtgtgtgaagctggtttgatttgccctcttgtcaatctgcttcaaaatgcggagtttgatataaagaaagaagctgcgtgggcaatatcaaatgccacttcaggtggttctcctgaccaaatcaagtacatggtggaacagggagtcgtgaaccactgtgtgatcttttggtgtgccctgatccaaggattatcactgtgtgtctggaaggattggagaacattttgaaagttggggaagctgaaaaggtcacaggaaataccggggatgtaaacttttatgcacagctgatcgatgatgctgagggattagaaaagattgagaatctgcagagtcatgacaacagcgaaatctatgagaaggcagtgaagattcttgaaacgtactggttggaagaggaagatgaaactttaccacctggtgatccctctgcacaaggcttccagtttggaggaggtaatgatgcagccgtaccaccaggtggattcaacttccagtgaaggagctgaacatgacgatttgaagagtcgaaggagcttaaagagtttgggggcactggttaaaaagggtatgattagagagtctggtcttctgtgtaaaagtcagatggggtgccttacttagtctggcctggtccggtcagatccagtggttggtgggtttgagtcatggaataagcttgttgggggggagttgggtaggagtcatcaagggatatttatttttgggaaagggtttataagtttttaaagtgtgatctgatgagaatgtgtctctctgggtttttgttacatttgtactacacaacactgcaaagtcaaacataaaaaagttggtcaaactttatttggtcttattgg

SEQ ID NO: 102316 - protein, 363 aa, Arabidopsis thaliana
  peptide (1)..(363): Ceres Seq. ID no. 13609957
  misc_feature (113)..(154): Pfam Name: Armadillo/beta-catenin-like repeat Pfam Description: Armadillo/beta-catenin-like repeat
  misc_feature (1)..(356): Homolog of NCBI NO: 13605661 NR Description: AT3g06720/F3E22_14 [Arabidopsis thaliana]
  misc_feature (1)..(356): Homolog of NCBI NO: 25314870 NR Description: probable nuclear transport factor importin alpha
  misc_feature (1)..(363): Homolog of NCBI NO: 15230778 NR Description: importin alpha subunit [Arabidopsis thaliana]
  misc_feature (1)..(363): Homolog of NCBI NO: 25314876 NR Description: probable nuclear transport factor importin
  misc_feature (1)..(363): Homolog of NCBI NO: 15809794 NR Description: AT3g06720/F3E22_14 [Arabidopsis thaliana]
  misc_feature (1)..(363): Homolog of NCBI NO: 13699777 NR Description: AtKAP alpha [Arabidopsis thaliana]
  misc_feature (1)..(363): Homolog of NCBI NO: 18414597 NR Description: expressed protein [Arabidopsis thaliana]
  misc_feature (1)..(363): Homolog of NCBI NO: 13752562 NR Description: importin alpha 2 [Capsicum annuum]
  misc_feature (1)..(356): Homolog of NCBI NO: 34902832 NR Description: unnamed protein product [Oryza sativa (japonica
  misc_feature (1)..(363): Homolog of NCBI NO: 34897636 NR Description: putative impotin alpha 1b [Oryza sativa]
MVGGVWSDDRSLQLEATTQFRKLLSIERSPPIEEVIDAGVVPRFVEFLTREDYPQLQFEAAWALTNIASGTSENTKVVIEHGAVPIFVQLLASQSDDVREQAVWALGNVAGDSPRCRDLVLGQGALIPLLSQLNEHAKLSMLRNATWTLSNFCRGKPQPPFDQVRPALPALERLIHSTDEEVLTDACWALSYLSDGTNDKIQSVIEAGVVPRLVELLQHQSPSVLIPALRSIGNIVTGDDLQTQCVISHGALLSLLSLLTHNHKKSIKKEACWTISNITAGNRDQIQAVCEAGLICPLVNLLQNAEFDIKKEAAWAISNATSGGSPDQIKYMVEQGVVNHCVIFWCALIQGLSLCVWKDWRTF

SEQ ID NO: 102317 - protein, 223 aa, Arabidopsis thaliana
  peptide (1)..(223): Ceres Seq. ID no. 13609958
  misc_feature (1)..(216): Homolog of NCBI NO: 13605661 NR Description: AT3g06720/F3E22_14 [Arabidopsis thaliana]
  misc_feature (1)..(216): Homolog of NCBI NO: 25314870 NR Description: probable nuclear transport factor importin alpha
  misc_feature (1)..(223): Homolog of NCBI NO: 15230778 NR Description: importin alpha subunit [Arabidopsis thaliana]
  misc_feature (1)..(223): Homolog of NCBI NO: 25314876 NR Description: probable nuclear transport factor importin
  misc_feature (1)..(223): Homolog of NCBI NO: 15809794 NR Description: AT3g06720/F3E22_14 [Arabidopsis thaliana]
  misc_feature (1)..(223): Homolog of NCBI NO: 13699777 NR Description: AtKAP alpha [Arabidopsis thaliana]
  misc_feature (1)..(223): Homolog of NCBI NO: 18414597 NR Description: expressed protein [Arabidopsis thaliana]
  misc_feature (1)..(223): Homolog of NCBI NO: 13752562 NR Description: importin alpha 2 [Capsicum annuum]
  misc_feature (1)..(216): Homolog of NCBI NO: 34902832 NR Description: unnamed protein product [Oryza sativa (japonica
  misc_feature (1)..(223): Homolog of NCBI NO: 34897636 NR Description: putative impotin alpha 1b [Oryza sativa]
MLRNATWTLSNFCRGKPQPPFDQVRPALPALERLIHSTDEEVLTDACWALSYLSDGTNDKIQSVIEAGVVPRLVELLQHQSPSVLIPALRSIGNIVTGDDLQTQCVISHGALLSLLSLLTHNHKKSIKKEACWTISNITAGNRDQIQAVCEAGLICPLVNLLQNAEFDIKKEAAWAISNATSGGSPDQIKYMVEQGVVNHCVIFWCALIQGLSLCVWKDWRTF

SEQ ID NO: 102318 - DNA, 1161 bp, Arabidopsis thaliana
  misc_feature (1)..(1161): Ceres Seq. ID no. 13609977
  misc_feature: MA Experiment ID: 108462 Result: Up-regulated in Transcription
  misc_feature: MA Experiment 108462 PARAMETER Experiment Name: At_Germinating_Seeds_cDNA_P Parameter: Age (day) Value: 2 vs. 0
  misc_feature: MA Experiment 108462 PARAMETER Experiment Name: At_Germinating_Seeds_cDNA_P Parameter: Tissue Value: Germinating Seeds
  misc_feature: MA Experiment ID: 108463 Result: Up-regulated in Transcription
  misc_feature: MA Experiment 108463 PARAMETER Experiment Name: At_Germinating_Seeds_cDNA_P Parameter: Age (day) Value: 3 vs. 0
  misc_feature: MA Experiment 108463 PARAMETER Experiment Name: At_Germinating_Seeds_cDNA_P Parameter: Tissue Value: Germinating Seeds
  misc_feature: MA Experiment ID: 108464 Result: Up-regulated in Transcription
  misc_feature: MA Experiment 108464 PARAMETER Experiment Name: At_Germinating_Seeds_cDNA_P Parameter: Age (day) Value: 4 vs. 0
  misc_feature: MA Experiment 108464 PARAMETER Experiment Name: At_Germinating_Seeds_cDNA_P Parameter: Tissue Value: Germinating Seeds
  misc_feature: MA Experiment ID: 108474 Result: Down-regulated in Transcription
  misc_feature: MA Experiment 108474 PARAMETER Experiment Name: At_Drought_Flowers_cDNA_P Parameter: Timepoint (hr) Value: null
  misc_feature: MA Experiment 108474 PARAMETER Experiment Name: At_Drought_Flowers_cDNA_P Parameter: Treatment Value: Drought vs. No Drought
  misc_feature: MA Experiment ID: 108573 Result: Up-regulated in Transcription
  misc_feature: MA Experiment 108573 PARAMETER Experiment Name: At_Drought_cDNA_P Parameter: Timepoint (hr) Value: 6
  misc_feature: MA Experiment 108573 PARAMETER Experiment Name: At_Drought_cDNA_P Parameter: Tissue Value: Aerial
  misc_feature: MA Experiment 108573 PARAMETER Experiment Name: At_Drought_cDNA_P Parameter: Treatment Value: Drought vs. No Drought
  misc_feature: MA Experiment ID: 108576 Result: Up-regulated in Transcription
  misc_feature: MA Experiment 108576 PARAMETER Experiment Name: At_42deg_Heat_cDNA_P Parameter: Temperature (deg C) Value: 42 vs. 22
  misc_feature: MA Experiment 108576 PARAMETER Experiment Name: At_42deg_Heat_cDNA_P Parameter: Timepoint (hr) Value: 1
  misc_feature: MA Experiment 108576 PARAMETER Experiment Name: At_42deg_Heat_cDNA_P Parameter: Tissue Value: Aerial
  misc_feature: MA Experiment ID: 108577 Result: Up-regulated in Transcription
  misc_feature: MA Experiment 108577 PARAMETER Experiment Name: At_42deg_Heat_cDNA_P Parameter: Temperature (deg C) Value: 42 vs. 22
  misc_feature: MA Experiment 108577 PARAMETER Experiment Name: At_42deg_Heat_cDNA_P Parameter: Timepoint (hr) Value: 6
  misc_feature: MA Experiment 108577 PARAMETER Experiment Name: At_42deg_Heat_cDNA_P Parameter: Tissue Value: Aerial
  misc_feature: MA Experiment ID: 108579 Result: Up-regulated in Transcription
  misc_feature: MA Experiment 108579 PARAMETER Experiment Name: At_4deg_Cold_cDNA_P Parameter: Temperature (deg C) Value: 4 vs. 22
  misc_feature: MA Experiment 108579 PARAMETER Experiment Name: At_4deg_Cold_cDNA_P Parameter: Timepoint (hr) Value: 6
  misc_feature: MA Experiment 108579 PARAMETER Experiment Name: At_4deg_Cold_cDNA_P Parameter: Tissue Value: Aerial
  misc_feature: MA Experiment ID: 108607 Result: Up-regulated in Transcription
  misc_feature: MA Experiment 108607 PARAMETER Experiment Name: At_100uM_ABA_cDNA_P Parameter: Timepoint (hr) Value: 4
  misc_feature: MA Experiment 108607 PARAMETER Experiment Name: At_100uM_ABA_cDNA_P Parameter: Tissue Value: Aerial
  misc_feature: MA Experiment 108607 PARAMETER Experiment Name: At_100uM_ABA_cDNA_P Parameter: Treatment Value: 100uM ABA vs. No Treatment
  misc_feature: MA Experiment ID: 20000087 Result: Down-regulated in Transcription
  misc_feature: MA Experiment 20000087 PARAMETER Experiment Name: At_100uM_ABA_Mutants_cDNA_P Parameter: Plant Line Value: WS
  misc_feature: MA Experiment 20000087 PARAMETER Experiment Name: At_100uM_ABA_Mutants_cDNA_P Parameter: Timepoint (hr) Value: 6
  misc_feature: MA Experiment 20000087 PARAMETER Experiment Name: At_100uM_ABA_Mutants_cDNA_P Parameter: Tissue Value: Aerial
  misc_feature: MA Experiment 20000087 PARAMETER Experiment Name: At_100uM_ABA_Mutants_cDNA_P Parameter: Treatment Value: 100uM ABA vs. No Treatment
  misc_feature: MA Experiment ID: 20000088 Result: Up-regulated in Transcription
  misc_feature: MA Experiment 20000088 PARAMETER Experiment Name: At_100uM_ABA_Mutants_cDNA_P Parameter: Plant Line Value: Landsberg
  misc_feature: MA Experiment 20000088 PARAMETER Experiment Name: At_100uM_ABA_Mutants_cDNA_P Parameter: Timepoint (hr) Value: 6
  misc_feature: MA Experiment 20000088 PARAMETER Experiment Name: At_100uM_ABA_Mutants_cDNA_P Parameter: Tissue Value: Aerial
  misc_feature: MA Experiment 20000088 PARAMETER Experiment Name: At_100uM_ABA_Mutants_cDNA_P Parameter: Treatment Value: 100uM ABA vs. No Treatment
  misc_feature: MA Experiment ID: 20000093 Result: Up-regulated in Transcription
  misc_feature: MA Experiment 20000093 PARAMETER Experiment Name: At_42deg_Heat_cDNA_P Parameter: Temperature (deg C) Value: 42 vs. 22
  misc_feature: MA Experiment 20000093 PARAMETER Experiment Name: At_42deg_Heat_cDNA_P Parameter: Timepoint (hr) Value: 0.5
  misc_feature: MA Experiment 20000093 PARAMETER Experiment Name: At_42deg_Heat_cDNA_P Parameter: Tissue Value: Aerial
  misc_feature: MA Experiment ID: 20000111 Result: Up-regulated in Transcription
  misc_feature: MA Experiment 20000111 PARAMETER Experiment Name: At_42deg_Heat_cDNA_P Parameter: Temperature (deg C) Value: 42 vs. 22
  misc_feature: MA Experiment 20000111 PARAMETER Experiment Name: At_42deg_Heat_cDNA_P Parameter: Timepoint (hr) Value: 6
  misc_feature: MA Experiment 20000111 PARAMETER Experiment Name: At_42deg_Heat_cDNA_P Parameter: Tissue Value: Aerial
  misc_feature: MA Experiment ID: 20000112 Result: Up-regulated in Transcription
  misc_feature: MA Experiment 20000112 PARAMETER Experiment Name: At_42deg_Heat_cDNA_P Parameter: Temperature (deg C) Value: 42 vs. 22
  misc_feature: MA Experiment 20000112 PARAMETER Experiment Name: At_42deg_Heat_cDNA_P Parameter: Timepoint (hr) Value: 2
  misc_feature: MA Experiment 20000112 PARAMETER Experiment Name: At_42deg_Heat_cDNA_P Parameter: Tissue Value: Aerial
  misc_feature: MA Experiment ID: 20000144 Result: Up-regulated in Transcription
  misc_feature: MA Experiment 20000144 PARAMETER Experiment Name: At_42deg_Heat_cDNA_P Parameter: Temperature (deg C) Value: 42 vs. 22
  misc_feature: MA Experiment 20000144 PARAMETER Experiment Name: At_42deg_Heat_cDNA_P Parameter: Timepoint (hr) Value: 1
  misc_feature: MA Experiment 20000144 PARAMETER Experiment Name: At_42deg_Heat_cDNA_P Parameter: Tissue Value: Aerial
  misc_feature: MA Experiment ID: 20000171 Result: Up-regulated in Transcription
  misc_feature: MA Experiment 20000171 PARAMETER Experiment Name: At_42deg_Heat_P Parameter: Age (day) Value: 14
  misc_feature: MA Experiment 20000171 PARAMETER Experiment Name: At_42deg_Heat_P Parameter: Organism Value: A. thaliana
  misc_feature: MA Experiment 20000171 PARAMETER Experiment Name: At_42deg_Heat_P Parameter: Plant Line Value: WS
  misc_feature: MA Experiment 20000171 PARAMETER Experiment Name: At_42deg_Heat_P Parameter: Temperature (deg C) Value: 42 vs. 22
  misc_feature: MA Experiment 20000171 PARAMETER Experiment Name: At_42deg_Heat_P Parameter: Timepoint (hr) Value: 1
  misc_feature: MA Experiment 20000171 PARAMETER Experiment Name: At_42deg_Heat_P Parameter: Tissue Value: Aerial
  misc_feature: MA Experiment ID: 20000173 Result: Up-regulated in Transcription
  misc_feature: MA Experiment 20000173 PARAMETER Experiment Name: At_42deg_Heat_P Parameter: Age (day) Value: 14
  misc_feature: MA Experiment 20000173 PARAMETER Experiment Name: At_42deg_Heat_P Parameter: Organism Value: A. thaliana
  misc_feature: MA Experiment 20000173 PARAMETER Experiment Name: At_42deg_Heat_P Parameter: Plant Line Value: WS
  misc_feature: MA Experiment 20000173 PARAMETER Experiment Name: At_42deg_Heat_P Parameter: Temperature (deg C) Value: 42 vs. 22
  misc_feature: MA Experiment 20000173 PARAMETER Experiment Name: At_42deg_Heat_P Parameter: Timepoint (hr) Value: 6
  misc_feature: MA Experiment 20000173 PARAMETER Experiment Name: At_42deg_Heat_P Parameter: Tissue Value: Aerial
  misc_feature: MA Experiment ID: 20000182 Result: Up-regulated in Transcription
  misc_feature: MA Experiment 20000182 PARAMETER Experiment Name: At_2mM_SA_P Parameter: Age (day) Value: 14
  misc_feature: MA Experiment 20000182 PARAMETER Experiment Name: At_2mM_SA_P Parameter: Organism Value: A. thaliana
  misc_feature: MA Experiment 20000182 PARAMETER Experiment Name: At_2mM_SA_P Parameter: Plant Line Value: WS
  misc_feature: MA Experiment 20000182 PARAMETER Experiment Name: At_2mM_SA_P Parameter: Timepoint (hr) Value: 6
  misc_feature: MA Experiment 20000182 PARAMETER Experiment Name: At_2mM_SA_P Parameter: Tissue Value: Aerial
  misc_feature: MA Experiment 20000182 PARAMETER Experiment Name: At_2mM_SA_P Parameter: Treatment Value: 2mM SA vs. No Treatment
  misc_feature: MA Experiment ID: 20000184 Result: Up-regulated in Transcription
  misc_feature: MA Experiment 20000184 PARAMETER Experiment Name: At_Shoots__P Parameter: Age (day) Value: 7
  misc_feature: MA Experiment 20000184 PARAMETER Experiment Name: At_Shoots__P Parameter: Tissue Value: Shoots vs. Whole Plant
  misc_feature: MA Experiment ID: 20000185 Result: Down-regulated in Transcription
  misc_feature: MA Experiment 20000185 PARAMETER Experiment Name: At_Roots__P Parameter: Age (day) Value: 7 vs. 21
  misc_feature: MA Experiment 20000185 PARAMETER Experiment Name: At_Roots__P Parameter: Organism Value: A. thaliana
  misc_feature: MA Experiment 20000185 PARAMETER Experiment Name: At_Roots__P Parameter: Tissue Value: Roots vs. Whole Plant
  misc_feature: MA Experiment ID: 20000264 Result: Up-regulated in Transcription
  misc_feature: MA Experiment 20000264 PARAMETER Experiment Name: At_Open_Flower_P Parameter: Age (day) Value: 21
  misc_feature: MA Experiment 20000264 PARAMETER Experiment Name: At_Open_Flower_P Parameter: Plant Line Value: WS
  misc_feature: MA Experiment 20000264 PARAMETER Experiment Name: At_Open_Flower_P Parameter: Tissue Value: Open Flower vs. Whole Plant
  misc_feature: MA Experiment ID: 20000265 Result: Up-regulated in Transcription
  misc_feature: MA Experiment 20000265 PARAMETER Experiment Name: At_Open_Flower_P Parameter: Age (day) Value: 21
  misc_feature: MA Experiment 20000265 PARAMETER Experiment Name: At_Open_Flower_P Parameter: Plant Line Value: WS
  misc_feature: MA Experiment 20000265 PARAMETER Experiment Name: At_Open_Flower_P Parameter: Tissue Value: Closed Flower vs. Whole Plant
  misc_feature: MA Experiment ID: 20000267 Result: Up-regulated in Transcription
  misc_feature: MA Experiment 20000267 PARAMETER Experiment Name: At_Drought_P Parameter: Age (day) Value: 7
  misc_feature: MA Experiment 20000267 PARAMETER Experiment Name: At_Drought_P Parameter: Organism Value: A. thaliana
  misc_feature: MA Experiment 20000267 PARAMETER Experiment Name: At_Drought_P Parameter: Plant Line Value: WS
  misc_feature: MA Experiment 20000267 PARAMETER Experiment Name: At_Drought_P Parameter: Timepoint (hr) Value: 6
  misc_feature: MA Experiment 20000267 PARAMETER Experiment Name: At_Drought_P Parameter: Tissue Value: Whole Plant
  misc_feature: MA Experiment 20000267 PARAMETER Experiment Name: At_Drought_P Parameter: Treatment Value: Drought vs. No Drought
  misc_feature: MA Experiment ID: 20000268 Result: Up-regulated in Transcription
  misc_feature: MA Experiment 20000268 PARAMETER Experiment Name: At_100mM_NaCl__P Parameter: Age (day) Value: 14
  misc_feature: MA Experiment 20000268 PARAMETER Experiment Name: At_100mM_NaCl__P Parameter: Organism Value: A. thaliana
  misc_feature: MA Experiment 20000268 PARAMETER Experiment Name: At_100mM_NaCl__P Parameter: Plant Line Value: WS
  misc_feature: MA Experiment 20000268 PARAMETER Experiment Name: At_100mM_NaCl__P Parameter: Timepoint (hr) Value: 6
  misc_feature: MA Experiment 20000268 PARAMETER Experiment Name: At_100mM_NaCl__P Parameter: Tissue Value: Whole Plant
  misc_feature: MA Experiment 20000268 PARAMETER Experiment Name: At_100mM_NaCl__P Parameter: Treatment Value: 100mM NaCl vs. No Treatment
  misc_feature: MA Experiment ID: 20000286 Result: Up-regulated in Transcription
  misc_feature: MA Experiment 20000286 PARAMETER Experiment Name: At_Open_Flower_P Parameter: Age (day) Value: 21
  misc_feature: MA Experiment 20000286 PARAMETER Experiment Name: At_Open_Flower_P Parameter: Plant Line Value: WS
  misc_feature: MA Experiment 20000286 PARAMETER Experiment Name: At_Open_Flower_P Parameter: Tissue Value: Half Open vs. Whole Plant
  misc_feature: MA Experiment ID: 20000436 Result: Up-regulated in Transcription
  misc_feature: MA Experiment 20000436 PARAMETER Experiment Name: At_Drought_P Parameter: Age (day) Value: 7
  misc_feature: MA Experiment 20000436 PARAMETER Experiment Name: At_Drought_P Parameter: Organism Value: A. thaliana
  misc_feature: MA Experiment 20000436 PARAMETER Experiment Name: At_Drought_P Parameter: Plant Line Value: WS
  misc_feature: MA Experiment 20000436 PARAMETER Experiment Name: At_Drought_P Parameter: Timepoint (hr) Value: 12
  misc_feature: MA Experiment 20000436 PARAMETER Experiment Name: At_Drought_P Parameter: Tissue Value: Whole Plant
  misc_feature: MA Experiment 20000436 PARAMETER Experiment Name: At_Drought_P Parameter: Treatment Value: Drought vs. No Drought
  misc_feature: MA Experiment ID: 20000438 Result: Up-regulated in Transcription
  misc_feature: MA Experiment 20000438 PARAMETER Experiment Name: At_Shoots__P Parameter: Age (day) Value: 14
  misc_feature: MA Experiment 20000438 PARAMETER Experiment Name: At_Shoots__P Parameter: Tissue Value: Shoots vs. Whole Plant
  misc_feature: MA Experiment ID: 20000445 Result: Up-regulated in Transcription
  misc_feature: MA Experiment 20000445 PARAMETER Experiment Name: At_100uM_NAA__P Parameter: Age (day) Value: 14
  misc_feature: MA Experiment 20000445 PARAMETER Experiment Name: At_100uM_NAA__P Parameter: Organism Value: A. thaliana
  misc_feature: MA Experiment 20000445 PARAMETER Experiment Name: At_100uM_NAA__P Parameter: Plant Line Value: WS
  misc_feature: MA Experiment 20000445 PARAMETER Experiment Name: At_100uM_NAA__P Parameter: Timepoint (hr) Value: 6
  misc_feature: MA Experiment 20000445 PARAMETER Experiment Name: At_100uM_NAA__P Parameter: Tissue Value: Aerial
  misc_feature: MA Experiment 20000445 PARAMETER Experiment Name: At_100uM_NAA__P Parameter: Treatment Value: 100uM NAA vs. No Treatment
  misc_feature: MA Experiment ID: 20000451 Result: Down-regulated in Transcription
  misc_feature: MA Experiment 20000451 PARAMETER Experiment Name: At_CS6879_Shoots-Roots_P Parameter: Age (day) Value: 14
  misc_feature: MA Experiment 20000451 PARAMETER Experiment Name: At_CS6879_Shoots-Roots_P Parameter: Organism Value: A. thaliana
  misc_feature: MA Experiment 20000451 PARAMETER Experiment Name: At_CS6879_Shoots-Roots_P Parameter: Plant Line Value: CS6879 vs. WS
  misc_feature: MA Experiment 20000451 PARAMETER Experiment Name: At_CS6879_Shoots-Roots_P Parameter: Tissue Value: Roots
  misc_feature: MA Experiment ID: 20000495 Result: Down-regulated in Transcription
  misc_feature: MA Experiment 20000495 PARAMETER Experiment Name: At_Guard_Cells_P Parameter: Harvest Date Value: 8/2/2002
  misc_feature: MA Experiment 20000495 PARAMETER Experiment Name: At_Guard_Cells_P Parameter: Organism Value: A. thaliana
  misc_feature: MA Experiment 20000495 PARAMETER Experiment Name: At_Guard_Cells_P Parameter: Tissue Value: Guard Cells vs. Leaves
  misc_feature: MA Experiment ID: 20000573 Result: Down-regulated in Transcription
  misc_feature: MA Experiment 20000573 PARAMETER Experiment Name: At_100uM_ABA_Mutants__P Parameter: Organism Value: A. thaliana
  misc_feature: MA Experiment 20000573 PARAMETER Experiment Name: At_100uM_ABA_Mutants__P Parameter: Plant Line Value: CS22 vs. Ler wt
  misc_feature: MA Experiment 20000573 PARAMETER Experiment Name: At_100uM_ABA_Mutants__P Parameter: Timepoint (hr) Value: N/A
  misc_feature: MA Experiment 20000573 PARAMETER Experiment Name: At_100uM_ABA_Mutants__P Parameter: Tissue Value: Whole Plant
  misc_feature: MA Experiment 20000573 PARAMETER Experiment Name: At_100uM_ABA_Mutants__P Parameter: Treatment Value: None
  misc_feature: MA Experiment ID: 20000574 Result: Down-regulated in Transcription
  misc_feature: MA Experiment 20000574 PARAMETER Experiment Name: At_100uM_ABA_Mutants__P Parameter: Organism Value: A. thaliana
  misc_feature: MA Experiment 20000574 PARAMETER Experiment Name: At_100uM_ABA_Mutants__P Parameter: Plant Line Value: CS23 vs. Ler wt
  misc_feature: MA Experiment 20000574 PARAMETER Experiment Name: At_100uM_ABA_Mutants__P Parameter: Timepoint (hr) Value: N/A
  misc_feature: MA Experiment 20000574 PARAMETER Experiment Name: At_100uM_ABA_Mutants__P Parameter: Tissue Value: Whole Plant
  misc_feature: MA Experiment 20000574 PARAMETER Experiment Name: At_100uM_ABA_Mutants__P Parameter: Treatment Value: None
  misc_feature: MA Experiment ID: 20000794 Result: Up-regulated in Transcription
  misc_feature: MA Experiment 20000794 PARAMETER Experiment Name: At_Petals_P Parameter: Age (day) Value: 23-25 days
  misc_feature: MA Experiment 20000794 PARAMETER Experiment Name: At_Petals_P Parameter: Plant Line Value: WS
  misc_feature: MA Experiment 20000794 PARAMETER Experiment Name: At_Petals_P Parameter: Tissue Value: Petals vs. Whole plant
  misc_feature: MA Experiment ID: 20001248 Result: Down-regulated in Transcription
  misc_feature: MA Experiment 20001248 PARAMETER Experiment Name: At_Far-red-induction_P Parameter: Age (day) Value: 7
  misc_feature: MA Experiment 20001248 PARAMETER Experiment Name: At_Far-red-induction_P Parameter: Light Value: Far-red vs. White
  misc_feature: MA Experiment 20001248 PARAMETER Experiment Name: At_Far-red-induction_P Parameter: Organism Value: A. thaliana
  misc_feature: MA Experiment 20001248 PARAMETER Experiment Name: At_Far-red-induction_P Parameter: Plant Line Value: Columbia
  misc_feature: MA Experiment 20001248 PARAMETER Experiment Name: At_Far-red-induction_P Parameter: Timepoint (hr) Value: 4
  misc_feature: MA Experiment 20001248 PARAMETER Experiment Name: At_Far-red-induction_P Parameter: Tissue Value: Whole Plant
  misc_feature: MA Experiment ID: 20001450 Result: Down-regulated in Transcription
  misc_feature: MA Experiment 20001450 PARAMETER Experiment Name: At_Far-red-induction_P Parameter: Age (day) Value: 7
  misc_feature: MA Experiment 20001450 PARAMETER Experiment Name: At_Far-red-induction_P Parameter: Light Value: Far-red vs. White
  misc_feature: MA Experiment 20001450 PARAMETER Experiment Name: At_Far-red-induction_P Parameter: Organism Value: A. thaliana
  misc_feature: MA Experiment 20001450 PARAMETER Experiment Name: At_Far-red-induction_P Parameter: Plant Line Value: Columbia
  misc_feature: MA Experiment 20001450 PARAMETER Experiment Name: At_Far-red-induction_P Parameter: Timepoint (hr) Value: 8
  misc_feature: MA Experiment 20001450 PARAMETER Experiment Name: At_Far-red-induction_P Parameter: Tissue Value: Whole Plant
  misc_feature: MA Experiment ID: 20001451 Result: Down-regulated in Transcription
  misc_feature: MA Experiment 20001451 PARAMETER Experiment Name: At_Far-red-induction_P Parameter: Age (day) Value: 7
  misc_feature: MA Experiment 20001451 PARAMETER Experiment Name: At_Far-red-induction_P Parameter: Light Value: Far-red vs. White
  misc_feature: MA Experiment 20001451 PARAMETER Experiment Name: At_Far-red-induction_P Parameter: Organism Value: A. thaliana
  misc_feature: MA Experiment 20001451 PARAMETER Experiment Name: At_Far-red-induction_P Parameter: Plant Line Value: Columbia
  misc_feature: MA Experiment 20001451 PARAMETER Experiment Name: At_Far-red-induction_P Parameter: Timepoint (hr) Value: 24
  misc_feature: MA Experiment 20001451 PARAMETER Experiment Name: At_Far-red-induction_P Parameter: Tissue Value: Whole Plant
  misc_feature: MA Experiment ID: 20001560 Result: Down-regulated in Transcription
  misc_feature: MA Experiment 20001560 PARAMETER Experiment Name: At_Drought_Soil_Dry_P Parameter: Age (day) Value: 28
  misc_feature: MA Experiment 20001560 PARAMETER Experiment Name: At_Drought_Soil_Dry_P Parameter: Organism Value: A. thaliana
  misc_feature: MA Experiment 20001560 PARAMETER Experiment Name: At_Drought_Soil_Dry_P Parameter: Plant Line Value: WS
  misc_feature: MA Experiment 20001560 PARAMETER Experiment Name: At_Drought_Soil_Dry_P Parameter: Post Timepoint (hr) Value: None
  misc_feature: MA Experiment 20001560 PARAMETER Experiment Name: At_Drought_Soil_Dry_P Parameter: Post-Treatment Value: None
  misc_feature: MA Experiment 20001560 PARAMETER Experiment Name: At_Drought_Soil_Dry_P Parameter: Timepoint (day) Value: 14
  misc_feature: MA Experiment 20001560 PARAMETER Experiment Name: At_Drought_Soil_Dry_P Parameter: Treatment Value: Drought vs. No Drought
gaagaacaaacacaaaaatggcgacggtaccattgttcacccagtttccctgcaaaaccctaaatccaagctcatcaaacactaaacaccaatcgaaatctccgatcctactaccgattaactcaataaatcggcgatcggagattggagtctctgttcatcggccagatttcaaaatccgagcgacggacatcgacgacgaatggggtcaagatggagtggagagagtatttgcctcatcttcaaccgtatcggtagcagataaagcaatcgaatccgtggaggagacggagaggctaaagagatcactagcggattcgttgtacggaacagatcgaggtttaagcgtatcgagtgatacgagagctgagatcagcgagctcatcacacagctcgagtctaagaaccctactccagctcctaacgaagctctgtttctcctcaacggcaaatggatcctcgcctacacgtcgttcgtggggttgttcccattgctctcacgaagaattgaaccgttggttaaagtggatgagatctcacaaaccattgattccgatagcttcaccgttcaaaactctgtccggttcgctggtccgttttccacaacgtcgtttagcaccaacgctaagtttgaaatccgaagtcctaaacgtgtccagattaagttcgagcaaggtgttatagggactcctcagctaacggattcgattgaaataccggaatccgtggaggttcttggtcagaaaatcgatctcaatcccattaaaggtttacttacatcagtccaagacactgcttcttcagtggctagaaccatttcaaaccaaccaccattgaagttttctctgcctagtgacaacacgcagtcgtggctgctcacaacttatctcgacaaggaccttcggatctcgagaggcgatggtggaagcgtctatgtgctcatcaaagaaggaagctctctcttaaacccttaaatcatcataactctcatcacatccatagtaacatatatacaagtatagacccatctgtctatgtttactagtgttgtaactgttatatagcttctttacctgttggagagttataaacttataatggatgttactcttggtatactgtactacaatacatatacataactacatacttgaacaggcc

SEQ ID NO: 102319 - protein, 323 aa, Arabidopsis thaliana
  peptide (1)..(323): Ceres Seq. ID no. 13609978
  misc_feature (97)..(314): Pfam Name: PAP_fibrillin Pfam Description: PAP_fibrillin
  misc_feature (6)..(323): Homolog of NCBI NO: 15233357 NR Description: plastid-lipid associated protein PAP/fibrillin,
  misc_feature (8)..(323): Homolog of NCBI NO: 14248554 NR Description: plastid-lipid associated protein PAP1 [Brassica
  misc_feature (8)..(323): Homolog of NCBI NO: 14248548 NR Description: plastid-lipid associated protein PAP1 [Brassica
  misc_feature (6)..(323): Homolog of NCBI NO: 14248556 NR Description: plastid-lipid associated protein PAP2 [Brassica
  misc_feature (6)..(323): Homolog of NCBI NO: 15235575 NR Description: plastid-lipid associated protein (PAP), putative
  misc_feature (6)..(323): Homolog of NCBI NO: 14248550 NR Description: plastid-lipid associated protein PAP2 [Brassica
  misc_feature (6)..(323): Homolog of NCBI NO: 18377868 NR Description: AT4g22240/T10I14_70 [Arabidopsis thaliana]
  misc_feature (6)..(323): Homolog of NCBI NO: 21618237 NR Description: fibrillin precursor-like protein [Arabidopsis
  misc_feature (87)..(323): Homolog of NCBI NO: 4139097 NR Description: fibrillin [Brassica napus]
  misc_feature (6)..(323): Homolog of NCBI NO: 22261807 NR Description: Light-induced protein, chloroplast precursor
RTNTKMATVPLFTQFPCKTLNPSSSNTKHQSKSPILLPINSINRRSEIGVSVHRPDFKIRATDIDDEWGQDGVERVFASSSTVSVADKAIESVEETERLKRSLADSLYGTDRGLSVSSDTRAEISELITQLESKNPTPAPNEALFLLNGKWILAYTSFVGLFPLLSRRIEPLVKVDEISQTIDSDSFTVQNSVRFAGPFSTTSFSTNAKFEIRSPKRVQIKFEQGVIGTPQLTDSIEIPESVEVLGQKIDLNPIKGLLTSVQDTASSVARTISNQPPLKFSLPSDNTQSWLLTTYLDKDLRISRGDGGSVYVLIKEGSSLLNP

SEQ ID NO: 102320 - protein, 318 aa, Arabidopsis thaliana; identical to SEQ ID NO: 26031
  peptide (1)..(318): Ceres Seq. ID no. 13609979
  misc_feature (92)..(309): Pfam Name: PAP_fibrillin Pfam Description: PAP_fibrillin
  misc_feature (1)..(318): Homolog of NCBI NO: 15233357 NR Description: plastid-lipid associated protein PAP/fibrillin,
  misc_feature (3)..(318): Homolog of NCBI NO: 14248554 NR Description: plastid-lipid associated protein PAP1 [Brassica
  misc_feature (3)..(318): Homolog of NCBI NO: 14248548 NR Description: plastid-lipid associated protein PAP1 [Brassica
  misc_feature (1)..(318): Homolog of NCBI NO: 14248556 NR Description: plastid-lipid associated protein PAP2 [Brassica
  misc_feature (1)..(318): Homolog of NCBI NO: 15235575 NR Description: plastid-lipid associated protein (PAP), putative
  misc_feature (1)..(318): Homolog of NCBI NO: 14248550 NR Description: plastid-lipid associated protein PAP2 [Brassica
  misc_feature (1)..(318): Homolog of NCBI NO: 18377868 NR Description: AT4g22240/T10I14_70 [Arabidopsis thaliana]
  misc_feature (1)..(318): Homolog of NCBI NO: 21618237 NR Description: fibrillin precursor-like protein [Arabidopsis
  misc_feature (82)..(318): Homolog of NCBI NO: 4139097 NR Description: fibrillin [Brassica napus]
  misc_feature (1)..(318): Homolog of NCBI NO: 22261807 NR Description: Light-induced protein, chloroplast precursor

SEQ ID NO: 102321 - DNA, 666 bp, Arabidopsis thaliana
  misc_feature (1)..(666): Ceres Seq. ID no. 13609980
  misc_feature: MA Experiment ID: 108434 Result: Up-regulated in Transcription
  misc_feature: MA Experiment 108434 PARAMETER Experiment Name: At_Root_Tips_cDNA_P Parameter: Tissue Value: Root Tips
  misc_feature: MA Experiment ID: 108561 Result: Down-regulated in Transcription
  misc_feature: MA Experiment 108561 PARAMETER Experiment Name: At_100uM_ABA_cDNA_P Parameter: Timepoint (hr) Value: 6
  misc_feature: MA Experiment 108561 PARAMETER Experiment Name: At_100uM_ABA_cDNA_P Parameter: Tissue Value: Aerial
  misc_feature: MA Experiment 108561 PARAMETER Experiment Name: At_100uM_ABA_cDNA_P Parameter: Treatment Value: 100uM ABA vs. No Treatment
  misc_feature: MA Experiment ID: 108573 Result: Down-regulated in Transcription
  misc_feature: MA Experiment 108573 PARAMETER Experiment Name: At_Drought_cDNA_P Parameter: Timepoint (hr) Value: 6
  misc_feature: MA Experiment 108573 PARAMETER Experiment Name: At_Drought_cDNA_P Parameter: Tissue Value: Aerial
  misc_feature: MA Experiment 108573 PARAMETER Experiment Name: At_Drought_cDNA_P Parameter: Treatment Value: Drought vs. No Drought
  misc_feature: MA Experiment ID: 108576 Result: Down-regulated in Transcription
  misc_feature: MA Experiment 108576 PARAMETER Experiment Name: At_42deg_Heat_cDNA_P Parameter: Temperature (deg C) Value: 42 vs. 22
  misc_feature: MA Experiment 108576 PARAMETER Experiment Name: At_42deg_Heat_cDNA_P Parameter: Timepoint (hr) Value: 1
  misc_feature: MA Experiment 108576 PARAMETER Experiment Name: At_42deg_Heat_cDNA_P Parameter: Tissue Value: Aerial
  misc_feature: MA Experiment ID: 108579 Result: Up-regulated in Transcription
  misc_feature: MA Experiment 108579 PARAMETER Experiment Name: At_4deg_Cold_cDNA_P Parameter: Temperature (deg C) Value: 4 vs. 22
  misc_feature: MA Experiment 108579 PARAMETER Experiment Name: At_4deg_Cold_cDNA_P Parameter: Timepoint (hr) Value: 6
  misc_feature: MA Experiment 108579 PARAMETER Experiment Name: At_4deg_Cold_cDNA_P Parameter: Tissue Value: Aerial
  misc_feature: MA Experiment ID: 108585 Result: Down-regulated in Transcription
  misc_feature: MA Experiment 108585 PARAMETER Experiment Name: At_5mM_NaNP_cDNA_P Parameter: Timepoint (hr) Value: 6
  misc_feature: MA Experiment 108585 PARAMETER Experiment Name: At_5mM_NaNP_cDNA_P Parameter: Tissue Value: Aerial
  misc_feature: MA Experiment 108585 PARAMETER Experiment Name: At_5mM_NaNP_cDNA_P Parameter: Treatment Value: null
  misc_feature: MA Experiment ID: 20000093 Result: Down-regulated in Transcription
  misc_feature: MA Experiment 20000093 PARAMETER Experiment Name: At_42deg_Heat_cDNA_P Parameter: Temperature (deg C) Value: 42 vs. 22
  misc_feature: MA Experiment 20000093 PARAMETER Experiment Name: At_42deg_Heat_cDNA_P Parameter: Timepoint (hr) Value: 0.5
  misc_feature: MA Experiment 20000093 PARAMETER Experiment Name: At_42deg_Heat_cDNA_P Parameter: Tissue Value: Aerial
  misc_feature: MA Experiment ID: 20000111 Result: Down-regulated in Transcription
  misc_feature: MA Experiment 20000111 PARAMETER Experiment Name: At_42deg_Heat_cDNA_P Parameter: Temperature (deg C) Value: 42 vs. 22
  misc_feature: MA Experiment 20000111 PARAMETER Experiment Name: At_42deg_Heat_cDNA_P Parameter: Timepoint (hr) Value: 6
  misc_feature: MA Experiment 20000111 PARAMETER Experiment Name: At_42deg_Heat_cDNA_P Parameter: Tissue Value: Aerial
  misc_feature: MA Experiment ID: 20000112 Result: Down-regulated in Transcription
  misc_feature: MA Experiment 20000112 PARAMETER Experiment Name: At_42deg_Heat_cDNA_P Parameter: Temperature (deg C) Value: 42 vs. 22
  misc_feature: MA Experiment 20000112 PARAMETER Experiment Name: At_42deg_Heat_cDNA_P Parameter: Timepoint (hr) Value: 2
  misc_feature: MA Experiment 20000112 PARAMETER Experiment Name: At_42deg_Heat_cDNA_P Parameter: Tissue Value: Aerial
  misc_feature: MA Experiment ID: 20000113 Result: Down-regulated in Transcription
  misc_feature: MA Experiment 20000113 PARAMETER Experiment Name: At_42deg_Heat_cDNA_P Parameter: Temperature (deg C) Value: 42 vs. 22
  misc_feature: MA Experiment 20000113 PARAMETER Experiment Name: At_42deg_Heat_cDNA_P Parameter: Timepoint (hr) Value: 8
  misc_feature: MA Experiment 20000113 PARAMETER Experiment Name: At_42deg_Heat_cDNA_P Parameter: Tissue Value: Aerial
  misc_feature: MA Experiment ID: 20000117 Result: Down-regulated in Transcription
  misc_feature: MA Experiment 20000117 PARAMETER Experiment Name: At_100uM_ABA_Mutants_cDNA_P Parameter: Plant Line Value: Columbia
  misc_feature: MA Experiment 20000117 PARAMETER Experiment Name: At_100uM_ABA_Mutants_cDNA_P Parameter: Timepoint (hr) Value: 6
  misc_feature: MA Experiment 20000117 PARAMETER Experiment Name: At_100uM_ABA_Mutants_cDNA_P Parameter: Tissue Value: Aerial
  misc_feature: MA Experiment 20000117 PARAMETER Experiment Name: At_100uM_ABA_Mutants_cDNA_P Parameter: Treatment Value: 100uM ABA vs. No Treatment
  misc_feature: MA Experiment ID: 20000144 Result: Down-regulated in Transcription
  misc_feature: MA Experiment 20000144 PARAMETER Experiment Name: At_42deg_Heat_cDNA_P Parameter: Temperature (deg C) Value: 42 vs. 22
  misc_feature: MA Experiment 20000144 PARAMETER Experiment Name: At_42deg_Heat_cDNA_P Parameter: Timepoint (hr) Value: 1
  misc_feature: MA Experiment 20000144 PARAMETER Experiment Name: At_42deg_Heat_cDNA_P Parameter: Tissue Value: Aerial
  misc_feature: MA Experiment ID: 20000173 Result: Down-regulated in Transcription
  misc_feature: MA Experiment 20000173 PARAMETER Experiment Name: At_42deg_Heat_P Parameter: Age (day) Value: 14
  misc_feature: MA Experiment 20000173 PARAMETER Experiment Name: At_42deg_Heat_P Parameter: Organism Value: A. thaliana
  misc_feature: MA Experiment 20000173 PARAMETER Experiment Name: At_42deg_Heat_P Parameter: Plant Line Value: WS
  misc_feature: MA Experiment 20000173 PARAMETER Experiment Name: At_42deg_Heat_P Parameter: Temperature (deg C) Value: 42 vs. 22
  misc_feature: MA Experiment 20000173 PARAMETER Experiment Name: At_42deg_Heat_P Parameter: Timepoint (hr) Value: 6
  misc_feature: MA Experiment 20000173 PARAMETER Experiment Name: At_42deg_Heat_P Parameter: Tissue Value: Aerial
  misc_feature: MA Experiment ID: 20000213 Result: Up-regulated in Transcription
  misc_feature: MA Experiment 20000213 PARAMETER Experiment Name: At_4deg_Cold_P Parameter: Timepoint (hr) Value: 2
  misc_feature: MA Experiment ID: 20000227 Result: Up-regulated in Transcription
  misc_feature: MA Experiment 20000227 PARAMETER Experiment Name: At_Root-Tips-vs-Tops_P Parameter: Tissue Value: Root Tips vs. Root Tops
  misc_feature: MA Experiment ID: 20000234 Result: Up-regulated in Transcription
  misc_feature: MA Experiment 20000234 PARAMETER Experiment Name: At_Siliques_P Parameter: Age (day) Value: 21
  misc_feature: MA Experiment 20000234 PARAMETER Experiment Name: At_Siliques_P Parameter: Organism Value: A. thaliana
  misc_feature: MA Experiment 20000234 PARAMETER Experiment Name: At_Siliques_P Parameter: Plant Line Value: WS
  misc_feature: MA Experiment 20000234 PARAMETER Experiment Name: At_Siliques_P Parameter: Tissue Value: Less Than 5mm Siliques vs. Whole Plant
  misc_feature: MA Experiment ID: 20000235 Result: Up-regulated in Transcription
  misc_feature: MA Experiment 20000235 PARAMETER Experiment Name: At_Siliques_P Parameter: Age (day) Value: 21
  misc_feature: MA Experiment 20000235 PARAMETER Experiment Name: At_Siliques_P Parameter: Organism Value: A. thaliana
  misc_feature: MA Experiment 20000235 PARAMETER Experiment Name: At_Siliques_P Parameter: Plant Line Value: WS
  misc_feature: MA Experiment 20000235 PARAMETER Experiment Name: At_Siliques_P Parameter: Tissue Value: 5-10mm Siliques vs. Whole Plant
  misc_feature: MA Experiment ID: 20000264 Result: Up-regulated in Transcription
  misc_feature: MA Experiment 20000264 PARAMETER Experiment Name: At_Open_Flower_P Parameter: Age (day) Value: 21
  misc_feature: MA Experiment 20000264 PARAMETER Experiment Name: At_Open_Flower_P Parameter: Plant Line Value: WS
  misc_feature: MA Experiment 20000264 PARAMETER Experiment Name: At_Open_Flower_P Parameter: Tissue Value: Open Flower vs. Whole Plant
  misc_feature: MA Experiment ID: 20000265 Result: Up-regulated in Transcription
  misc_feature: MA Experiment 20000265 PARAMETER Experiment Name: At_Open_Flower_P Parameter: Age (day) Value: 21
  misc_feature: MA Experiment 20000265 PARAMETER Experiment Name: At_Open_Flower_P Parameter: Plant Line Value: WS
  misc_feature: MA Experiment 20000265 PARAMETER Experiment Name: At_Open_Flower_P Parameter: Tissue Value: Closed Flower vs. Whole Plant
  misc_feature: MA Experiment ID: 20000286 Result: Up-regulated in Transcription
  misc_feature: MA Experiment 20000286 PARAMETER Experiment Name: At_Open_Flower_P Parameter: Age (day) Value: 21
  misc_feature: MA Experiment 20000286 PARAMETER Experiment Name: At_Open_Flower_P Parameter: Plant Line Value: WS
  misc_feature: MA Experiment 20000286 PARAMETER Experiment Name: At_Open_Flower_P Parameter: Tissue Value: Half Open vs. Whole Plant
  misc_feature: MA Experiment ID: 20000437 Result: Down-regulated in Transcription
  misc_feature: MA Experiment 20000437 PARAMETER Experiment Name: At_Drought_P Parameter: Age (day) Value: 8
  misc_feature: MA Experiment 20000437 PARAMETER Experiment Name: At_Drought_P Parameter: Organism Value: A. thaliana
  misc_feature: MA Experiment 20000437 PARAMETER Experiment Name: At_Drought_P Parameter: Plant Line Value: WS
  misc_feature: MA Experiment 20000437 PARAMETER Experiment Name: At_Drought_P Parameter: Timepoint (hr) Value: 24
  misc_feature: MA Experiment 20000437 PARAMETER Experiment Name: At_Drought_P Parameter: Tissue Value: Whole Plant
  misc_feature: MA Experiment 20000437 PARAMETER Experiment Name: At_Drought_P Parameter: Treatment Value: Drought vs. No Drought
  misc_feature: MA Experiment ID: 20000441 Result: Down-regulated in Transcription
  misc_feature: MA Experiment 20000441 PARAMETER Experiment Name: At_1uM_BR-BRZ__P Parameter: Tissue Value: Shoot Apices
  misc_feature: MA Experiment 20000441 PARAMETER Experiment Name: At_1uM_BR-BRZ__P Parameter: Treatment Value: 1uM BR vs. No Treatment
  misc_feature: MA Experiment ID: 20000443 Result: Down-regulated in Transcription
  misc_feature: MA Experiment 20000443 PARAMETER Experiment Name: At_1uM_BR-BRZ__P Parameter: Tissue Value: Shoot Apices
  misc_feature: MA Experiment 20000443 PARAMETER Experiment Name: At_1uM_BR-BRZ__P Parameter: Treatment Value: 1uM BRZ vs. No Treatment
  misc_feature: MA Experiment ID: 20001555 Result: Down-regulated in Transcription
  misc_feature: MA Experiment 20001555 PARAMETER Experiment Name: At_Drought_Soil_Dry_P Parameter: Age (day) Value: 24
  misc_feature: MA Experiment 20001555 PARAMETER Experiment Name: At_Drought_Soil_Dry_P Parameter: Organism Value: A. thaliana
  misc_feature: MA Experiment 20001555 PARAMETER Experiment Name: At_Drought_Soil_Dry_P Parameter: Plant Line Value: WS
  misc_feature: MA Experiment 20001555 PARAMETER Experiment Name: At_Drought_Soil_Dry_P Parameter: Post Timepoint (hr) Value: None
  misc_feature: MA Experiment 20001555 PARAMETER Experiment Name: At_Drought_Soil_Dry_P Parameter: Post-Treatment Value: None
  misc_feature: MA Experiment 20001555 PARAMETER Experiment Name: At_Drought_Soil_Dry_P Parameter: Timepoint (day) Value: 10
  misc_feature: MA Experiment 20001555 PARAMETER Experiment Name: At_Drought_Soil_Dry_P Parameter: Treatment Value: Drought vs. No Drought
  misc_feature: MA Experiment ID: 20001556 Result: Down-regulated in Transcription
  misc_feature: MA Experiment 20001556 PARAMETER Experiment Name: At_Drought_Soil_Dry_P Parameter: Age (day) Value: 26
  misc_feature: MA Experiment 20001556 PARAMETER Experiment Name: At_Drought_Soil_Dry_P Parameter: Organism Value: A. thaliana
  misc_feature: MA Experiment 20001556 PARAMETER Experiment Name: At_Drought_Soil_Dry_P Parameter: Plant Line Value: WS
  misc_feature: MA Experiment 20001556 PARAMETER Experiment Name: At_Drought_Soil_Dry_P Parameter: Post Timepoint (hr) Value: None
  misc_feature: MA Experiment 20001556 PARAMETER Experiment Name: At_Drought_Soil_Dry_P Parameter: Post-Treatment Value: None
  misc_feature: MA Experiment 20001556 PARAMETER Experiment Name: At_Drought_Soil_Dry_P Parameter: Timepoint (day) Value: 12
  misc_feature: MA Experiment 20001556 PARAMETER Experiment Name: At_Drought_Soil_Dry_P Parameter: Treatment Value: Drought vs. No Drought
  misc_feature: MA Experiment ID: 20001557 Result: Down-regulated in Transcription
  misc_feature: MA Experiment 20001557 PARAMETER Experiment Name: At_Drought_Soil_Dry_P Parameter: Age (day) Value: 27
  misc_feature: MA Experiment 20001557 PARAMETER Experiment Name: At_Drought_Soil_Dry_P Parameter: Organism Value: A. thaliana
  misc_feature: MA Experiment 20001557 PARAMETER Experiment Name: At_Drought_Soil_Dry_P Parameter: Plant Line Value: WS
  misc_feature: MA Experiment 20001557 PARAMETER Experiment Name: At_Drought_Soil_Dry_P Parameter: Post Timepoint (hr) Value: 3
  misc_feature: MA Experiment 20001557 PARAMETER Experiment Name: At_Drought_Soil_Dry_P Parameter: Post-Treatment Value: Re-Water vs. No Drought
  misc_feature: MA Experiment 20001557 PARAMETER Experiment Name: At_Drought_Soil_Dry_P Parameter: Timepoint (day) Value: 13
  misc_feature: MA Experiment 20001557 PARAMETER Experiment Name: At_Drought_Soil_Dry_P Parameter: Treatment Value: Drought vs. No Drought
  misc_feature: MA Experiment ID: 20001559 Result: Down-regulated in Transcription
  misc_feature: MA Experiment 20001559 PARAMETER Experiment Name: At_Drought_Soil_Dry_P Parameter: Age (day) Value: 28
  misc_feature: MA Experiment 20001559 PARAMETER Experiment Name: At_Drought_Soil_Dry_P Parameter: Organism Value: A. thaliana
  misc_feature: MA Experiment 20001559 PARAMETER Experiment Name: At_Drought_Soil_Dry_P Parameter: Plant Line Value: WS
  misc_feature: MA Experiment 20001559 PARAMETER Experiment Name: At_Drought_Soil_Dry_P Parameter: Post Timepoint (hr) Value: 29
  misc_feature: MA Experiment 20001559 PARAMETER Experiment Name: At_Drought_Soil_Dry_P Parameter: Post-Treatment Value: Re-Water vs. No Drought
  misc_feature: MA Experiment 20001559 PARAMETER Experiment Name: At_Drought_Soil_Dry_P Parameter: Timepoint (day) Value: 14
  misc_feature: MA Experiment 20001559 PARAMETER Experiment Name: At_Drought_Soil_Dry_P Parameter: Treatment Value: Drought vs. No Drought
  misc_feature: MA Experiment ID: 20001560 Result: Up-regulated in Transcription
  misc_feature: MA Experiment 20001560 PARAMETER Experiment Name: At_Drought_Soil_Dry_P Parameter: Age (day) Value: 28
  misc_feature: MA Experiment 20001560 PARAMETER Experiment Name: At_Drought_Soil_Dry_P Parameter: Organism Value: A. thaliana
  misc_feature: MA Experiment 20001560 PARAMETER Experiment Name: At_Drought_Soil_Dry_P Parameter: Plant Line Value: WS
  misc_feature: MA Experiment 20001560 PARAMETER Experiment Name: At_Drought_Soil_Dry_P Parameter: Post Timepoint (hr) Value: None
  misc_feature: MA Experiment 20001560 PARAMETER Experiment Name: At_Drought_Soil_Dry_P Parameter: Post-Treatment Value: None
  misc_feature: MA Experiment 20001560 PARAMETER Experiment Name: At_Drought_Soil_Dry_P Parameter: Timepoint (day) Value: 14
  misc_feature: MA Experiment 20001560 PARAMETER Experiment Name: At_Drought_Soil_Dry_P Parameter: Treatment Value: Drought vs. No Drought
  misc_feature: MA Experiment ID: 20001905 Result: Down-regulated in Transcription
  misc_feature: MA Experiment 20001905 PARAMETER Experiment Name: At_Drought_Reproduction_P Parameter: Age (day) Value: 40
  misc_feature: MA Experiment 20001905 PARAMETER Experiment Name: At_Drought_Reproduction_P Parameter: Organism Value: A. thaliana
  misc_feature: MA Experiment 20001905 PARAMETER Experiment Name: At_Drought_Reproduction_P Parameter: Plant Line Value: WS
  misc_feature: MA Experiment 20001905 PARAMETER Experiment Name: At_Drought_Reproduction_P Parameter: Timepoint (day) Value: 10
  misc_feature: MA Experiment 20001905 PARAMETER Experiment Name: At_Drought_Reproduction_P Parameter: Tissue Value: Rosettes
  misc_feature: MA Experiment 20001905 PARAMETER Experiment Name: At_Drought_Reproduction_P Parameter: Treatment Value: Drought vs. No Drought
  misc_feature: MA Experiment ID: 20001911 Result: Down-regulated in Transcription
  misc_feature: MA Experiment 20001911 PARAMETER Experiment Name: At_Drought_Reproduction_P Parameter: Age (day) Value: 40
  misc_feature: MA Experiment 20001911 PARAMETER Experiment Name: At_Drought_Reproduction_P Parameter: Organism Value: A. thaliana
  misc_feature: MA Experiment 20001911 PARAMETER Experiment Name: At_Drought_Reproduction_P Parameter: Plant Line Value: WS
  misc_feature: MA Experiment 20001911 PARAMETER Experiment Name: At_Drought_Reproduction_P Parameter: Timepoint (day) Value: 10
  misc_feature: MA Experiment 20001911 PARAMETER Experiment Name: At_Drought_Reproduction_P Parameter: Tissue Value: Flowers
  misc_feature: MA Experiment 20001911 PARAMETER Experiment Name: At_Drought_Reproduction_P Parameter: Treatment Value: Drought vs. No Drought
ttcactacaaaatttctcattcgcatcctccacaagaagaaaattcgatcggtcgattagtctttgtttgatttcgaaatggctcgtactaagcaaaccgcgaggaaatccacaggaggcaaagcaccaagaaagcaactcgcaaccaaggcggcaaggaaatctgctccggccaccggaggagtgaagaagccgcatagattccgtccaggaactgttgccttgagagagatcaggaagtatcagaagagcactgagcttctgatccgtaagcttcctttccagcgtctggttcgtgagatagctcaggatttcaagacggatctgaggtttcagagcagtgctgttgctgctttacaagaggctgctgaggcttaccttgttggtttgtttgaagacactaatctttgcgccattcacgctaagagggtcaccatcatgcctaaggatatccagctcgcgaggagaatcagaggagaaagagcttgaagactgttgttatggtttatatcttttgatttagttcgtcaatggaactctatttctggattttgatttgcgttttagtagtaatgggttcttgtaagtgttgagctttggctcgttttaattttcagttgttaggtactttggtttagttagccttgaagtgttcgatgaaatacc

SEQ ID NO: 102322 - protein, 136 aa, Arabidopsis thaliana; identical to SEQ ID NO: 8709
  peptide (1)..(136): Ceres Seq. ID no. 13609981
  misc_feature (17)..(135): Pfam Name: Core histone H2A/H2B/H3/H4 Pfam Description: Core histone H2A/H2B/H3/H4
  misc_feature (1)..(136): Homolog of NCBI NO: 15232146 NR Description: histone H3 [Arabidopsis thaliana] histone H3 [Arabidopsis thaliana] >gi|18390992|ref|NP_563838.1|
  misc_feature (1)..(136): Homolog of NCBI NO: 122087 NR Description: Histone H3 >gi|81849|pir||S04520 histone H3
  misc_feature (1)..(136): Homolog of NCBI NO: 1362108 NR Description: histone H3 homolog - common tobacco
  misc_feature (1)..(136): Homolog of NCBI NO: 37546835 NR Description: similar to histone protein Hist2h3c1 [Homo
  misc_feature (1)..(136): Homolog of NCBI NO: 166384 NR Description: histone H3 (H3-1.1)
  misc_feature (2)..(136): Homolog of NCBI NO: 70753 NR Description: histone H3 - garden pea (tentative sequence)
  misc_feature (2)..(136): Homolog of NCBI NO: 122083 NR Description: Histone H3 >gi|70751|pir||HSEAH3 histone H3 -
  misc_feature (1)..(136): Homolog of NCBI NO: 30061401 NR Description: histone 2, H3ca1 [Mus musculus]
  misc_feature (1)..(136): Homolog of NCBI NO: 34876364 NR Description: similar to CG31613-PA [Rattus norvegicus]
  misc_feature (1)..(136): Homolog of NCBI NO: 122070 NR Description: Histone H3 >gi|82483|pir||A25564 histone H3 - >gi|169793|gb|AAA33907.1| histone 3 >gi|940018|gb|AAA74190.1|

SEQ ID NO: 102323 - DNA, 642 bp, Arabidopsis thaliana
  misc_feature (1)..(642): Ceres Seq. ID no. 13609982
  misc_feature: MA Experiment ID: 108434 Result: Up-regulated in Transcription
  misc_feature: MA Experiment 108434 PARAMETER Experiment Name: At_Root_Tips_cDNA_P Parameter: Tissue Value: Root Tips
  misc_feature: MA Experiment ID: 108461 Result: Up-regulated in Transcription
  misc_feature: MA Experiment 108461 PARAMETER Experiment Name: At_Germinating_Seeds_cDNA_P Parameter: Age (day) Value: 1 vs. 0
  misc_feature: MA Experiment 108461 PARAMETER Experiment Name: At_Germinating_Seeds_cDNA_P Parameter: Tissue Value: Germinating Seeds
  misc_feature: MA Experiment ID: 108462 Result: Up-regulated in Transcription
  misc_feature: MA Experiment 108462 PARAMETER Experiment Name: At_Germinating_Seeds_cDNA_P Parameter: Age (day) Value: 2 vs. 0
  misc_feature: MA Experiment 108462 PARAMETER Experiment Name: At_Germinating_Seeds_cDNA_P Parameter: Tissue Value: Germinating Seeds
  misc_feature: MA Experiment ID: 108569 Result: Down-regulated in Transcription
  misc_feature: MA Experiment 108569 PARAMETER Experiment Name: At_0.001%_MeJA__cDNA_P Parameter: Timepoint (hr) Value: 6
  misc_feature: MA Experiment 108569 PARAMETER Experiment Name: At_0.001%_MeJA__cDNA_P Parameter: Tissue Value: Aerial
  misc_feature: MA Experiment 108569 PARAMETER Experiment Name: At_0.001%_MeJA__cDNA_P Parameter: Treatment Value: 0.001% MeJA vs. No Treatment
  misc_feature: MA Experiment ID: 108573 Result: Down-regulated in Transcription
  misc_feature: MA Experiment 108573 PARAMETER Experiment Name: At_Drought_cDNA_P Parameter: Timepoint (hr) Value: 6
  misc_feature: MA Experiment 108573 PARAMETER Experiment Name: At_Drought_cDNA_P Parameter: Tissue Value: Aerial
  misc_feature: MA Experiment 108573 PARAMETER Experiment Name: At_Drought_cDNA_P Parameter: Treatment Value: Drought vs. No Drought
  misc_feature: MA Experiment ID: 108595 Result: Up-regulated in Transcription
  misc_feature: MA Experiment 108595 PARAMETER Experiment Name: At_Ler-pi_Ovule_cDNA_P Parameter: Plant Line Value: null
  misc_feature: MA Experiment ID: 20000111 Result: Down-regulated in Transcription
  misc_feature: MA Experiment 20000111 PARAMETER Experiment Name: At_42deg_Heat_cDNA_P Parameter: Temperature (deg C) Value: 42 vs. 22
  misc_feature: MA Experiment 20000111 PARAMETER Experiment Name: At_42deg_Heat_cDNA_P Parameter: Timepoint (hr) Value: 6
  misc_feature: MA Experiment 20000111 PARAMETER Experiment Name: At_42deg_Heat_cDNA_P Parameter: Tissue Value: Aerial
  misc_feature: MA Experiment ID: 20000112 Result: Down-regulated in Transcription
  misc_feature: MA Experiment 20000112 PARAMETER Experiment Name: At_42deg_Heat_cDNA_P Parameter: Temperature (deg C) Value: 42 vs. 22
  misc_feature: MA Experiment 20000112 PARAMETER Experiment Name: At_42deg_Heat_cDNA_P Parameter: Timepoint (hr) Value: 2
  misc_feature: MA Experiment 20000112 PARAMETER Experiment Name: At_42deg_Heat_cDNA_P Parameter: Tissue Value: Aerial
  misc_feature: MA Experiment ID: 20000113 Result: Down-regulated in Transcription
  misc_feature: MA Experiment 20000113 PARAMETER Experiment Name: At_42deg_Heat_cDNA_P Parameter: Temperature (deg C) Value: 42 vs. 22
  misc_feature: MA Experiment 20000113 PARAMETER Experiment Name: At_42deg_Heat_cDNA_P Parameter: Timepoint (hr) Value: 8
  misc_feature: MA Experiment 20000113 PARAMETER Experiment Name: At_42deg_Heat_cDNA_P Parameter: Tissue Value: Aerial
  misc_feature: MA Experiment ID: 20000117 Result: Down-regulated in Transcription
  misc_feature: MA Experiment 20000117 PARAMETER Experiment Name: At_100uM_ABA_Mutants_cDNA_P Parameter: Plant Line Value: Columbia
  misc_feature: MA Experiment 20000117 PARAMETER Experiment Name: At_100uM_ABA_Mutants_cDNA_P Parameter: Timepoint (hr) Value: 6
  misc_feature: MA Experiment 20000117 PARAMETER Experiment Name: At_100uM_ABA_Mutants_cDNA_P Parameter: Tissue Value: Aerial
  misc_feature: MA Experiment 20000117 PARAMETER Experiment Name: At_100uM_ABA_Mutants_cDNA_P Parameter: Treatment Value: 100uM ABA vs. No Treatment
  misc_feature: MA Experiment ID: 20000144 Result: Down-regulated in Transcription
  misc_feature: MA Experiment 20000144 PARAMETER Experiment Name: At_42deg_Heat_cDNA_P Parameter: Temperature (deg C) Value: 42 vs. 22
  misc_feature: MA Experiment 20000144 PARAMETER Experiment Name: At_42deg_Heat_cDNA_P Parameter: Timepoint (hr) Value: 1
  misc_feature: MA Experiment 20000144 PARAMETER Experiment Name: At_42deg_Heat_cDNA_P Parameter: Tissue Value: Aerial
  misc_feature: MA Experiment ID: 20000224 Result: Up-regulated in Transcription
  misc_feature: MA Experiment ID: 20000306 Result: Up-regulated in Transcription
  misc_feature: MA Experiment 20000306 PARAMETER Experiment Name: At_Germinating_Seeds_Sub_P Parameter: Age (hr) Value: 6 vs. 0
  misc_feature: MA Experiment 20000306 PARAMETER Experiment Name: At_Germinating_Seeds_Sub_P Parameter: Organism Value: A. thaliana
  misc_feature: MA Experiment 20000306 PARAMETER Experiment Name: At_Germinating_Seeds_Sub_P Parameter: Plant Line Value: WS
  misc_feature: MA Experiment 20000306 PARAMETER Experiment Name: At_Germinating_Seeds_Sub_P Parameter: Tissue Value: Germinating Seeds
  misc_feature: MA Experiment ID: 20000307 Result: Up-regulated in Transcription
  misc_feature: MA Experiment 20000307 PARAMETER Experiment Name: At_Germinating_Seeds_Sub_P Parameter: Age (hr) Value: 24 vs. 0
  misc_feature: MA Experiment 20000307 PARAMETER Experiment Name: At_Germinating_Seeds_Sub_P Parameter: Organism Value: A. thaliana
  misc_feature: MA Experiment 20000307 PARAMETER Experiment Name: At_Germinating_Seeds_Sub_P Parameter: Plant Line Value: WS
  misc_feature: MA Experiment 20000307 PARAMETER Experiment Name: At_Germinating_Seeds_Sub_P Parameter: Tissue Value: Germinating Seeds
  misc_feature: MA Experiment ID: 20000328 Result: Down-regulated in Transcription
  misc_feature: MA Experiment 20000328 PARAMETER Experiment Name: At_42deg_Heat_Sub_P Parameter: Age (day) Value: 14
  misc_feature: MA Experiment 20000328 PARAMETER Experiment Name: At_42deg_Heat_Sub_P Parameter: Organism Value: A. thaliana
  misc_feature: MA Experiment 20000328 PARAMETER Experiment Name: At_42deg_Heat_Sub_P Parameter: Plant Line Value: WS
  misc_feature: MA Experiment 20000328 PARAMETER Experiment Name: At_42deg_Heat_Sub_P Parameter: Temperature (deg C) Value: 42 vs. 22
  misc_feature: MA Experiment 20000328 PARAMETER Experiment Name: At_42deg_Heat_Sub_P Parameter: Timepoint (hr) Value: 6
  misc_feature: MA Experiment 20000328 PARAMETER Experiment Name: At_42deg_Heat_Sub_P Parameter: Tissue Value: Aerial
atcgatcgcattctcaccgaatcaaatccaaaagagcaaatttacaatcttgcgaactcctaaaatggctcgtaccaagcaaacagctcgtaaatccaccggaggaaaggcaccaaggaagcaactcgcgaccaaagctgcgaggaaatcagctccagccaccggaggagtgaagaagccacacagattccgtccaggaacggtggcgttgagagaaatcaggaagtatcagaagagtactgagcttttgatccgtaagcttccgttccagagattggttcgtgagattgctcaagatttcaagacggatctgaggttccagagcagtgccgtcgcagctcttcaggaagcagctgaggcttatcttgttgggctctttgaagatactaatctctgtgcgattcatgctaagagggttacgattatgcctaaggatatccagcttgcgaggagaatcagaggagagagggcttaagtgaacgaagatgatgaagattaagaagactagtcgtttagttatggattagcttgtttggtttcaatggatatgtaaagctgtctcttttcgttttcgagtgttattagttttttacttagatgtgtcttccagatgttcgatgaaatgcctaaaggaaattttaa

SEQ ID NO: 102324 - protein, 157 aa, Arabidopsis thaliana
  peptide (1)..(157): Ceres Seq. ID no. 13609983
  misc_feature (38)..(156): Pfam Name: Core histone H2A/H2B/H3/H4 Pfam Description: Core histone H2A/H2B/H3/H4
  misc_feature (22)..(157): Homolog of NCBI NO: 15232146 NR Description: histone H3 [Arabidopsis thaliana] histone H3 [Arabidopsis thaliana] >gi|18390992|ref|NP_563838.1|
  misc_feature (22)..(157): Homolog of NCBI NO: 122087 NR Description: Histone H3 >gi|81849|pir||S04520 histone H3
  misc_feature (22)..(157): Homolog of NCBI NO: 1362108 NR Description: histone H3 homolog - common tobacco
  misc_feature (22)..(157): Homolog of NCBI NO: 166384 NR Description: histone H3 (H3-1.1)
  misc_feature (23)..(157): Homolog of NCBI NO: 70753 NR Description: histone H3 - garden pea (tentative sequence)
  misc_feature (23)..(157): Homolog of NCBI NO: 122083 NR Description: Histone H3 >gi|70751|pir||HSEAH3 histone H3 -
  misc_feature (22)..(157): Homolog of NCBI NO: 122070 NR Description: Histone H3 >gi|82483|pir||A25564 histone H3 - >gi|169793|gb|AAA33907.1| histone 3 >gi|940018|gb|AAA74190.1|
  misc_feature (21)..(157): Homolog of NCBI NO: 34876364 NR Description: similar to CG31613-PA [Rattus norvegicus]
  misc_feature (22)..(157): Homolog of NCBI NO: 7305139 NR Description: histone 1, H3f; histone H3; histone gene complex
  misc_feature (22)..(157): Homolog of NCBI NO: 30061401 NR Description: histone 2, H3ca1 [Mus musculus]
SIAFSPNQIQKSKFTILRTPKMARTKQTARKSTGGKAPRKQLATKAARKSAPATGGVKKPHRFRPGTVALREIRKYQKSTELLIRKLPFQRLVREIAQDFKTDLRFQSSAVAALQEAAEAYLVGLFEDTNLCAIHAKRVTIMPKDIQLARRIRGERA

SEQ ID NO: 102325 - protein, 136 aa, Arabidopsis thaliana; identical to SEQ ID NO: 8709
  peptide (1)..(136): Ceres Seq. ID no. 13609984
  misc_feature (17)..(135): Pfam Name: Core histone H2A/H2B/H3/H4 Pfam Description: Core histone H2A/H2B/H3/H4
  misc_feature (1)..(136): Homolog of NCBI NO: 15232146 NR Description: histone H3 [Arabidopsis thaliana] histone H3 [Arabidopsis thaliana] >gi|18390992|ref|NP_563838.1|
  misc_feature (1)..(136): Homolog of NCBI NO: 122087 NR Description: Histone H3 >gi|81849|pir||S04520 histone H3
  misc_feature (1)..(136): Homolog of NCBI NO: 1362108 NR Description: histone H3 homolog - common tobacco
  misc_feature (1)..(136): Homolog of NCBI NO: 166384 NR Description: histone H3 (H3-1.1)
  misc_feature (2)..(136): Homolog of NCBI NO: 70753 NR Description: histone H3 - garden pea (tentative sequence)
  misc_feature (2)..(136): Homolog of NCBI NO: 122083 NR Description: Histone H3 >gi|70751|pir||HSEAH3 histone H3 -
  misc_feature (1)..(136): Homolog of NCBI NO: 122070 NR Description: Histone H3 >gi|82483|pir||A25564 histone H3 - >gi|169793|gb|AAA33907.1| histone 3 >gi|940018|gb|AAA74190.1|
  misc_feature (1)..(136): Homolog of NCBI NO: 34876364 NR Description: similar to CG31613-PA [Rattus norvegicus]
  misc_feature (1)..(136): Homolog of NCBI NO: 7305139 NR Description: histone 1, H3f; histone H3; histone gene complex
  misc_feature (1)..(136): Homolog of NCBI NO: 30061401 NR Description: histone 2, H3ca1 [Mus musculus]

SEQ ID NO: 102326 - DNA, 1791 bp, Arabidopsis thaliana
  misc_feature (1)..(1791): Ceres Seq. ID no. 13609989
  misc_feature: MA Experiment ID: 20000166 Result: Up-regulated in Transcription
  misc_feature: MA Experiment 20000166 PARAMETER Experiment Name: At_100uM_ABA_P Parameter: Age (day) Value: 14
  misc_feature: MA Experiment 20000166 PARAMETER Experiment Name: At_100uM_ABA_P Parameter: Organism Value: A. thaliana
  misc_feature: MA Experiment 20000166 PARAMETER Experiment Name: At_100uM_ABA_P Parameter: Plant Line Value: WS
  misc_feature: MA Experiment 20000166 PARAMETER Experiment Name: At_100uM_ABA_P Parameter: Timepoint (hr) Value: 1
  misc_feature: MA Experiment 20000166 PARAMETER Experiment Name: At_100uM_ABA_P Parameter: Tissue Value: Aerial
  misc_feature: MA Experiment 20000166 PARAMETER Experiment Name: At_100uM_ABA_P Parameter: Treatment Value: 100uM ABA vs. No Treatment
  misc_feature: MA Experiment ID: 20000173 Result: Down-regulated in Transcription
  misc_feature: MA Experiment 20000173 PARAMETER Experiment Name: At_42deg_Heat_P Parameter: Age (day) Value: 14
  misc_feature: MA Experiment 20000173 PARAMETER Experiment Name: At_42deg_Heat_P Parameter: Organism Value: A. thaliana
  misc_feature: MA Experiment 20000173 PARAMETER Experiment Name: At_42deg_Heat_P Parameter: Plant Line Value: WS
  misc_feature: MA Experiment 20000173 PARAMETER Experiment Name: At_42deg_Heat_P Parameter: Temperature (deg C) Value: 42 vs. 22
  misc_feature: MA Experiment 20000173 PARAMETER Experiment Name: At_42deg_Heat_P Parameter: Timepoint (hr) Value: 6
  misc_feature: MA Experiment 20000173 PARAMETER Experiment Name: At_42deg_Heat_P Parameter: Tissue Value: Aerial
  misc_feature: MA Experiment ID: 20000184 Result: Down-regulated in Transcription
  misc_feature: MA Experiment 20000184 PARAMETER Experiment Name: At_Shoots__P Parameter: Age (day) Value: 7
  misc_feature: MA Experiment 20000184 PARAMETER Experiment Name: At_Shoots__P Parameter: Tissue Value: Shoots vs. Whole Plant
  misc_feature: MA Experiment ID: 20000185 Result: Down-regulated in Transcription
  misc_feature: MA Experiment 20000185 PARAMETER Experiment Name: At_Roots__P Parameter: Age (day) Value: 7 vs. 21
  misc_feature: MA Experiment 20000185 PARAMETER Experiment Name: At_Roots__P Parameter: Organism Value: A. thaliana
  misc_feature: MA Experiment 20000185 PARAMETER Experiment Name: At_Roots__P Parameter: Tissue Value: Roots vs. Whole Plant
  misc_feature: MA Experiment ID: 20000265 Result: Down-regulated in Transcription
  misc_feature: MA Experiment 20000265 PARAMETER Experiment Name: At_Open_Flower_P Parameter: Age (day) Value: 21
  misc_feature: MA Experiment 20000265 PARAMETER Experiment Name: At_Open_Flower_P Parameter: Plant Line Value: WS
  misc_feature: MA Experiment 20000265 PARAMETER Experiment Name: At_Open_Flower_P Parameter: Tissue Value: Closed Flower vs. Whole Plant
  misc_feature: MA Experiment ID: 20000438 Result: Down-regulated in Transcription
  misc_feature: MA Experiment 20000438 PARAMETER Experiment Name: At_Shoots__P Parameter: Age (day) Value: 14
  misc_feature: MA Experiment 20000438 PARAMETER Experiment Name: At_Shoots__P Parameter: Tissue Value: Shoots vs. Whole Plant
  misc_feature: MA Experiment ID: 20000439 Result: Down-regulated in Transcription
  misc_feature: MA Experiment 20000439 PARAMETER Experiment Name: At_Roots__P Parameter: Age (day) Value: 14 vs. 21
  misc_feature: MA Experiment 20000439 PARAMETER Experiment Name: At_Roots__P Parameter: Organism Value: A. thaliana
  misc_feature: MA Experiment 20000439 PARAMETER Experiment Name: At_Roots__P Parameter: Tissue Value: Roots vs. Whole Plant
  misc_feature: MA Experiment ID: 20000794 Result: Up-regulated in Transcription
  misc_feature: MA Experiment 20000794 PARAMETER Experiment Name: At_Petals_P Parameter: Age (day) Value: 23-25 days
  misc_feature: MA Experiment 20000794 PARAMETER Experiment Name: At_Petals_P Parameter: Plant Line Value: WS
  misc_feature: MA Experiment 20000794 PARAMETER Experiment Name: At_Petals_P Parameter: Tissue Value: Petals vs. Whole plant
  misc_feature: MA Experiment ID: 20001557 Result: Down-regulated in Transcription
  misc_feature: MA Experiment 20001557 PARAMETER Experiment Name: At_Drought_Soil_Dry_P Parameter: Age (day) Value: 27
  misc_feature: MA Experiment 20001557 PARAMETER Experiment Name: At_Drought_Soil_Dry_P Parameter: Organism Value: A. thaliana
  misc_feature: MA Experiment 20001557 PARAMETER Experiment Name: At_Drought_Soil_Dry_P Parameter: Plant Line Value: WS
  misc_feature: MA Experiment 20001557 PARAMETER Experiment Name: At_Drought_Soil_Dry_P Parameter: Post Timepoint (hr) Value: 3
  misc_feature: MA Experiment 20001557 PARAMETER Experiment Name: At_Drought_Soil_Dry_P Parameter: Post-Treatment Value: Re-Water vs. No Drought
  misc_feature: MA Experiment 20001557 PARAMETER Experiment Name: At_Drought_Soil_Dry_P Parameter: Timepoint (day) Value: 13
  misc_feature: MA Experiment 20001557 PARAMETER Experiment Name: At_Drought_Soil_Dry_P Parameter: Treatment Value: Drought vs. No Drought
  misc_feature: MA Experiment ID: 20001757 Result: Down-regulated in Transcription
  misc_feature: MA Experiment 20001757 PARAMETER Experiment Name: At_50mM_NH4NO3_L-to-H_P Parameter: Timepoint (hr) Value: 6
  misc_feature: MA Experiment 20001757 PARAMETER Experiment Name: At_50mM_NH4NO3_L-to-H_P Parameter: Tissue Value: Leaf
  misc_feature: MA Experiment 20001757 PARAMETER Experiment Name: At_50mM_NH4NO3_L-to-H_P Parameter: Treatment Value: 50mM NH4NO3 vs 100mM Mannitol
atggatcaccaaaaagctggtactctacaatttaataataaaagaagaagaataaatataggaataaatcgtcttttttggtgtaagctacatataaaattcaaaccgtcaaacacacatacacatcgaaacccttatatttcattttctttctgttttagagaagaaagtttctataattgattgataaatctgaacatcaaagctaagaatttctcttctttttttcttcttaattcatctttccctctccgaaacagaaattcaaaaacaaattcaacacgaaaacgatggcgtttcataacaatcactttaatcatttcaccgaccaacaacaacatcagcctcctcctccgccgcaacagcagcagcaacaacattttcaagaatcagcaccccctaattggctcctccgctccgacaacaacttcctcaatctccacacagctgcctctgccgccgctacaagctccgattctccttcttccgccgccgctaaccagtggctctcacgatcctcatccttcctccaacgaggcaacaccgcaaacaacaacaacaacgaaacatccggtgacgtcatcgaagacgttcccggcggagaggagtcaatgatcggagagaagaaggaggcggagaggtggcagaatgcgagacacaaggcggagatactgtctcatccactatacgagcaacttttgtcggcacacgtggcgtgcctgaggatcgcaacgccggtggatcagcttccgaggatagacgcacagcttgctcagtctcaaaacgtcgtggctaagtactcaactttagaagccgctcaaggactcctcgccggcgatgacaaggagcttgaccacttcatgacgcattatgtactattgctttgctctttcaaagaacaactgcaacagcatgttcgtgttcatgcaatggaagctgttatggcctgttgggagattgaacagtcgcttcaaagttttacaggggtatctcctggtgaaggcacaggagcaacaatgtctgaggatgaagatgagcaagtagagagtgatgctcatttgtttgatggaagcttagatgggttagggtttggtcctctagttcccactgagagcgagagatctttgatggaacgagtcagacaagaactcaaacatgaactcaagcagggttacaaggagaaaattgtggacataagagaggagatactgaggaagagaagagctggaaaattaccaggagacaccacctctgttctcaaatcatggtggcaatctcattctaagtggccttaccctactgaggaagataaggcgaggttggtgcaggagacgggtttgcagctcaaacagataaacaattggttcatcaatcaaagaaagaggaattggcatagcaatccatcttcttctaccgtctcaaagaataaacgccgaagcaatgcaggtgaaaacagcggaagagaccgttgagatcaagcttgcatgtagagatccaaaagctttatagaaaggtggaggcatgaagacaaagaattcttacacaacaaacgtaggacgtaattttgtgccagtacatggtatggctttcatatttggtaatgattagggccacacaaaattaaaccccaaagcatgatttgtaatatgaggttttagatggactttatgataggatcgtcagtcttcactgccatctccattctccaccatcaatccatcattatatcttgtgaataacatggaaatttctcgttatgcatttaatttgtgcaatcattggccgtaatct

SEQ ID NO: 102327 - protein, 393 aa, Arabidopsis thaliana
  peptide (1)..(393): Ceres Seq. ID no. 13609990
  misc_feature (177)..(232): Pfam Name: KNOX2 domain Pfam Description: KNOX2 domain
  misc_feature (1)..(382): Homolog of NCBI NO: 20141566 NR Description: Homeobox protein knotted-1 like 4 (KNAT4)
  misc_feature (1)..(393): Homolog of NCBI NO: 30683467 NR Description: HOMEOBOX PROTEIN KNOTTED-1 LIKE 4 (KNAT4)
  misc_feature (1)..(393): Homolog of NCBI NO: 1045044 NR Description: KNAT4 homeobox protein [Arabidopsis thaliana]
  misc_feature (14)..(393): Homolog of NCBI NO: 15238743 NR Description: KNAT3 homeodomain protein [Arabidopsis thaliana]
  misc_feature (14)..(393): Homolog of NCBI NO: 21554222 NR Description: KNAT3 homeodomain protein [Arabidopsis thaliana]
  misc_feature (118)..(393): Homolog of NCBI NO: 21539535 NR Description: KNAT3 homeodomain protein [Arabidopsis thaliana]
  misc_feature (45)..(382): Homolog of NCBI NO: 3023961 NR Description: Homeobox protein knotted-1 like 3 (KNAP3)
  misc_feature (46)..(382): Homolog of NCBI NO: 7446245 NR Description: homeobox protein NTH23 - common tobacco
  misc_feature (25)..(387): Homolog of NCBI NO: 4098244 NR Description: homeobox 1 protein [Lycopersicon esculentum]
  misc_feature (24)..(380): Homolog of NCBI NO: 6016226 NR Description: Homeobox protein knotted-1 like LET12
MAFHNNHFNHFTDQQQHQPPPPPQQQQQQHFQESAPPNWLLRSDNNFLNLHTAASAAATSSDSPSSAAANQWLSRSSSFLQRGNTANNNNNETSGDVIEDVPGGEESMIGEKKEAERWQNARHKAEILSHPLYEQLLSAHVACLRIATPVDQLPRIDAQLAQSQNVVAKYSTLEAAQGLLAGDDKELDHFMTHYVLLLCSFKEQLQQHVRVHAMEAVMACWEIEQSLQSFTGVSPGEGTGATMSEDEDEQVESDAHLFDGSLDGLGFGPLVPTESERSLMERVRQELKHELKQGYKEKIVDIREEILRKRRAGKLPGDTTSVLKSWWQSHSKWPYPTEEDKARLVQETGLQLKQINNWFINQRKRNWHSNPSSSTVSKNKRRSNAGENSGRDR

SEQ ID NO: 102328 - protein, 286 aa, Arabidopsis thaliana
  peptide (1)..(286): Ceres Seq. ID no. 13609991
  misc_feature (70)..(125): Pfam Name: KNOX2 domain Pfam Description: KNOX2 domain
  misc_feature (1)..(275): Homolog of NCBI NO: 20141566 NR Description: Homeobox protein knotted-1 like 4 (KNAT4)
  misc_feature (1)..(286): Homolog of NCBI NO: 30683467 NR Description: HOMEOBOX PROTEIN KNOTTED-1 LIKE 4 (KNAT4)
  misc_feature (1)..(286): Homolog of NCBI NO: 1045044 NR Description: KNAT4 homeobox protein [Arabidopsis thaliana]
  misc_feature (1)..(286): Homolog of NCBI NO: 15238743 NR Description: KNAT3 homeodomain protein [Arabidopsis thaliana]
  misc_feature (1)..(286): Homolog of NCBI NO: 21554222 NR Description: KNAT3 homeodomain protein [Arabidopsis thaliana]
  misc_feature (11)..(286): Homolog of NCBI NO: 21539535 NR Description: KNAT3 homeodomain protein [Arabidopsis thaliana]
  misc_feature (1)..(275): Homolog of NCBI NO: 3023961 NR Description: Homeobox protein knotted-1 like 3 (KNAP3)
  misc_feature (1)..(275): Homolog of NCBI NO: 7446245 NR Description: homeobox protein NTH23 - common tobacco
  misc_feature (1)..(280): Homolog of NCBI NO: 4098244 NR Description: homeobox 1 protein [Lycopersicon esculentum]
  misc_feature (1)..(273): Homolog of NCBI NO: 6016226 NR Description: Homeobox protein knotted-1 like LET12
MIGEKKEAERWQNARHKAEILSHPLYEQLLSAHVACLRIATPVDQLPRIDAQLAQSQNVVAKYSTLEAAQGLLAGDDKELDHFMTHYVLLLCSFKEQLQQHVRVHAMEAVMACWEIEQSLQSFTGVSPGEGTGATMSEDEDEQVESDAHLFDGSLDGLGFGPLVPTESERSLMERVRQELKHELKQGYKEKIVDIREEILRKRRAGKLPGDTTSVLKSWWQSHSKWPYPTEEDKARLVQETGLQLKQINNWFINQRKRNWHSNPSSSTVSKNKRRSNAGENSGRDR

SEQ ID NO: 102329 - protein, 203 aa, Arabidopsis thaliana
  peptide (1)..(203): Ceres Seq. ID no. 13609992
  misc_feature (1)..(42): Pfam Name: KNOX2 domain Pfam Description: KNOX2 domain
  misc_feature (1)..(192): Homolog of NCBI NO: 20141566 NR Description: Homeobox protein knotted-1 like 4 (KNAT4)
  misc_feature (1)..(203): Homolog of NCBI NO: 30683467 NR Description: HOMEOBOX PROTEIN KNOTTED-1 LIKE 4 (KNAT4)
  misc_feature (1)..(203): Homolog of NCBI NO: 1045044 NR Description: KNAT4 homeobox protein [Arabidopsis thaliana]
  misc_feature (1)..(203): Homolog of NCBI NO: 15238743 NR Description: KNAT3 homeodomain protein [Arabidopsis thaliana]
  misc_feature (1)..(203): Homolog of NCBI NO: 21554222 NR Description: KNAT3 homeodomain protein [Arabidopsis thaliana]
  misc_feature (1)..(203): Homolog of NCBI NO: 21539535 NR Description: KNAT3 homeodomain protein [Arabidopsis thaliana]
  misc_feature (1)..(192): Homolog of NCBI NO: 3023961 NR Description: Homeobox protein knotted-1 like 3 (KNAP3)
  misc_feature (1)..(192): Homolog of NCBI NO: 7446245 NR Description: homeobox protein NTH23 - common tobacco
  misc_feature (1)..(197): Homolog of NCBI NO: 4098244 NR Description: homeobox 1 protein [Lycopersicon esculentum]
  misc_feature (1)..(190): Homolog of NCBI NO: 6016226 NR Description: Homeobox protein knotted-1 like LET12
MTHYVLLLCSFKEQLQQHVRVHAMEAVMACWEIEQSLQSFTGVSPGEGTGATMSEDEDEQVESDAHLFDGSLDGLGFGPLVPTESERSLMERVRQELKHELKQGYKEKIVDIREEILRKRRAGKLPGDTTSVLKSWWQSHSKWPYPTEEDKARLVQETGLQLKQINNWFINQRKRNWHSNPSSSTVSKNKRRSNAGENSGRDR

SEQ ID NO: 102330 - DNA, 1135 bp, Arabidopsis thaliana
  misc_feature (1)..(1135): Ceres Seq. ID no. 13609993
  misc_feature: MA Experiment ID: 20000171 Result: Up-regulated in Transcription
  misc_feature: MA Experiment 20000171 PARAMETER Experiment Name: At_42deg_Heat_P Parameter: Age (day) Value: 14
  misc_feature: MA Experiment 20000171 PARAMETER Experiment Name: At_42deg_Heat_P Parameter: Organism Value: A. thaliana
  misc_feature: MA Experiment 20000171 PARAMETER Experiment Name: At_42deg_Heat_P Parameter: Plant Line Value: WS
  misc_feature: MA Experiment 20000171 PARAMETER Experiment Name: At_42deg_Heat_P Parameter: Temperature (deg C) Value: 42 vs. 22
  misc_feature: MA Experiment 20000171 PARAMETER Experiment Name: At_42deg_Heat_P Parameter: Timepoint (hr) Value: 1
  misc_feature: MA Experiment 20000171 PARAMETER Experiment Name: At_42deg_Heat_P Parameter: Tissue Value: Aerial
  misc_feature: MA Experiment ID: 20000173 Result: Up-regulated in Transcription
  misc_feature: MA Experiment 20000173 PARAMETER Experiment Name: At_42deg_Heat_P Parameter: Age (day) Value: 14
  misc_feature: MA Experiment 20000173 PARAMETER Experiment Name: At_42deg_Heat_P Parameter: Organism Value: A. thaliana
  misc_feature: MA Experiment 20000173 PARAMETER Experiment Name: At_42deg_Heat_P Parameter: Plant Line Value: WS
  misc_feature: MA Experiment 20000173 PARAMETER Experiment Name: At_42deg_Heat_P Parameter: Temperature (deg C) Value: 42 vs. 22
  misc_feature: MA Experiment 20000173 PARAMETER Experiment Name: At_42deg_Heat_P Parameter: Timepoint (hr) Value: 6
  misc_feature: MA Experiment 20000173 PARAMETER Experiment Name: At_42deg_Heat_P Parameter: Tissue Value: Aerial
  misc_feature: MA Experiment ID: 20000179 Result: Up-regulated in Transcription
  misc_feature: MA Experiment 20000179 PARAMETER Experiment Name: At_Germinating_Seeds_P Parameter: Age (hr) Value: 6 vs. 0
  misc_feature: MA Experiment 20000179 PARAMETER Experiment Name: At_Germinating_Seeds_P Parameter: Tissue Value: Germinating Seeds
  misc_feature: MA Experiment ID: 20000227 Result: Down-regulated in Transcription
  misc_feature: MA Experiment 20000227 PARAMETER Experiment Name: At_Root-Tips-vs-Tops_P Parameter: Tissue Value: Root Tips vs. Root Tops
  misc_feature: MA Experiment ID: 20000265 Result: Down-regulated in Transcription
  misc_feature: MA Experiment 20000265 PARAMETER Experiment Name: At_Open_Flower_P Parameter: Age (day) Value: 21
  misc_feature: MA Experiment 20000265 PARAMETER Experiment Name: At_Open_Flower_P Parameter: Plant Line Value: WS
  misc_feature: MA Experiment 20000265 PARAMETER Experiment Name: At_Open_Flower_P Parameter: Tissue Value: Closed Flower vs. Whole Plant
  misc_feature: MA Experiment ID: 20000436 Result: Up-regulated in Transcription
  misc_feature: MA Experiment 20000436 PARAMETER Experiment Name: At_Drought_P Parameter: Age (day) Value: 7
  misc_feature: MA Experiment 20000436 PARAMETER Experiment Name: At_Drought_P Parameter: Organism Value: A. thaliana
  misc_feature: MA Experiment 20000436 PARAMETER Experiment Name: At_Drought_P Parameter: Plant Line Value: WS
  misc_feature: MA Experiment 20000436 PARAMETER Experiment Name: At_Drought_P Parameter: Timepoint (hr) Value: 12
  misc_feature: MA Experiment 20000436 PARAMETER Experiment Name: At_Drought_P Parameter: Tissue Value: Whole Plant
  misc_feature: MA Experiment 20000436 PARAMETER Experiment Name: At_Drought_P Parameter: Treatment Value: Drought vs. No Drought
  misc_feature: MA Experiment ID: 20000437 Result: Up-regulated in Transcription
  misc_feature: MA Experiment 20000437 PARAMETER Experiment Name: At_Drought_P Parameter: Age (day) Value: 8
  misc_feature: MA Experiment 20000437 PARAMETER Experiment Name: At_Drought_P Parameter: Organism Value: A. thaliana
  misc_feature: MA Experiment 20000437 PARAMETER Experiment Name: At_Drought_P Parameter: Plant Line Value: WS
  misc_feature: MA Experiment 20000437 PARAMETER Experiment Name: At_Drought_P Parameter: Timepoint (hr) Value: 24
  misc_feature: MA Experiment 20000437 PARAMETER Experiment Name: At_Drought_P Parameter: Tissue Value: Whole Plant
  misc_feature: MA Experiment 20000437 PARAMETER Experiment Name: At_Drought_P Parameter: Treatment Value: Drought vs. No Drought
  misc_feature: MA Experiment ID: 20000794 Result: Up-regulated in Transcription
  misc_feature: MA Experiment 20000794 PARAMETER Experiment Name: At_Petals_P Parameter: Age (day) Value: 23-25 days
  misc_feature: MA Experiment 20000794 PARAMETER Experiment Name: At_Petals_P Parameter: Plant Line Value: WS
  misc_feature: MA Experiment 20000794 PARAMETER Experiment Name: At_Petals_P Parameter: Tissue Value: Petals vs. Whole plant
  misc_feature: MA Experiment ID: 20001451 Result: Up-regulated in Transcription
  misc_feature: MA Experiment 20001451 PARAMETER Experiment Name: At_Far-red-induction_P Parameter: Age (day) Value: 7
  misc_feature: MA Experiment 20001451 PARAMETER Experiment Name: At_Far-red-induction_P Parameter: Light Value: Far-red vs. White
  misc_feature: MA Experiment 20001451 PARAMETER Experiment Name: At_Far-red-induction_P Parameter: Organism Value: A. thaliana
  misc_feature: MA Experiment 20001451 PARAMETER Experiment Name: At_Far-red-induction_P Parameter: Plant Line Value: Columbia
  misc_feature: MA Experiment 20001451 PARAMETER Experiment Name: At_Far-red-induction_P Parameter: Timepoint (hr) Value: 24
  misc_feature: MA Experiment 20001451 PARAMETER Experiment Name: At_Far-red-induction_P Parameter: Tissue Value: Whole Plant
  misc_feature: MA Experiment ID: 20001554 Result: Up-regulated in Transcription
  misc_feature: MA Experiment 20001554 PARAMETER Experiment Name: At_Drought_Soil_Dry_P Parameter: Age (day) Value: 21
  misc_feature: MA Experiment 20001554 PARAMETER Experiment Name: At_Drought_Soil_Dry_P Parameter: Organism Value: A. thaliana
  misc_feature: MA Experiment 20001554 PARAMETER Experiment Name: At_Drought_Soil_Dry_P Parameter: Plant Line Value: WS
  misc_feature: MA Experiment 20001554 PARAMETER Experiment Name: At_Drought_Soil_Dry_P Parameter: Post Timepoint (hr) Value: None
  misc_feature: MA Experiment 20001554 PARAMETER Experiment Name: At_Drought_Soil_Dry_P Parameter: Post-Treatment Value: None
  misc_feature: MA Experiment 20001554 PARAMETER Experiment Name: At_Drought_Soil_Dry_P Parameter: Timepoint (day) Value: 7
  misc_feature: MA Experiment 20001554 PARAMETER Experiment Name: At_Drought_Soil_Dry_P Parameter: Treatment Value: Drought vs. No Drought
  misc_feature: MA Experiment ID: 20001908 Result: Up-regulated in Transcription
  misc_feature: MA Experiment 20001908 PARAMETER Experiment Name: At_Drought_Reproduction_P Parameter: Age (day) Value: 40
  misc_feature: MA Experiment 20001908 PARAMETER Experiment Name: At_Drought_Reproduction_P Parameter: Organism Value: A. thaliana
  misc_feature: MA Experiment 20001908 PARAMETER Experiment Name: At_Drought_Reproduction_P Parameter: Plant Line Value: WS
  misc_feature: MA Experiment 20001908 PARAMETER Experiment Name: At_Drought_Reproduction_P Parameter: Timepoint (day) Value: 10
  misc_feature: MA Experiment 20001908 PARAMETER Experiment Name: At_Drought_Reproduction_P Parameter: Tissue Value: Siliques
  misc_feature: MA Experiment 20001908 PARAMETER Experiment Name: At_Drought_Reproduction_P Parameter: Treatment Value: Drought vs. No Drought
  misc_feature: MA Experiment ID: 20001911 Result: Up-regulated in Transcription
  misc_feature: MA Experiment 20001911 PARAMETER Experiment Name: At_Drought_Reproduction_P Parameter: Age (day) Value: 40
  misc_feature: MA Experiment 20001911 PARAMETER Experiment Name: At_Drought_Reproduction_P Parameter: Organism Value: A. thaliana
  misc_feature: MA Experiment 20001911 PARAMETER Experiment Name: At_Drought_Reproduction_P Parameter: Plant Line Value: WS
  misc_feature: MA Experiment 20001911 PARAMETER Experiment Name: At_Drought_Reproduction_P Parameter: Timepoint (day) Value: 10
  misc_feature: MA Experiment 20001911 PARAMETER Experiment Name: At_Drought_Reproduction_P Parameter: Tissue Value: Flowers
  misc_feature: MA Experiment 20001911 PARAMETER Experiment Name: At_Drought_Reproduction_P Parameter: Treatment Value: Drought vs. No Drought
gaaccaacctcccttaggcactttctacagagcagctaatcaaaaaaaaaaaaaaaaaaccttgttcttctcttcttcttcctctctcacaaatttgactttcatagaagaaaaaaatggtgactacatcgtcacgaaccaagtcaaacggaccggtgcttcgttcacaatcaccgtcaggtcgattttgcggtggttactcaagagccgttccgtcatcttcttcatcagctttcgcttcatcaacgagttctagcttttcatctccgtcgtcagcttttttcagcaatcaccgtcatcacgagagcaatcacagtcaccaccgatctgcgtcaccgactcgtgtgaatctctacacagcgcaaccgatgtctcagtcgtttcgttactctctcgatagcagatctatatctccgactaacaaatcgatctccgtttcgaagaatcagccaccgagccataatcacaagatctcaaggagatgtatgtgttctccgacgacgcatccaggatctttcagatgcagtctacataagaacgtagcgaatccacatggtcaaggtacagcttcgtatacaacgaatggattgaatatgcgtcgatctgcgatgactaattcgctggtgagaattggtggtgttgaaggagagtgggtgagaagagctttgactactttgattcgaccttcttcgcatcatctgaaaagacgagctgcttatcagccacgtcctagtcgactctcaatcatggcgaaagctgatgagaattgattttgatctggattttggttaattcaggtttgttttgtttgttgttcttctctctttaaacgaaaaccaccacaggatttagtagatccggcgaagaagtcttgttatgaagctgaggtctgcgaagaagaatcatcctcgagaaatcgagattttgtaaaaggaagaaacacacacctatcataatttttttgttgttgggtgaaagaagatgctagaatgcattgtacatacgttctcttttttactgtttttgttgctctctcttgcgtctttgtcgaaccccaaaaaaaaaaaaatgttcggagtctcaccaaaaattagagacctaaaatcgaaaatcaaagaactgaatctaatttctg

SEQ ID NO: 102331 - protein, 217 aa, Arabidopsis thaliana; identical to SEQ ID NO: 22246
  peptide (1)..(217): Ceres Seq. ID no. 13609994
  misc_feature (1)..(217): Homolog of NCBI NO: 15238947 NR Description: expressed protein [Arabidopsis thaliana]
  misc_feature (1)..(216): Homolog of NCBI NO: 15238753 NR Description: serine-rich protein [Arabidopsis thaliana]
  misc_feature (1)..(216): Homolog of NCBI NO: 21618161 NR Description: serine-rich protein [Arabidopsis thaliana]
  misc_feature (2)..(216): Homolog of NCBI NO: 24461857 NR Description: CTV.15 [Poncirus trifoliata]
  misc_feature (42)..(207): Homolog of NCBI NO: 15241329 NR Description: hypothetical protein [Arabidopsis thaliana]
  misc_feature (135)..(214): Homolog of NCBI NO: 30017516 NR Description: hypothetical protein [Oryza sativa (japonica

SEQ ID NO: 102332 - protein, 133 aa, Arabidopsis thaliana; identical to SEQ ID NO: 22247
  peptide (1)..(133): Ceres Seq. ID no. 13609995
  misc_feature (1)..(133): Homolog of NCBI NO: 15238947 NR Description: expressed protein [Arabidopsis thaliana]
  misc_feature (1)..(132): Homolog of NCBI NO: 15238753 NR Description: serine-rich protein [Arabidopsis thaliana]
  misc_feature (1)..(132): Homolog of NCBI NO: 21618161 NR Description: serine-rich protein [Arabidopsis thaliana]
  misc_feature (1)..(132): Homolog of NCBI NO: 24461857 NR Description: CTV.15 [Poncirus trifoliata]
  misc_feature (1)..(123): Homolog of NCBI NO: 15241329 NR Description: hypothetical protein [Arabidopsis thaliana]
  misc_feature (51)..(130): Homolog of NCBI NO: 30017516 NR Description: hypothetical protein [Oryza sativa (japonica

SEQ ID NO: 102333 - DNA, 1653 bp, Arabidopsis thaliana
  misc_feature (1)..(1653): Ceres Seq. ID no. 13609996
  misc_feature: MA Experiment ID: 108434 Result: Up-regulated in Transcription
  misc_feature: MA Experiment 108434 PARAMETER Experiment Name: At_Root_Tips_cDNA_P Parameter: Tissue Value: Root Tips
  misc_feature: MA Experiment ID: 108435 Result: Up-regulated in Transcription
  misc_feature: MA Experiment 108435 PARAMETER Experiment Name: At_stm_Mutants_cDNA_P Parameter: Plant Line Value: wt Landsburg vs stm
  misc_feature: MA Experiment 108435 PARAMETER Experiment Name: At_stm_Mutants_cDNA_P Parameter: Tissue Value: Shoot Apical Meristem Region
  misc_feature: MA Experiment ID: 108461 Result: Down-regulated in Transcription
  misc_feature: MA Experiment 108461 PARAMETER Experiment Name: At_Germinating_Seeds_cDNA_P Parameter: Age (day) Value: 1 vs. 0
  misc_feature: MA Experiment 108461 PARAMETER Experiment Name: At_Germinating_Seeds_cDNA_P Parameter: Tissue Value: Germinating Seeds
  misc_feature: MA Experiment ID: 108462 Result: Down-regulated in Transcription
  misc_feature: MA Experiment 108462 PARAMETER Experiment Name: At_Germinating_Seeds_cDNA_P Parameter: Age (day) Value: 2 vs. 0
  misc_feature: MA Experiment 108462 PARAMETER Experiment Name: At_Germinating_Seeds_cDNA_P Parameter: Tissue Value: Germinating Seeds
  misc_feature: MA Experiment ID: 108463 Result: Down-regulated in Transcription
  misc_feature: MA Experiment 108463 PARAMETER Experiment Name: At_Germinating_Seeds_cDNA_P Parameter: Age (day) Value: 3 vs. 0
  misc_feature: MA Experiment 108463 PARAMETER Experiment Name: At_Germinating_Seeds_cDNA_P Parameter: Tissue Value: Germinating Seeds
  misc_feature: MA Experiment ID: 108464 Result: Down-regulated in Transcription
  misc_feature: MA Experiment 108464 PARAMETER Experiment Name: At_Germinating_Seeds_cDNA_P Parameter: Age (day) Value: 4 vs. 0
  misc_feature: MA Experiment 108464 PARAMETER Experiment Name: At_Germinating_Seeds_cDNA_P Parameter: Tissue Value: Germinating Seeds
  misc_feature: MA Experiment ID: 20000307 Result: Down-regulated in Transcription
  misc_feature: MA Experiment 20000307 PARAMETER Experiment Name: At_Germinating_Seeds_Sub_P Parameter: Age (hr) Value: 24 vs. 0
  misc_feature: MA Experiment 20000307 PARAMETER Experiment Name: At_Germinating_Seeds_Sub_P Parameter: Organism Value: A. thaliana
  misc_feature: MA Experiment 20000307 PARAMETER Experiment Name: At_Germinating_Seeds_Sub_P Parameter: Plant Line Value: WS
  misc_feature: MA Experiment 20000307 PARAMETER Experiment Name: At_Germinating_Seeds_Sub_P Parameter: Tissue Value: Germinating Seeds
  misc_feature: MA Experiment ID: 20000355 Result: Up-regulated in Transcription
  misc_feature: MA Experiment 20000355 PARAMETER Experiment Name: At_Siliques_Sub_P Parameter: Age (day) Value: 21
  misc_feature: MA Experiment 20000355 PARAMETER Experiment Name: At_Siliques_Sub_P Parameter: Organism Value: A. thaliana
  misc_feature: MA Experiment 20000355 PARAMETER Experiment Name: At_Siliques_Sub_P Parameter: Plant Line Value: WS
  misc_feature: MA Experiment 20000355 PARAMETER Experiment Name: At_Siliques_Sub_P Parameter: Tissue Value: Less Than 5mm Siliques vs. Whole Plant
  misc_feature: MA Experiment ID: 20000440 Result: Up-regulated in Transcription
  misc_feature: MA Experiment 20000440 PARAMETER Experiment Name: At_Closed-Flower__Sub_P Parameter: Tissue Value: Closed Flower vs. Whole Plant
atatttaattttcttcagtcagagatttcgaaaccctagtcgatttcgagatccaactaactctgctccttatctcagcttgttgaatttgcgaagtatgggagacgctagagacaacgaagcctacgaggaggagctcttggactatgaagaagaagacgagaaggtcccagattctggaaacaaagttaacggcgaagctgtgaaaaaagggtacgtgggaatacacagttctggattcagagacttccttttgaaaccggagcttctcagagctattgttgactcaggatttgaacatccatctgaagtgcaacacgaatgtatccctcaagctatcttgggtatggatgttatctgccaagcaaagtctggtatggggaagactgctgtgtttgtcctgtctactctacaacagattgaaccatctcctggccaggtttctgcacttgtcttgtgccatacaagagagctagcttaccagatctgcaatgagtttgtgcgattcagtacctatctgcctgatacaaaagtttcggtgttctatggtggagtcaacattaaaattcacaaagacttgctgaagaatgaatgtcctcacattgttgttggtacccctggtcgagtgcttgcacttgccagggagaaagatctctctttgaagaatgtgaggcattttattcttgatgagtgtgataaaatgctcgagtcacttgacatgcgaagggatgtgcaggagattttcaagatgactcctcatgacaaacaagtaatgatgttctcagcaacgctcagcaaagagatacgcccagtctgcaagaagtttatgcaagatccaatggaaatatatgttgatgatgaagccaagttgactcttcatggacttgtccagcactacatcaaactgagcgagatggagaaaaatcgcaagttgaatgaccttcttgatgcgttggacttcaatcaagttgtcatttttgtgaagagcgtgagcagggctgcggagctgaacaagttactggtggaatgcaatttcccctcaatatgcatacactctggcatgtctcaagaagagaggttgactcgatacaaaagtttcaaggaagggcacaagaggatccttgtggcgactgacttggtaggaagagggattgacatagagcgtgtcaacattgttatcaactatgacatgccagattctgcggatacctatcttcatagggttgggagagctggtagatttggaaccaagggtcttgcaatcacatttgttgcatctgcttcagattcagaggtccttaatcaggttcaagagaggtttgaggtcgatataaaggagcttcctgagcagattgatacatcgacttacatgccgtcttaaacaagtagcatcatctctgaggaacgaacctcttcagatttcaaccttttaggtgttcaaaggggtcatggaggtccacaactatctctcacaccgtttgttgcttcgctattttagacttttctatgaggacaagtttttccatatatttagaccgttttgtaactcttgaaaaatgagattgagctactctccaaatcgcgcacagttgagagctctcctgttttttgtactagtgatggttatctttaaaatattaagatttcaggatt

SEQ ID NO: 102334 - protein, 459 aa, Arabidopsis thaliana; identical to SEQ ID NO: 30126
  peptide (1)..(459): Ceres Seq. ID no. 13609997
  misc_feature (91)..(298): Pfam Name: DEAD/DEAH box helicase Pfam Description: DEAD/DEAH box helicase
  misc_feature (9)..(459): Homolog of NCBI NO: 11358797 NR Description: RNA helicase RH15 [imported] - Arabidopsis (fragment) >gi|3776005|emb|CAA09205.1| RNA helicase [Arabidopsis
  misc_feature (33)..(459): Homolog of NCBI NO: 18416493 NR Description: DEAD/DEAH box helicase, putative [Arabidopsis >gi|14190381|gb|AAK55671.1|AF378868_1 AT5g11200/F2I11_90 thaliana] >gi|15450405|gb|AAK96496.1| AT5g11170/F2I11_60
  misc_feature (33)..(459): Homolog of NCBI NO: 18416486 NR Description: DEAD/DEAH box helicase, putative [Arabidopsis
  misc_feature (33)..(456): Homolog of NCBI NO: 8953382 NR Description: DEAD BOX RNA helicase RH15 [Arabidopsis thaliana]
  misc_feature (33)..(456): Homolog of NCBI NO: 8953379 NR Description: DEAD BOX RNA helicase RH15-like protein
  misc_feature (35)..(459): Homolog of NCBI NO: 34913862 NR Description: putative DEAD BOX RNA helicase [Oryza sativa
  misc_feature (116)..(459): Homolog of NCBI NO: 30683509 NR Description: DEAD/DEAH box helicase, putative [Arabidopsis
  misc_feature (38)..(457): Homolog of NCBI NO: 28278325 NR Description: Unknown (protein for MGC:55433) [Danio rerio]
  misc_feature (43)..(457): Homolog of NCBI NO: 16758334 NR Description: nuclear RNA helicase, DECD variant of DEAD box [Rattus norvegicus] >gi|3132829|gb|AAC16391.1| nuclear RNA
  misc_feature (43)..(278): Homolog of NCBI NO: 21040373 NR Description: DEAD/H (Asp-Glu-Ala-Asp/His) box polypeptide 39 >gi|14714632|gb|AAH10455.1|AAH10455 Unknown (protein for

SEQ ID NO: 102335 - protein, 427 aa, Arabidopsis thaliana; identical to SEQ ID NO: 20810
  peptide (1)..(427): Ceres Seq. ID no. 13609998
  misc_feature (59)..(266): Pfam Name: DEAD/DEAH box helicase Pfam Description: DEAD/DEAH box helicase
  misc_feature (1)..(427): Homolog of NCBI NO: 11358797 NR Description: RNA helicase RH15 [imported] - Arabidopsis (fragment) >gi|3776005|emb|CAA09205.1| RNA helicase [Arabidopsis
  misc_feature (1)..(427): Homolog of NCBI NO: 18416493 NR Description: DEAD/DEAH box helicase, putative [Arabidopsis >gi|14190381|gb|AAK55671.1|AF378868_1 AT5g11200/F2I11_90 thaliana] >gi|15450405|gb|AAK96496.1| AT5g11170/F2I11_60
  misc_feature (1)..(427): Homolog of NCBI NO: 18416486 NR Description: DEAD/DEAH box helicase, putative [Arabidopsis
  misc_feature (1)..(424): Homolog of NCBI NO: 8953382 NR Description: DEAD BOX RNA helicase RH15 [Arabidopsis thaliana]
  misc_feature (1)..(424): Homolog of NCBI NO: 8953379 NR Description: DEAD BOX RNA helicase RH15-like protein
  misc_feature (3)..(427): Homolog of NCBI NO: 34913862 NR Description: putative DEAD BOX RNA helicase [Oryza sativa
  misc_feature (84)..(427): Homolog of NCBI NO: 30683509 NR Description: DEAD/DEAH box helicase, putative [Arabidopsis
  misc_feature (6)..(425): Homolog of NCBI NO: 28278325 NR Description: Unknown (protein for MGC:55433) [Danio rerio]
  misc_feature (11)..(425): Homolog of NCBI NO: 16758334 NR Description: nuclear RNA helicase, DECD variant of DEAD box [Rattus norvegicus] >gi|3132829|gb|AAC16391.1| nuclear RNA
  misc_feature (11)..(246): Homolog of NCBI NO: 21040373 NR Description: DEAD/H (Asp-Glu-Ala-Asp/His) box polypeptide 39 >gi|14714632|gb|AAH10455.1|AAH10455 Unknown (protein for

SEQ ID NO: 102336 - protein, 344 aa, Arabidopsis thaliana; identical to SEQ ID NO: 20811
  peptide (1)..(344): Ceres Seq. ID no. 13609999
  misc_feature (1)..(183): Pfam Name: DEAD/DEAH box helicase Pfam Description: DEAD/DEAH box helicase
  misc_feature (1)..(344): Homolog of NCBI NO: 11358797 NR Description: RNA helicase RH15 [imported] - Arabidopsis (fragment) >gi|3776005|emb|CAA09205.1| RNA helicase [Arabidopsis
  misc_feature (1)..(344): Homolog of NCBI NO: 18416493 NR Description: DEAD/DEAH box helicase, putative [Arabidopsis >gi|14190381|gb|AAK55671.1|AF378868_1 AT5g11200/F2I11_90 thaliana] >gi|15450405|gb|AAK96496.1| AT5g11170/F2I11_60
  misc_feature (1)..(344): Homolog of NCBI NO: 18416486 NR Description: DEAD/DEAH box helicase, putative [Arabidopsis
  misc_feature (1)..(341): Homolog of NCBI NO: 8953382 NR Description: DEAD BOX RNA helicase RH15 [Arabidopsis thaliana]
  misc_feature (1)..(341): Homolog of NCBI NO: 8953379 NR Description: DEAD BOX RNA helicase RH15-like protein
  misc_feature (1)..(344): Homolog of NCBI NO: 34913862 NR Description: putative DEAD BOX RNA helicase [Oryza sativa
  misc_feature (1)..(344): Homolog of NCBI NO: 30683509 NR Description: DEAD/DEAH box helicase, putative [Arabidopsis
  misc_feature (1)..(342): Homolog of NCBI NO: 28278325 NR Description: Unknown (protein for MGC:55433) [Danio rerio]
  misc_feature (1)..(342): Homolog of NCBI NO: 16758334 NR Description: nuclear RNA helicase, DECD variant of DEAD box [Rattus norvegicus] >gi|3132829|gb|AAC16391.1| nuclear RNA
  misc_feature (1)..(163): Homolog of NCBI NO: 21040373 NR Description: DEAD/H (Asp-Glu-Ala-Asp/His) box polypeptide 39 >gi|14714632|gb|AAH10455.1|AAH10455 Unknown (protein for

SEQ ID NO: 102337 - DNA, 1276 bp, Arabidopsis thaliana
  misc_feature (1)..(1276): Ceres Seq. ID no. 13610006
  misc_feature: MA Experiment ID: 108434 Result: Up-regulated in Transcription
  misc_feature: MA Experiment 108434 PARAMETER Experiment Name: At_Root_Tips_cDNA_P Parameter: Tissue Value: Root Tips
  misc_feature: MA Experiment ID: 108595 Result: Down-regulated in Transcription
  misc_feature: MA Experiment 108595 PARAMETER Experiment Name: At_Ler-pi_Ovule_cDNA_P Parameter: Plant Line Value: null
aacattgtcttttcgggttaatttcttcttcttcttccttttcttactaaattctcttagggttttagtcatacttaatggcttccaattcggagaaaaatcctcttctttcagatgagaaacccaaatcgacggaggagaataagagttctaagccggaatcagcttctgggagttcaacttcatcagctatgcctggcttgaatttcaatgcttttgatttctctaatatggctagtattctcaacgatcctagcatcagagaaatggctgagcaaatagctaaagatcctgcgtttaaccaattggctgagcagcttcagagatctattcctaacgctggccaggaaggtggtttccctaactttgatcctcaacagtatgtcaatacaatgcaacaggttatgcataaccctgagtttaagacaatggccgagaaacttggtaccgccttagttcaggatccacaaatgtctccttttttggatgctttctcgaatcctgaaacagcagaacactttactgagcgtatggcgcggatgaaagaagatccagagttgaaacctatactagatgagattgatgctggtggtccttctgccatgatgaagtactggaatgatccagaagtgctgaaaaagctgggtgaagcaatgggtatgcctgttgctggcttaccagaccagactgtttcagctgaacctgaggtagcagaagaaggtgaagaagaagagtctattgttcaccaaactgccagtcttggtgatgttgagggtttgaaagctgccttggcatctggtggtaacaaagatgaagaagattctgaaggaaggacagcattgcattttgcttgtggatacggcgagttgaaatgtgctcaagttcttatcgatgctggagcaagtgttaatgcggttgacaaaaacaagaacacacctctgcattatgctgctggttacgggaggaaagagtgtgtaagccttctcctggagaatggtgctgcagtcactctgcaaaacctagacgagaagacgccaattgatgtagcgaagctcaacagccagctggaggtggtgaagctgcttgagaaggatgctttcctttgagctctgctggttaaaggaaagctctaagctcatattgtctttgaggcatttgtcttgtgtgtgtcctgaaccagtttcacaggctttttgtgtacactttttattagttcctctcttcttctaaatttgtctcttatgttgttttaaaagtcaataaagaaagaaatagc

SEQ ID NO: 102338 - protein, 342 aa, Arabidopsis thaliana; identical to SEQ ID NO: 71908
  peptide (1)..(342): Ceres Seq. ID no. 13610007
  misc_feature (250)..(282): Pfam Name: Ankyrin repeat Pfam Description: Ankyrin repeat
  misc_feature (1)..(342): Homolog of NCBI NO: 3478700 NR Description: AFT protein [Arabidopsis thaliana]
  misc_feature (1)..(342): Homolog of NCBI NO: 15237008 NR Description: ankyrin repeat-containing protein 2 [Arabidopsis
  misc_feature (1)..(342): Homolog of NCBI NO: 4205079 NR Description: ankyrin repeat-containing protein 2 [Arabidopsis
  misc_feature (39)..(342): Homolog of NCBI NO: 30690372 NR Description: ankyrin repeat-containing protein 2 [Arabidopsis
  misc_feature (1)..(342): Homolog of NCBI NO: 15227825 NR Description: glucanase -related [Arabidopsis thaliana]
  misc_feature (2)..(342): Homolog of NCBI NO: 13310811 NR Description: ankyrin-repeat protein HBP1 [Nicotiana tabacum]
  misc_feature (13)..(342): Homolog of NCBI NO: 29826242 NR Description: TGB12K interacting protein 2 [Nicotiana tabacum]
  misc_feature (13)..(342): Homolog of NCBI NO: 29826244 NR Description: TGB12K interacting protein 3 [Nicotiana tabacum]
  misc_feature (2)..(342): Homolog of NCBI NO: 24637568 NR Description: ankyrin domain protein [Nicotiana tabacum]
  misc_feature (1)..(342): Homolog of NCBI NO: 27573339 NR Description: unknown protein [Oryza sativa (japonica

SEQ ID NO: 102339 - protein, 304 aa, Arabidopsis thaliana; identical to SEQ ID NO: 71909
  peptide (1)..(304): Ceres Seq. ID no. 13610008
  misc_feature (212)..(244): Pfam Name: Ankyrin repeat Pfam Description: Ankyrin repeat
  misc_feature (1)..(304): Homolog of NCBI NO: 3478700 NR Description: AFT protein [Arabidopsis thaliana]
  misc_feature (1)..(304): Homolog of NCBI NO: 15237008 NR Description: ankyrin repeat-containing protein 2 [Arabidopsis
  misc_feature (1)..(304): Homolog of NCBI NO: 4205079 NR Description: ankyrin repeat-containing protein 2 [Arabidopsis
  misc_feature (1)..(304): Homolog of NCBI NO: 30690372 NR Description: ankyrin repeat-containing protein 2 [Arabidopsis
  misc_feature (1)..(304): Homolog of NCBI NO: 15227825 NR Description: glucanase -related [Arabidopsis thaliana]
  misc_feature (1)..(304): Homolog of NCBI NO: 13310811 NR Description: ankyrin-repeat protein HBP1 [Nicotiana tabacum]
  misc_feature (1)..(304): Homolog of NCBI NO: 29826242 NR Description: TGB12K interacting protein 2 [Nicotiana tabacum]
  misc_feature (1)..(304): Homolog of NCBI NO: 29826244 NR Description: TGB12K interacting protein 3 [Nicotiana tabacum]
  misc_feature (1)..(304): Homolog of NCBI NO: 24637568 NR Description: ankyrin domain protein [Nicotiana tabacum]
  misc_feature (1)..(304): Homolog of NCBI NO: 27573339 NR Description: unknown protein [Oryza sativa (japonica

SEQ ID NO: 102340 - protein, 291 aa, Arabidopsis thaliana; identical to SEQ ID NO: 71910
  peptide (1)..(291): Ceres Seq. ID no. 13610009
  misc_feature (199)..(231): Pfam Name: Ankyrin repeat Pfam Description: Ankyrin repeat
  misc_feature (1)..(291): Homolog of NCBI NO: 3478700 NR Description: AFT protein [Arabidopsis thaliana]
  misc_feature (1)..(291): Homolog of NCBI NO: 15237008 NR Description: ankyrin repeat-containing protein 2 [Arabidopsis
  misc_feature (1)..(291): Homolog of NCBI NO: 4205079 NR Description: ankyrin repeat-containing protein 2 [Arabidopsis
  misc_feature (1)..(291): Homolog of NCBI NO: 30690372 NR Description: ankyrin repeat-containing protein 2 [Arabidopsis
  misc_feature (1)..(291): Homolog of NCBI NO: 15227825 NR Description: glucanase -related [Arabidopsis thaliana]
  misc_feature (1)..(291): Homolog of NCBI NO: 13310811 NR Description: ankyrin-repeat protein HBP1 [Nicotiana tabacum]
  misc_feature (1)..(291): Homolog of NCBI NO: 29826242 NR Description: TGB12K interacting protein 2 [Nicotiana tabacum]
  misc_feature (1)..(291): Homolog of NCBI NO: 29826244 NR Description: TGB12K interacting protein 3 [Nicotiana tabacum]
  misc_feature (1)..(291): Homolog of NCBI NO: 24637568 NR Description: ankyrin domain protein [Nicotiana tabacum]
  misc_feature (1)..(291): Homolog of NCBI NO: 27573339 NR Description: unknown protein [Oryza sativa (japonica

SEQ ID NO: 102341 - DNA, 1293 bp, Arabidopsis thaliana
  misc_feature (1)..(1293): Ceres Seq. ID no. 13610010
  misc_feature: MA Experiment ID: 108433 Result: Down-regulated in Transcription
  misc_feature: MA Experiment 108433 PARAMETER Experiment Name: At_rhl_Mutant2_cDNA_P Parameter: Age (day) Value: 7
  misc_feature: MA Experiment 108433 PARAMETER Experiment Name: At_rhl_Mutant2_cDNA_P Parameter: Organism Value: A. thaliana
  misc_feature: MA Experiment 108433 PARAMETER Experiment Name: At_rhl_Mutant2_cDNA_P Parameter: Plant Line Value: rhl Mutant vs. wt landsburg
  misc_feature: MA Experiment 108433 PARAMETER Experiment Name: At_rhl_Mutant2_cDNA_P Parameter: Tissue Value: Roots
  misc_feature: MA Experiment ID: 108434 Result: Up-regulated in Transcription
  misc_feature: MA Experiment 108434 PARAMETER Experiment Name: At_Root_Tips_cDNA_P Parameter: Tissue Value: Root Tips
  misc_feature: MA Experiment ID: 108461 Result: Up-regulated in Transcription
  misc_feature: MA Experiment 108461 PARAMETER Experiment Name: At_Germinating_Seeds_cDNA_P Parameter: Age (day) Value: 1 vs. 0
  misc_feature: MA Experiment 108461 PARAMETER Experiment Name: At_Germinating_Seeds_cDNA_P Parameter: Tissue Value: Germinating Seeds
  misc_feature: MA Experiment ID: 108573 Result: Up-regulated in Transcription
  misc_feature: MA Experiment 108573 PARAMETER Experiment Name: At_Drought_cDNA_P Parameter: Timepoint (hr) Value: 6
  misc_feature: MA Experiment 108573 PARAMETER Experiment Name: At_Drought_cDNA_P Parameter: Tissue Value: Aerial
  misc_feature: MA Experiment 108573 PARAMETER Experiment Name: At_Drought_cDNA_P Parameter: Treatment Value: Drought vs. No Drought
  misc_feature: MA Experiment ID: 108577 Result: Down-regulated in Transcription
  misc_feature: MA Experiment 108577 PARAMETER Experiment Name: At_42deg_Heat_cDNA_P Parameter: Temperature (deg C) Value: 42 vs. 22
  misc_feature: MA Experiment 108577 PARAMETER Experiment Name: At_42deg_Heat_cDNA_P Parameter: Timepoint (hr) Value: 6
  misc_feature: MA Experiment 108577 PARAMETER Experiment Name: At_42deg_Heat_cDNA_P Parameter: Tissue Value: Aerial
  misc_feature: MA Experiment ID: 108595 Result: Down-regulated in Transcription
  misc_feature: MA Experiment 108595 PARAMETER Experiment Name: At_Ler-pi_Ovule_cDNA_P Parameter: Plant Line Value: null
  misc_feature: MA Experiment ID: 20000087 Result: Down-regulated in Transcription
  misc_feature: MA Experiment 20000087 PARAMETER Experiment Name: At_100uM_ABA_Mutants_cDNA_P Parameter: Plant Line Value: WS
  misc_feature: MA Experiment 20000087 PARAMETER Experiment Name: At_100uM_ABA_Mutants_cDNA_P Parameter: Timepoint (hr) Value: 6
  misc_feature: MA Experiment 20000087 PARAMETER Experiment Name: At_100uM_ABA_Mutants_cDNA_P Parameter: Tissue Value: Aerial
  misc_feature: MA Experiment 20000087 PARAMETER Experiment Name: At_100uM_ABA_Mutants_cDNA_P Parameter: Treatment Value: 100uM ABA vs. No Treatment
  misc_feature: MA Experiment ID: 20000113 Result: Down-regulated in Transcription
  misc_feature: MA Experiment 20000113 PARAMETER Experiment Name: At_42deg_Heat_cDNA_P Parameter: Temperature (deg C) Value: 42 vs. 22
  misc_feature: MA Experiment 20000113 PARAMETER Experiment Name: At_42deg_Heat_cDNA_P Parameter: Timepoint (hr) Value: 8
  misc_feature: MA Experiment 20000113 PARAMETER Experiment Name: At_42deg_Heat_cDNA_P Parameter: Tissue Value: Aerial
ggagaagagatcacagagatctgagagcttgaaacaatggagtaccggaaaatcaaagatgaggacgatcatgacgttgcttctgatatcgagagtgtgaaaggaaaatctcataccgttgcttcgagtaacattgcaatggctactctgggtgttggatccagtgaacggatcaactggaaacgaaagggtgtagtaacatgtgcactgacgattctgacgagttctcaagcgatacttatcgtgtggtcgaaacgagctgggaagtatgagtatagtgttacaaccgccaactttttggttgaactctgaaatgtgcgttatctcttcttgctttgacaaggatatggaaaaatgaaggtgttactgacgacaacaggttaagcacaacatttgatgaagttaaagtctttccaattcccgcagcattgtatctttttaagaatttgttacagtattatatttttgcatatgtagacgccccaggctatcagatattgaagaacttgaacatcataagtaccggtgtcttgtacagaattatactgaagagaaaattgagcgagattcagtgggcgggtttcattctattgtgttgcggatgcaccactgctcagttgaattcaaattctgatcgtgttcttcagacatctcttcctggctggactatggcaattgtcatggctcttttaagtggtttcgccggagtgtacacagaggccattattaaaaagcgaccttcaaggaatataaatgtacagaacttctggctatatgtctttgggatggctttcaatgctgttgctatagtgatccaagattttgatgccgttgcaaataagggattcttccatggttactccttcatcacattactcatgattcttaaccatgctctcagtggcattgctgtgtcgatggtgatgaaatatgcagacaatatcgtgaaggtttattcgacatcagtggcgatgcttctcaccgcagttgtctctgtattcctcttcaattttcatctttccttagccttcttcttgggttcaacggtcgtctctgtttcagtatatttacattccgcagggaagctacgatagtaaagatcttcacacttacatctaccaagaaaacaccattattctagtacagagataaagcttttgaacgattacgattttgtttttcgtgtaggtatattcacatttgtgcttctgtattgatttttttttccgtctcatgaaaccttctattctcatttgtacgataccaaaacttatcaagaatagttacaatttc

SEQ ID NO: 102342 - protein, 141 aa, Arabidopsis thaliana
  peptide (1)..(141): Ceres Seq. ID no. 13610011
  misc_feature (1)..(124): Pfam Name: Nucleotide-sugar transporter Pfam Description: Nucleotide-sugar transporter
  misc_feature (1)..(77): Homolog of NCBI NO: 30690310 NR Description: hypothetical protein [Arabidopsis thaliana]
  misc_feature (1)..(139): Homolog of NCBI NO: 34393556 NR Description: putative CMP-sialic acid transporter [Oryza
  misc_feature (1)..(137): Homolog of NCBI NO: 18422134 NR Description: CMP-sialic acid transporter-related protein
  misc_feature (40)..(141): Homolog of NCBI NO: 7488414 NR Description: UDP-galactose transport protein homolog
  misc_feature (1)..(137): Homolog of NCBI NO: 10177360 NR Description: CMP-sialic acid transporter-like protein
  misc_feature (1)..(137): Homolog of NCBI NO: 39579880 NR Description: Hypothetical protein CBG24372 [Caenorhabditis
  misc_feature (1)..(136): Homolog of NCBI NO: 9087203 NR Description: UDP-galactose translocator (UDP-galactose
  misc_feature (1)..(136): Homolog of NCBI NO: 17530971 NR Description: solute carrier family 35 (UDP-galactose
  misc_feature (1)..(136): Homolog of NCBI NO: 12407833 NR Description: UDP-galactose transporter [Cricetulus griseus]
  misc_feature (1)..(136): Homolog of NCBI NO: 14334065 NR Description: UDP-galactose transporter [Mesocricetus auratus]
MAIVMALLSGFAGVYTEAIIKKRPSRNINVQNFWLYVFGMAFNAVAIVIQDFDAVANKGFFHGYSFITLLMILNHALSGIAVSMVMKYADNIVKVYSTSVAMLLTAVVSVFLFNFHLSLAFFLGSTVVSVSVYLHSAGKLR

SEQ ID NO: 102343 - protein, 137 aa, Arabidopsis thaliana
  peptide (1)..(137): Ceres Seq. ID no. 13610012
  misc_feature (1)..(120): Pfam Name: Nucleotide-sugar transporter Pfam Description: Nucleotide-sugar transporter
  misc_feature (1)..(73): Homolog of NCBI NO: 30690310 NR Description: hypothetical protein [Arabidopsis thaliana]
  misc_feature (1)..(135): Homolog of NCBI NO: 34393556 NR Description: putative CMP-sialic acid transporter [Oryza
  misc_feature (1)..(133): Homolog of NCBI NO: 18422134 NR Description: CMP-sialic acid transporter-related protein
  misc_feature (36)..(137): Homolog of NCBI NO: 7488414 NR Description: UDP-galactose transport protein homolog
  misc_feature (1)..(133): Homolog of NCBI NO: 10177360 NR Description: CMP-sialic acid transporter-like protein
  misc_feature (1)..(133): Homolog of NCBI NO: 39579880 NR Description: Hypothetical protein CBG24372 [Caenorhabditis
  misc_feature (1)..(132): Homolog of NCBI NO: 9087203 NR Description: UDP-galactose translocator (UDP-galactose
  misc_feature (1)..(132): Homolog of NCBI NO: 17530971 NR Description: solute carrier family 35 (UDP-galactose
  misc_feature (1)..(132): Homolog of NCBI NO: 12407833 NR Description: UDP-galactose transporter [Cricetulus griseus]
  misc_feature (1)..(132): Homolog of NCBI NO: 14334065 NR Description: UDP-galactose transporter [Mesocricetus auratus]
MALLSGFAGVYTEAIIKKRPSRNINVQNFWLYVFGMAFNAVAIVIQDFDAVANKGFFHGYSFITLLMILNHALSGIAVSMVMKYADNIVKVYSTSVAMLLTAVVSVFLFNFHLSLAFFLGSTVVSVSVYLHSAGKLR

SEQ ID NO: 102344 - protein, 102 aa, Arabidopsis thaliana
  peptide (1)..(102): Ceres Seq. ID no. 13610013
  misc_feature (1)..(85): Pfam Name: Nucleotide-sugar transporter Pfam Description: Nucleotide-sugar transporter
  misc_feature (1)..(38): Homolog of NCBI NO: 30690310 NR Description: hypothetical protein [Arabidopsis thaliana]
  misc_feature (1)..(100): Homolog of NCBI NO: 34393556 NR Description: putative CMP-sialic acid transporter [Oryza
  misc_feature (1)..(98): Homolog of NCBI NO: 18422134 NR Description: CMP-sialic acid transporter-related protein
  misc_feature (1)..(102): Homolog of NCBI NO: 7488414 NR Description: UDP-galactose transport protein homolog
  misc_feature (1)..(98): Homolog of NCBI NO: 10177360 NR Description: CMP-sialic acid transporter-like protein
  misc_feature (1)..(98): Homolog of NCBI NO: 39579880 NR Description: Hypothetical protein CBG24372 [Caenorhabditis
  misc_feature (1)..(97): Homolog of NCBI NO: 9087203 NR Description: UDP-galactose translocator (UDP-galactose
  misc_feature (1)..(97): Homolog of NCBI NO: 17530971 NR Description: solute carrier family 35 (UDP-galactose
  misc_feature (1)..(97): Homolog of NCBI NO: 12407833 NR Description: UDP-galactose transporter [Cricetulus griseus]
  misc_feature (1)..(97): Homolog of NCBI NO: 14334065 NR Description: UDP-galactose transporter [Mesocricetus auratus]
MAFNAVAIVIQDFDAVANKGFFHGYSFITLLMILNHALSGIAVSMVMKYADNIVKVYSTSVAMLLTAVVSVFLFNFHLSLAFFLGSTVVSVSVYLHSAGKLR

SEQ ID NO: 102345 - DNA, 1395 bp, Arabidopsis thaliana
  misc_feature (1)..(1395): Ceres Seq. ID no. 13610027
  misc_feature: MA Experiment ID: 20000315 Result: Down-regulated in Transcription
  misc_feature: MA Experiment 20000315 PARAMETER Experiment Name: At_14day_Shoots-Roots_Sub_P Parameter: Age (day) Value: 14
  misc_feature: MA Experiment 20000315 PARAMETER Experiment Name: At_14day_Shoots-Roots_Sub_P Parameter: Organism Value: A. thaliana
  misc_feature: MA Experiment 20000315 PARAMETER Experiment Name: At_14day_Shoots-Roots_Sub_P Parameter: Plant Line Value: WS
  misc_feature: MA Experiment 20000315 PARAMETER Experiment Name: At_14day_Shoots-Roots_Sub_P Parameter: Tissue Value: Shoots vs. Whole Plant
  misc_feature: MA Experiment ID: 20000327 Result: Down-regulated in Transcription
  misc_feature: MA Experiment 20000327 PARAMETER Experiment Name: At_42deg_Heat_Sub_P Parameter: Age (day) Value: 14
  misc_feature: MA Experiment 20000327 PARAMETER Experiment Name: At_42deg_Heat_Sub_P Parameter: Organism Value: A. thaliana
  misc_feature: MA Experiment 20000327 PARAMETER Experiment Name: At_42deg_Heat_Sub_P Parameter: Plant Line Value: WS
  misc_feature: MA Experiment 20000327 PARAMETER Experiment Name: At_42deg_Heat_Sub_P Parameter: Temperature (deg C) Value: 42 vs. 22
  misc_feature: MA Experiment 20000327 PARAMETER Experiment Name: At_42deg_Heat_Sub_P Parameter: Timepoint (hr) Value: 1
  misc_feature: MA Experiment 20000327 PARAMETER Experiment Name: At_42deg_Heat_Sub_P Parameter: Tissue Value: Aerial
  misc_feature: MA Experiment ID: 20000328 Result: Down-regulated in Transcription
  misc_feature: MA Experiment 20000328 PARAMETER Experiment Name: At_42deg_Heat_Sub_P Parameter: Age (day) Value: 14
  misc_feature: MA Experiment 20000328 PARAMETER Experiment Name: At_42deg_Heat_Sub_P Parameter: Organism Value: A. thaliana
  misc_feature: MA Experiment 20000328 PARAMETER Experiment Name: At_42deg_Heat_Sub_P Parameter: Plant Line Value: WS
  misc_feature: MA Experiment 20000328 PARAMETER Experiment Name: At_42deg_Heat_Sub_P Parameter: Temperature (deg C) Value: 42 vs. 22
  misc_feature: MA Experiment 20000328 PARAMETER Experiment Name: At_42deg_Heat_Sub_P Parameter: Timepoint (hr) Value: 6
  misc_feature: MA Experiment 20000328 PARAMETER Experiment Name: At_42deg_Heat_Sub_P Parameter: Tissue Value: Aerial
  misc_feature: MA Experiment ID: 20000347 Result: Down-regulated in Transcription
  misc_feature: MA Experiment 20000347 PARAMETER Experiment Name: At_2mM_SA_Sub_P Parameter: Age (day) Value: 14
  misc_feature: MA Experiment 20000347 PARAMETER Experiment Name: At_2mM_SA_Sub_P Parameter: Organism Value: A. thaliana
  misc_feature: MA Experiment 20000347 PARAMETER Experiment Name: At_2mM_SA_Sub_P Parameter: Plant Line Value: WS
  misc_feature: MA Experiment 20000347 PARAMETER Experiment Name: At_2mM_SA_Sub_P Parameter: Timepoint (hr) Value: 6
  misc_feature: MA Experiment 20000347 PARAMETER Experiment Name: At_2mM_SA_Sub_P Parameter: Tissue Value: Aerial
  misc_feature: MA Experiment 20000347 PARAMETER Experiment Name: At_2mM_SA_Sub_P Parameter: Treatment Value: 2mM SA vs. No Treatment
  misc_feature: MA Experiment ID: 20000355 Result: Down-regulated in Transcription
  misc_feature: MA Experiment 20000355 PARAMETER Experiment Name: At_Siliques_Sub_P Parameter: Age (day) Value: 21
  misc_feature: MA Experiment 20000355 PARAMETER Experiment Name: At_Siliques_Sub_P Parameter: Organism Value: A. thaliana
  misc_feature: MA Experiment 20000355 PARAMETER Experiment Name: At_Siliques_Sub_P Parameter: Plant Line Value: WS
  misc_feature: MA Experiment 20000355 PARAMETER Experiment Name: At_Siliques_Sub_P Parameter: Tissue Value: Less Than 5mm Siliques vs. Whole Plant
  misc_feature: MA Experiment ID: 20000440 Result: Down-regulated in Transcription
  misc_feature: MA Experiment 20000440 PARAMETER Experiment Name: At_Closed-Flower__Sub_P Parameter: Tissue Value: Closed Flower vs. Whole Plant
atggaccagcctcacgcgcttctagtggctagccctggcttgggtcacctcatccctatcctggagctcggcaaccgtctctcctccgtcctaaacatccacgtcaccattctcgcggtcacctccggctcctcttcaccgacagaaaccgaagccatacatgcagccgcgatgcgagccatgaagcccgcggtacgagatgccgtgaaattaatgaaacgaaaaccaacggtcatgattgttgactttttgggtacggaactgatgtccgtagccgatgacgtaggcatgacggctaaatacgtttacgttccaactcatgcgtggttcttggcagtcatggtgtacttgccggtgttagatacggtagtggaaggtgagtatgttgatattaaggagcctttgaagataccgggttgtaaaccggtcggaccgaaggagctgatggaaacgatgttagaccggtcgggccagcaatataaagagtgtgtacgagctggcttagaggtacctatgagcgatggtgttttggtaaatacttgggaggagttacaaggaaacactctcgctgcgcttagagaggacgaagaattgagccgggtcatgaaagtaccggtttatcctattgggccaattgttaggactaaccagcatgtagacaaacccaatagtatattcgagtggctagacgagcaacgggaaaggtcagtggtgtttgtgtgtttagggagcggtggaacgttgacgtttgagcaaacagtggaactcgctttgggtttagagttaagtggtcaaaggttcgtttgggttctacgtaggcccgcttcatatctcggggcgatctccagcgatgatgaacaggtaagtgccagtctacctgaaggtttcttggaccgcacgcgtggtgtggggattgtggttacgcaatgggcaccacaagttgagatcttgagccatagatcgatcggtgggttcttgtctcactgcggttggagttcggctttggaaagtttgactaaaggagttccgatcatcgcttggcctctttatgcggagcagtggatgaatgccacgttattgactgaggagatcggtgtggccgttcgtacatcggagttaccgtcggagagagtcatcggaagggaagaagtggcatctctggtgagaaagattatggcggaagaggatgaagaaggacagaaaattagggctaaagctgaggaggtgagggttagctccgaacgagcttggagtaaagacgggtcatcttataattctctattcgaatgggcaaaacgatgttatcttgtaccgtgattcgagaataacatcatgaacaacaatttctgtttaagatatcaactttttctatatgaatatatattaaggtgtgtt

SEQ ID NO: 102346 - protein, 438 aa, Arabidopsis thaliana
  peptide (1)..(438): Ceres Seq. ID no. 13610028
  misc_feature (5)..(61): Pfam Name: UDP-glucoronosyl and UDP-glucosyl transferase Pfam Description: UDP-glucoronosyl and UDP-glucosyl transferase
  misc_feature (58)..(438): Homolog of NCBI NO: 25286819 NR Description: probable flavonol 3-O-glucosyltransferase
  misc_feature (1)..(61): Homolog of NCBI NO: 25286819 NR Description: probable flavonol 3-O-glucosyltransferase
  misc_feature (1)..(437): Homolog of NCBI NO: 25286815 NR Description: probable flavonol 3-O-glucosyltransferase
  misc_feature (58)..(437): Homolog of NCBI NO: 30680413 NR Description: UDP-glucosyltransferase family [Arabidopsis
  misc_feature (58)..(437): Homolog of NCBI NO: 39104603 NR Description: putative flavonol 3-O-glucosyltransferase
  misc_feature (172)..(438): Homolog of NCBI NO: 30680415 NR Description: glycosyltransferase family [Arabidopsis thaliana]
  misc_feature (58)..(432): Homolog of NCBI NO: 2501494 NR Description: Flavonol 3-O-glucosyltransferase 5 (UDP-glucose
  misc_feature (3)..(71): Homolog of NCBI NO: 2501494 NR Description: Flavonol 3-O-glucosyltransferase 5 (UDP-glucose
  misc_feature (58)..(434): Homolog of NCBI NO: 15240051 NR Description: UDP-glycosyltransferase family [Arabidopsis
  misc_feature (3)..(62): Homolog of NCBI NO: 15240051 NR Description: UDP-glycosyltransferase family [Arabidopsis
MDQPHALLVASPGLGHLIPILELGNRLSSVLNIHVTILAVTSGSSSPTETEAIHAAAMRAMKPAVRDAVKLMKRKPTVMIVDFLGTELMSVADDVGMTAKYVYVPTHAWFLAVMVYLPVLDTVVEGEYVDIKEPLKIPGCKPVGPKELMETMLDRSGQQYKECVRAGLEVPMSDGVLVNTWEELQGNTLAALREDEELSRVMKVPVYPIGPIVRTNQHVDKPNSIFEWLDEQRERSVVFVCLGSGGTLTFEQTVELALGLELSGQRFVWVLRRPASYLGAISSDDEQVSASLPEGFLDRTRGVGIVVTQWAPQVEILSHRSIGGFLSHCGWSSALESLTKGVPIIAWPLYAEQWMNATLLTEEIGVAVRTSELPSERVIGREEVASLVRKIMAEEDEEGQKIRAKAEEVRVSSERAWSKDGSSYNSLFEWAKRCYLVP

SEQ ID NO: 102347 - protein, 381 aa, Arabidopsis thaliana
  peptide (1)..(381): Ceres Seq. ID no. 13610029
  misc_feature (1)..(378): Pfam Name: UDP-glucoronosyl and UDP-glucosyl transferase Pfam Description: UDP-glucoronosyl and UDP-glucosyl transferase
  misc_feature (1)..(381): Homolog of NCBI NO: 25286819 NR Description: probable flavonol 3-O-glucosyltransferase
  misc_feature (1)..(380): Homolog of NCBI NO: 25286815 NR Description: probable flavonol 3-O-glucosyltransferase
  misc_feature (1)..(380): Homolog of NCBI NO: 30680413 NR Description: UDP-glucosyltransferase family [Arabidopsis
  misc_feature (1)..(380): Homolog of NCBI NO: 39104603 NR Description: putative flavonol 3-O-glucosyltransferase
  misc_feature (115)..(381): Homolog of NCBI NO: 30680415 NR Description: glycosyltransferase family [Arabidopsis thaliana]
  misc_feature (1)..(375): Homolog of NCBI NO: 2501494 NR Description: Flavonol 3-O-glucosyltransferase 5 (UDP-glucose
  misc_feature (1)..(14): Homolog of NCBI NO: 2501494 NR Description: Flavonol 3-O-glucosyltransferase 5 (UDP-glucose
  misc_feature (1)..(377): Homolog of NCBI NO: 15240051 NR Description: UDP-glycosyltransferase family [Arabidopsis
  misc_feature (1)..(370): Homolog of NCBI NO: 18409172 NR Description: UDP-glycosyltransferase family [Arabidopsis >gi|15146272|gb|AAK83619.1| AT3g50740/T3A5_120 [Arabidopsis
  misc_feature (1)..(370): Homolog of NCBI NO: 7433913 NR Description: UTP-glucose glucosyltransferase-like protein -
MRAMKPAVRDAVKLMKRKPTVMIVDFLGTELMSVADDVGMTAKYVYVPTHAWFLAVMVYLPVLDTVVEGEYVDIKEPLKIPGCKPVGPKELMETMLDRSGQQYKECVRAGLEVPMSDGVLVNTWEELQGNTLAALREDEELSRVMKVPVYPIGPIVRTNQHVDKPNSIFEWLDEQRERSVVFVCLGSGGTLTFEQTVELALGLELSGQRFVWVLRRPASYLGAISSDDEQVSASLPEGFLDRTRGVGIVVTQWAPQVEILSHRSIGGFLSHCGWSSALESLTKGVPIIAWPLYAEQWMNATLLTEEIGVAVRTSELPSERVIGREEVASLVRKIMAEEDEEGQKIRAKAEEVRVSSERAWSKDGSSYNSLFEWAKRCYLVP

SEQ ID NO: 102348 - protein, 378 aa, Arabidopsis thaliana
  peptide (1)..(378): Ceres Seq. ID no. 13610030
  misc_feature (1)..(375): Pfam Name: UDP-glucoronosyl and UDP-glucosyl transferase Pfam Description: UDP-glucoronosyl and UDP-glucosyl transferase
  misc_feature (1)..(378): Homolog of NCBI NO: 25286819 NR Description: probable flavonol 3-O-glucosyltransferase
  misc_feature (1)..(377): Homolog of NCBI NO: 25286815 NR Description: probable flavonol 3-O-glucosyltransferase
  misc_feature (1)..(377): Homolog of NCBI NO: 30680413 NR Description: UDP-glucosyltransferase family [Arabidopsis
  misc_feature (1)..(377): Homolog of NCBI NO: 39104603 NR Description: putative flavonol 3-O-glucosyltransferase
  misc_feature (112)..(378): Homolog of NCBI NO: 30680415 NR Description: glycosyltransferase family [Arabidopsis thaliana]
  misc_feature (1)..(372): Homolog of NCBI NO: 2501494 NR Description: Flavonol 3-O-glucosyltransferase 5 (UDP-glucose
  misc_feature (1)..(11): Homolog of NCBI NO: 2501494 NR Description: Flavonol 3-O-glucosyltransferase 5 (UDP-glucose
  misc_feature (1)..(374): Homolog of NCBI NO: 15240051 NR Description: UDP-glycosyltransferase family [Arabidopsis
  misc_feature (1)..(367): Homolog of NCBI NO: 18409172 NR Description: UDP-glycosyltransferase family [Arabidopsis >gi|15146272|gb|AAK83619.1| AT3g50740/T3A5_120 [Arabidopsis
  misc_feature (1)..(367): Homolog of NCBI NO: 7433913 NR Description: UTP-glucose glucosyltransferase-like protein -
MKPAVRDAVKLMKRKPTVMIVDFLGTELMSVADDVGMTAKYVYVPTHAWFLAVMVYLPVLDTVVEGEYVDIKEPLKIPGCKPVGPKELMETMLDRSGQQYKECVRAGLEVPMSDGVLVNTWEELQGNTLAALREDEELSRVMKVPVYPIGPIVRTNQHVDKPNSIFEWLDEQRERSVVFVCLGSGGTLTFEQTVELALGLELSGQRFVWVLRRPASYLGAISSDDEQVSASLPEGFLDRTRGVGIVVTQWAPQVEILSHRSIGGFLSHCGWSSALESLTKGVPIIAWPLYAEQWMNATLLTEEIGVAVRTSELPSERVIGREEVASLVRKIMAEEDEEGQKIRAKAEEVRVSSERAWSKDGSSYNSLFEWAKRCYLVP

SEQ ID NO: 102349 - DNA, 637 bp, Arabidopsis thaliana
  misc_feature (1)..(637): Ceres Seq. ID no. 13610031
  misc_feature: MA Experiment ID: 108434 Result: Up-regulated in Transcription
  misc_feature: MA Experiment 108434 PARAMETER Experiment Name: At_Root_Tips_cDNA_P Parameter: Tissue Value: Root Tips
  misc_feature: MA Experiment ID: 108462 Result: Down-regulated in Transcription
  misc_feature: MA Experiment 108462 PARAMETER Experiment Name: At_Germinating_Seeds_cDNA_P Parameter: Age (day) Value: 2 vs. 0
  misc_feature: MA Experiment 108462 PARAMETER Experiment Name: At_Germinating_Seeds_cDNA_P Parameter: Tissue Value: Germinating Seeds
  misc_feature: MA Experiment ID: 108463 Result: Down-regulated in Transcription
  misc_feature: MA Experiment 108463 PARAMETER Experiment Name: At_Germinating_Seeds_cDNA_P Parameter: Age (day) Value: 3 vs. 0
  misc_feature: MA Experiment 108463 PARAMETER Experiment Name: At_Germinating_Seeds_cDNA_P Parameter: Tissue Value: Germinating Seeds
  misc_feature: MA Experiment ID: 108464 Result: Down-regulated in Transcription
  misc_feature: MA Experiment 108464 PARAMETER Experiment Name: At_Germinating_Seeds_cDNA_P Parameter: Age (day) Value: 4 vs. 0
  misc_feature: MA Experiment 108464 PARAMETER Experiment Name: At_Germinating_Seeds_cDNA_P Parameter: Tissue Value: Germinating Seeds
  misc_feature: MA Experiment ID: 108573 Result: Down-regulated in Transcription
  misc_feature: MA Experiment 108573 PARAMETER Experiment Name: At_Drought_cDNA_P Parameter: Timepoint (hr) Value: 6
  misc_feature: MA Experiment 108573 PARAMETER Experiment Name: At_Drought_cDNA_P Parameter: Tissue Value: Aerial
  misc_feature: MA Experiment 108573 PARAMETER Experiment Name: At_Drought_cDNA_P Parameter: Treatment Value: Drought vs. No Drought
  misc_feature: MA Experiment ID: 20000111 Result: Down-regulated in Transcription
  misc_feature: MA Experiment 20000111 PARAMETER Experiment Name: At_42deg_Heat_cDNA_P Parameter: Temperature (deg C) Value: 42 vs. 22
  misc_feature: MA Experiment 20000111 PARAMETER Experiment Name: At_42deg_Heat_cDNA_P Parameter: Timepoint (hr) Value: 6
  misc_feature: MA Experiment 20000111 PARAMETER Experiment Name: At_42deg_Heat_cDNA_P Parameter: Tissue Value: Aerial
gaaaagattctgacgctggtagtggtgagtggtgagcacggccaaaaggattttggtattgaaaaatggcatcaaaattggttcaacttcaatcaaaggcatgtcaggcttcaaagtttgtggccaagcatgggaattcgtactacaagcaattgttggagcagaacaagcaatacatccaagagcctgcaactatagagaagtgcagtgaattgtctaaacaattgctctacactcgtcttgctagcattcccgggcgctacgaaacatttaggaaagaagtagactacgcaaagaacttattgaagaacagagcgaatctgaaggtggaagatgcaggaatcgctgcattgtttggcttagaatgctttgcttggttttgcgcaggtgaaatcgtcggcagaggattcactttcaccggctactacccttgaaattgagacaacaaacaaccaggtcgccggaatattcttcctgacgcttgtaactccctccatatgattcctcacttgaactatatatacttcctcgaatccatttatattttcagttttttcctgaaacagaagtgttggagctaagggaaaaaaaaacattttggtaaagctcttaataagttgagaaaaatgcatttgat

SEQ ID NO: 102350 - protein, 122 aa, Arabidopsis thaliana; identical to SEQ ID NO: 29646
  peptide (1)..(122): Ceres Seq. ID no. 13610032
  misc_feature (8)..(122): Pfam Name: Mitochondrial ATP synthase g subunit Pfam Description: Mitochondrial ATP synthase g subunit
  misc_feature (1)..(122): Homolog of NCBI NO: 15224821 NR Description: copia-related retroelement pol polyprotein
  misc_feature (1)..(122): Homolog of NCBI NO: 15233603 NR Description: expressed protein [Arabidopsis thaliana]
  misc_feature (1)..(122): Homolog of NCBI NO: 15236143 NR Description: expressed protein [Arabidopsis thaliana]
  misc_feature (1)..(120): Homolog of NCBI NO: 34912342 NR Description: P0518F01.5 [Oryza sativa (japonica

SEQ ID NO: 102351 - protein, 65 aa, Arabidopsis thaliana; identical to SEQ ID NO: 29647
  peptide (1)..(65): Ceres Seq. ID no. 13610033

SEQ ID NO: 102352 - DNA, 1561 bp, Arabidopsis thaliana
  misc_feature (1)..(1561): Ceres Seq. ID no. 13610034
  misc_feature: MA Experiment ID: 108434 Result: Up-regulated in Transcription
  misc_feature: MA Experiment 108434 PARAMETER Experiment Name: At_Root_Tips_cDNA_P Parameter: Tissue Value: Root Tips
  misc_feature: MA Experiment ID: 108463 Result: Down-regulated in Transcription
  misc_feature: MA Experiment 108463 PARAMETER Experiment Name: At_Germinating_Seeds_cDNA_P Parameter: Age (day) Value: 3 vs. 0
  misc_feature: MA Experiment 108463 PARAMETER Experiment Name: At_Germinating_Seeds_cDNA_P Parameter: Tissue Value: Germinating Seeds
  misc_feature: MA Experiment ID: 108595 Result: Down-regulated in Transcription
  misc_feature: MA Experiment 108595 PARAMETER Experiment Name: At_Ler-pi_Ovule_cDNA_P Parameter: Plant Line Value: null
  misc_feature: MA Experiment ID: 20000087 Result: Down-regulated in Transcription
  misc_feature: MA Experiment 20000087 PARAMETER Experiment Name: At_100uM_ABA_Mutants_cDNA_P Parameter: Plant Line Value: WS
  misc_feature: MA Experiment 20000087 PARAMETER Experiment Name: At_100uM_ABA_Mutants_cDNA_P Parameter: Timepoint (hr) Value: 6
  misc_feature: MA Experiment 20000087 PARAMETER Experiment Name: At_100uM_ABA_Mutants_cDNA_P Parameter: Tissue Value: Aerial
  misc_feature: MA Experiment 20000087 PARAMETER Experiment Name: At_100uM_ABA_Mutants_cDNA_P Parameter: Treatment Value: 100uM ABA vs. No Treatment
  misc_feature: MA Experiment ID: 20000117 Result: Down-regulated in Transcription
  misc_feature: MA Experiment 20000117 PARAMETER Experiment Name: At_100uM_ABA_Mutants_cDNA_P Parameter: Plant Line Value: Columbia
  misc_feature: MA Experiment 20000117 PARAMETER Experiment Name: At_100uM_ABA_Mutants_cDNA_P Parameter: Timepoint (hr) Value: 6
  misc_feature: MA Experiment 20000117 PARAMETER Experiment Name: At_100uM_ABA_Mutants_cDNA_P Parameter: Tissue Value: Aerial
  misc_feature: MA Experiment 20000117 PARAMETER Experiment Name: At_100uM_ABA_Mutants_cDNA_P Parameter: Treatment Value: 100uM ABA vs. No Treatment
  misc_feature: MA Experiment ID: 20001451 Result: Down-regulated in Transcription
  misc_feature: MA Experiment 20001451 PARAMETER Experiment Name: At_Far-red-induction_P Parameter: Age (day) Value: 7
  misc_feature: MA Experiment 20001451 PARAMETER Experiment Name: At_Far-red-induction_P Parameter: Light Value: Far-red vs. White
  misc_feature: MA Experiment 20001451 PARAMETER Experiment Name: At_Far-red-induction_P Parameter: Organism Value: A. thaliana
  misc_feature: MA Experiment 20001451 PARAMETER Experiment Name: At_Far-red-induction_P Parameter: Plant Line Value: Columbia
  misc_feature: MA Experiment 20001451 PARAMETER Experiment Name: At_Far-red-induction_P Parameter: Timepoint (hr) Value: 24
  misc_feature: MA Experiment 20001451 PARAMETER Experiment Name: At_Far-red-induction_P Parameter: Tissue Value: Whole Plant
cttgcgttttcgtcccacaatctttgtcgtggttttctgctgtcttcttctccgtcgaacttctccgaccacttcgtatagagagagagagtgacgaagagtttacggaatcgaatccaataatgagtactgcgtcggcttttagttcaatccaaggatgctggttcaagggcgaaaggaaaatgtgtagcggataagcgagccaagaggcttactttgggatcccatgtggcttcgccatcttcaatgagcttcagagtttcagctagtagttctgttaaacctgaaaaggatattaggattggtcttcttggtgcaagtggctacactggtgctgagatcgttaggcttcttgcaaatcatccgcatttccaggtcactttgatgactgctgatagaaaagctggccagtcaatggaaagcgttttcccacacctgagagctcaaaaactacctactttggtctcggtaaaggatgcagatttttctactgtggatgctgtattctgctgtttacctcacggaacaactcaggaaatcatcaaggaactgcctactgcattgaaaatcgttgatctttcagcggacttccggttgcgtaatattgcagaatatgaagaatggtatggtcagcctcacaaggcagtagagttacagaaagaagttgtgtatggtctaacagagatactaagggaggacataaaaaaggcacgacttgtggctaacccaggctgttacccgactacgattcaacttcctcttgttcctttactaaaggcaaatctcatcaaacatgaaaacatcattatcgatgcaaaatctggtgttagtggagcaggacgtggtgctaaggaggcaaatctttactctgagatagctgaaggcatttcttcttatggtgtcacccgtcatcgccatgttcctgaaattgaacagggattatctgatgttgcacagtcaaaagtaacagtcagttttacgccacatctcatgccaatgatccgtggaatgcaatcgactatatatgtggaaatggctcccggggttagaaccgaagatttacaccagcaattgaagacgtcttatgaggatgaagaatttgtcaaagtgttggatgaaggagttgttcctcggacacacaacgttagaggatccaactattgtcatatgagtgtctttcctgatcgaattcctggaagagctatcataatctcagtgattgataatcttgtgaaaggagcttcgggacaagcgttgcagaatcttaacataatgttgggatatcccgaaacaacggggctcctacaccagccgcttttcccttaaaaatcccacctttaaatcgatgaccaatctgaagctgttgagacggcaatgttaagcataaagatggttggttatatgattcatatttatagacaataaagcctcttcttttaccattacaaataaatggttttgttgtttgtttattaaggttttgatgaacctttattcttgttatctctattttctgaattgcaattttcgtttgagtcacaaaagaaagttgaacttattc

SEQ ID NO: 102353 - protein, 359 aa, Arabidopsis thaliana; identical to SEQ ID NO: 43181
  peptide (1)..(359): Ceres Seq. ID no. 13610035
  misc_feature (172)..(330): Pfam Name: Semialdehyde dehydrogenase, dimerisation domain Pfam Description: Semialdehyde dehydrogenase, dimerisation domain
  misc_feature (1)..(359): Homolog of NCBI NO: 16604368 NR Description: At2g19940/F6F22.3 [Arabidopsis thaliana]
  misc_feature (1)..(359): Homolog of NCBI NO: 18399202 NR Description: N-acetyl-gamma-glutamyl-phosphate reductase
  misc_feature (1)..(359): Homolog of NCBI NO: 25284367 NR Description: hypothetical protein At2g19940 [imported] -
  misc_feature (1)..(359): Homolog of NCBI NO: 37535658 NR Description: putative N-acetyl-gamma-glutamyl-phosphate
  misc_feature (17)..(359): Homolog of NCBI NO: 22968389 NR Description: hypothetical protein [Rhodospirillum rubrum]
  misc_feature (85)..(359): Homolog of NCBI NO: 23013472 NR Description: hypothetical protein [Magnetospirillum
  misc_feature (1)..(359): Homolog of NCBI NO: 6714965 NR Description: N-acetyl-gamma-glutamyl-phosphate reductase
  misc_feature (18)..(359): Homolog of NCBI NO: 28376951 NR Description: N-acetyl-gamma-glutamyl-phosphate reductase
  misc_feature (19)..(359): Homolog of NCBI NO: 22956652 NR Description: hypothetical protein [Rhodobacter sphaeroides]
  misc_feature (15)..(359): Homolog of NCBI NO: 22998260 NR Description: hypothetical protein [Magnetococcus sp. MC-1]

SEQ ID NO: 102354 - protein, 313 aa, Arabidopsis thaliana
  peptide (1)..(313): Ceres Seq. ID no. 13610036
  misc_feature (126)..(284): Pfam Name: Semialdehyde dehydrogenase, dimerisation domain Pfam Description: Semialdehyde dehydrogenase, dimerisation domain
  misc_feature (1)..(313): Homolog of NCBI NO: 16604368 NR Description: At2g19940/F6F22.3 [Arabidopsis thaliana]
  misc_feature (1)..(313): Homolog of NCBI NO: 18399202 NR Description: N-acetyl-gamma-glutamyl-phosphate reductase
  misc_feature (1)..(313): Homolog of NCBI NO: 25284367 NR Description: hypothetical protein At2g19940 [imported] -
  misc_feature (1)..(313): Homolog of NCBI NO: 37535658 NR Description: putative N-acetyl-gamma-glutamyl-phosphate
  misc_feature (1)..(313): Homolog of NCBI NO: 22968389 NR Description: hypothetical protein [Rhodospirillum rubrum]
  misc_feature (39)..(313): Homolog of NCBI NO: 23013472 NR Description: hypothetical protein [Magnetospirillum
  misc_feature (1)..(313): Homolog of NCBI NO: 6714965 NR Description: N-acetyl-gamma-glutamyl-phosphate reductase
  misc_feature (1)..(313): Homolog of NCBI NO: 28376951 NR Description: N-acetyl-gamma-glutamyl-phosphate reductase
  misc_feature (1)..(313): Homolog of NCBI NO: 22956652 NR Description: hypothetical protein [Rhodobacter sphaeroides]
  misc_feature (1)..(313): Homolog of NCBI NO: 22998260 NR Description: hypothetical protein [Magnetococcus sp. MC-1]
MTADRKAGQSMESVFPHLRAQKLPTLVSVKDADFSTVDAVFCCLPHGTTQEIIKELPTALKIVDLSADFRLRNIAEYEEWYGQPHKAVELQKEVVYGLTEILREDIKKARLVANPGCYPTTIQLPLVPLLKANLIKHENIIIDAKSGVSGAGRGAKEANLYSEIAEGISSYGVTRHRHVPEIEQGLSDVAQSKVTVSFTPHLMPMIRGMQSTIYVEMAPGVRTEDLHQQLKTSYEDEEFVKVLDEGVVPRTHNVRGSNYCHMSVFPDRIPGRAIIISVIDNLVKGASGQALQNLNIMLGYPETTGLLHQPLFP

SEQ ID NO: 102355 - protein, 303 aa, Arabidopsis thaliana
  peptide (1)..(303): Ceres Seq. ID no. 13610037
  misc_feature (116)..(274): Pfam Name: Semialdehyde dehydrogenase, dimerisation domain Pfam Description: Semialdehyde dehydrogenase, dimerisation domain
  misc_feature (1)..(303): Homolog of NCBI NO: 16604368 NR Description: At2g19940/F6F22.3 [Arabidopsis thaliana]
  misc_feature (1)..(303): Homolog of NCBI NO: 18399202 NR Description: N-acetyl-gamma-glutamyl-phosphate reductase
  misc_feature (1)..(303): Homolog of NCBI NO: 25284367 NR Description: hypothetical protein At2g19940 [imported] -
  misc_feature (1)..(303): Homolog of NCBI NO: 37535658 NR Description: putative N-acetyl-gamma-glutamyl-phosphate
  misc_feature (1)..(303): Homolog of NCBI NO: 22968389 NR Description: hypothetical protein [Rhodospirillum rubrum]
  misc_feature (29)..(303): Homolog of NCBI NO: 23013472 NR Description: hypothetical protein [Magnetospirillum
  misc_feature (1)..(303): Homolog of NCBI NO: 6714965 NR Description: N-acetyl-gamma-glutamyl-phosphate reductase
  misc_feature (1)..(303): Homolog of NCBI NO: 28376951 NR Description: N-acetyl-gamma-glutamyl-phosphate reductase
  misc_feature (1)..(303): Homolog of NCBI NO: 22956652 NR Description: hypothetical protein [Rhodobacter sphaeroides]
  misc_feature (1)..(303): Homolog of NCBI NO: 22998260 NR Description: hypothetical protein [Magnetococcus sp. MC-1]
MESVFPHLRAQKLPTLVSVKDADFSTVDAVFCCLPHGTTQEIIKELPTALKIVDLSADFRLRNIAEYEEWYGQPHKAVELQKEVVYGLTEILREDIKKARLVANPGCYPTTIQLPLVPLLKANLIKHENIIIDAKSGVSGAGRGAKEANLYSEIAEGISSYGVTRHRHVPEIEQGLSDVAQSKVTVSFTPHLMPMIRGMQSTIYVEMAPGVRTEDLHQQLKTSYEDEEFVKVLDEGVVPRTHNVRGSNYCHMSVFPDRIPGRAIIISVIDNLVKGASGQALQNLNIMLGYPETTGLLHQPLFP

SEQ ID NO: 102356 - DNA, 1201 bp, Arabidopsis thaliana
  misc_feature (1)..(1201): Ceres Seq. ID no. 13610042
  misc_feature: MA Experiment ID: 108462 Result: Down-regulated in Transcription
  misc_feature: MA Experiment 108462 PARAMETER Experiment Name: At_Germinating_Seeds_cDNA_P Parameter: Age (day) Value: 2 vs. 0
  misc_feature: MA Experiment 108462 PARAMETER Experiment Name: At_Germinating_Seeds_cDNA_P Parameter: Tissue Value: Germinating Seeds
  misc_feature: MA Experiment ID: 108463 Result: Down-regulated in Transcription
  misc_feature: MA Experiment 108463 PARAMETER Experiment Name: At_Germinating_Seeds_cDNA_P Parameter: Age (day) Value: 3 vs. 0
  misc_feature: MA Experiment 108463 PARAMETER Experiment Name: At_Germinating_Seeds_cDNA_P Parameter: Tissue Value: Germinating Seeds
  misc_feature: MA Experiment ID: 108464 Result: Down-regulated in Transcription
  misc_feature: MA Experiment 108464 PARAMETER Experiment Name: At_Germinating_Seeds_cDNA_P Parameter: Age (day) Value: 4 vs. 0
  misc_feature: MA Experiment 108464 PARAMETER Experiment Name: At_Germinating_Seeds_cDNA_P Parameter: Tissue Value: Germinating Seeds
  misc_feature: MA Experiment ID: 108561 Result: Down-regulated in Transcription
  misc_feature: MA Experiment 108561 PARAMETER Experiment Name: At_100uM_ABA_cDNA_P Parameter: Timepoint (hr) Value: 6
  misc_feature: MA Experiment 108561 PARAMETER Experiment Name: At_100uM_ABA_cDNA_P Parameter: Tissue Value: Aerial
  misc_feature: MA Experiment 108561 PARAMETER Experiment Name: At_100uM_ABA_cDNA_P Parameter: Treatment Value: 100uM ABA vs. No Treatment
  misc_feature: MA Experiment ID: 108572 Result: Down-regulated in Transcription
  misc_feature: MA Experiment 108572 PARAMETER Experiment Name: At_Drought_cDNA_P Parameter: Timepoint (hr) Value: 1
  misc_feature: MA Experiment 108572 PARAMETER Experiment Name: At_Drought_cDNA_P Parameter: Tissue Value: Aerial
  misc_feature: MA Experiment 108572 PARAMETER Experiment Name: At_Drought_cDNA_P Parameter: Treatment Value: Drought vs. No Drought
  misc_feature: MA Experiment ID: 108573 Result: Down-regulated in Transcription
  misc_feature: MA Experiment 108573 PARAMETER Experiment Name: At_Drought_cDNA_P Parameter: Timepoint (hr) Value: 6
  misc_feature: MA Experiment 108573 PARAMETER Experiment Name: At_Drought_cDNA_P Parameter: Tissue Value: Aerial
  misc_feature: MA Experiment 108573 PARAMETER Experiment Name: At_Drought_cDNA_P Parameter: Treatment Value: Drought vs. No Drought
  misc_feature: MA Experiment ID: 108595 Result: Down-regulated in Transcription
  misc_feature: MA Experiment 108595 PARAMETER Experiment Name: At_Ler-pi_Ovule_cDNA_P Parameter: Plant Line Value: null
  misc_feature: MA Experiment ID: 108607 Result: Down-regulated in Transcription
  misc_feature: MA Experiment 108607 PARAMETER Experiment Name: At_100uM_ABA_cDNA_P Parameter: Timepoint (hr) Value: 4
  misc_feature: MA Experiment 108607 PARAMETER Experiment Name: At_100uM_ABA_cDNA_P Parameter: Tissue Value: Aerial
  misc_feature: MA Experiment 108607 PARAMETER Experiment Name: At_100uM_ABA_cDNA_P Parameter: Treatment Value: 100uM ABA vs. No Treatment
  misc_feature: MA Experiment ID: 20000185 Result: Down-regulated in Transcription
  misc_feature: MA Experiment 20000185 PARAMETER Experiment Name: At_Roots__P Parameter: Age (day) Value: 7 vs. 21
  misc_feature: MA Experiment 20000185 PARAMETER Experiment Name: At_Roots__P Parameter: Organism Value: A. thaliana
  misc_feature: MA Experiment 20000185 PARAMETER Experiment Name: At_Roots__P Parameter: Tissue Value: Roots vs. Whole Plant
  misc_feature: MA Experiment ID: 20000437 Result: Down-regulated in Transcription
  misc_feature: MA Experiment 20000437 PARAMETER Experiment Name: At_Drought_P Parameter: Age (day) Value: 8
  misc_feature: MA Experiment 20000437 PARAMETER Experiment Name: At_Drought_P Parameter: Organism Value: A. thaliana
  misc_feature: MA Experiment 20000437 PARAMETER Experiment Name: At_Drought_P Parameter: Plant Line Value: WS
  misc_feature: MA Experiment 20000437 PARAMETER Experiment Name: At_Drought_P Parameter: Timepoint (hr) Value: 24
  misc_feature: MA Experiment 20000437 PARAMETER Experiment Name: At_Drought_P Parameter: Tissue Value: Whole Plant
  misc_feature: MA Experiment 20000437 PARAMETER Experiment Name: At_Drought_P Parameter: Treatment Value: Drought vs. No Drought
  misc_feature: MA Experiment ID: 20000495 Result: Down-regulated in Transcription
  misc_feature: MA Experiment 20000495 PARAMETER Experiment Name: At_Guard_Cells_P Parameter: Harvest Date Value: 8/2/2002
  misc_feature: MA Experiment 20000495 PARAMETER Experiment Name: At_Guard_Cells_P Parameter: Organism Value: A. thaliana
  misc_feature: MA Experiment 20000495 PARAMETER Experiment Name: At_Guard_Cells_P Parameter: Tissue Value: Guard Cells vs. Leaves
  misc_feature: MA Experiment ID: 20001451 Result: Down-regulated in Transcription
  misc_feature: MA Experiment 20001451 PARAMETER Experiment Name: At_Far-red-induction_P Parameter: Age (day) Value: 7
  misc_feature: MA Experiment 20001451 PARAMETER Experiment Name: At_Far-red-induction_P Parameter: Light Value: Far-red vs. White
  misc_feature: MA Experiment 20001451 PARAMETER Experiment Name: At_Far-red-induction_P Parameter: Organism Value: A. thaliana
  misc_feature: MA Experiment 20001451 PARAMETER Experiment Name: At_Far-red-induction_P Parameter: Plant Line Value: Columbia
  misc_feature: MA Experiment 20001451 PARAMETER Experiment Name: At_Far-red-induction_P Parameter: Timepoint (hr) Value: 24
  misc_feature: MA Experiment 20001451 PARAMETER Experiment Name: At_Far-red-induction_P Parameter: Tissue Value: Whole Plant
gagaaactgtgaggccaaaaagtttggttcttgagaaatgatggcggctcgtactcattgtatcaaccttatccccaaagtatgtcttccacaatccttcagaactggagaatcagtgactaatctcagatttgattgcgtctctaagtcatcgaagctttctctcaagacatcatgtggaagatcaagaacgcatcaccggaggcaaaatctcagcatccggtccgtgtttactggaatcgtggaggaaatgggtgaagtcaaggacttgggaatggccgatcacggaggattcgacctcaaaatcggagcgagagtggtgttagaggacgtgaagctcggtgacagtatcgccgtgaacggtacttgtttaacggtgacggagtttaacgcagaggagttcacagtagggttagcaccggagacgctgagaaaaacatcgttggaggagttaaagaaaggatctccggtgaatctggagcgtgcgttgcagccagtgagcaggatgggtggacacgtggttcagggacacgtggatgggacgggagtgattgaatcaatggaggtagagggtgattctttgtgggtgaaggtgaaagctgacaagggtttgttgaaatacattgtgcctaaaggatttgtggctgttgatgggactagcttgacggttgttgatgtgtttgatgaagagagctgtttcaatttcatgatgattgcttatacgcaacagaatgtagtgattccgactaagaagattgggcagaaagtgaatcttgaggttgatatcatggggaagtatgttgagaggcttctcaccagtggtggcttctccaaaggaaaagaaaatatttgatttgatgggacttgggagtgggagctttgttgagcggagcttgaccttttggcctggggttatatgtatcttaacctctgtttcttcgtaatggtgctagtgaacagtccacgcatttaggcgcggtgagaaaagtaaatcaaccttattgagtaatgatgatcaaatcattcgtgtaataaacccaagaatcaaattttgtaatatggcagtgccccttttaaaacttagattctgttatgcttttgttagaccttcatatgtatatctttaagtgtttcgagaagtttataagaaagggagttgtatacataagaccaagaggcatatataaatgtgtttttaccc

SEQ ID NO: 102357 - protein, 271 aa, Arabidopsis thaliana; identical to SEQ ID NO: 25759
  peptide (1)..(271): Ceres Seq. ID no. 13610043
  misc_feature (163)..(249): Pfam Name: Lumazine binding domain Pfam Description: Lumazine binding domain
  misc_feature (1)..(271): Homolog of NCBI NO: 18399445 NR Description: riboflavin synthase alpha chain -related thaliana] >gi|13605593|gb|AAK32790.1|AF361622_1 [Arabidopsis thaliana] >gi|19548077|gb|AAL87403.1|
  misc_feature (2)..(271): Homolog of NCBI NO: 21593865 NR Description: putative riboflavin synthase alpha chain
  misc_feature (72)..(267): Homolog of NCBI NO: 25287068 NR Description: probable riboflavin synthase alpha chain
  misc_feature (54)..(259): Homolog of NCBI NO: 22971150 NR Description: hypothetical protein [Chloroflexus aurantiacus]
  misc_feature (64)..(269): Homolog of NCBI NO: 28210396 NR Description: riboflavin synthase alpha chain [Clostridium E88] >gi|28202833|gb|AAO35277.1| riboflavin synthase alpha chain
  misc_feature (64)..(259): Homolog of NCBI NO: 23020140 NR Description: hypothetical protein [Clostridium thermocellum
  misc_feature (64)..(259): Homolog of NCBI NO: 19075812 NR Description: riboflavin synthase alpha chain
  misc_feature (64)..(271): Homolog of NCBI NO: 1710403 NR Description: Riboflavin synthase alpha chain
  misc_feature (64)..(257): Homolog of NCBI NO: 18252608 NR Description: riboflavin synthase [Pichia guilliermondii]
  misc_feature (64)..(259): Homolog of NCBI NO: 33152275 NR Description: riboflavin synthase, alpha chain [Haemophilus

SEQ ID NO: 102358 - protein, 270 aa, Arabidopsis thaliana; identical to SEQ ID NO: 25760
  peptide (1)..(270): Ceres Seq. ID no. 13610044
  misc_feature (162)..(248): Pfam Name: Lumazine binding domain Pfam Description: Lumazine binding domain
  misc_feature (1)..(270): Homolog of NCBI NO: 18399445 NR Description: riboflavin synthase alpha chain -related thaliana] >gi|13605593|gb|AAK32790.1|AF361622_1 [Arabidopsis thaliana] >gi|19548077|gb|AAL87403.1|
  misc_feature (1)..(270): Homolog of NCBI NO: 21593865 NR Description: putative riboflavin synthase alpha chain
  misc_feature (71)..(266): Homolog of NCBI NO: 25287068 NR Description: probable riboflavin synthase alpha chain
  misc_feature (53)..(258): Homolog of NCBI NO: 22971150 NR Description: hypothetical protein [Chloroflexus aurantiacus]
  misc_feature (63)..(268): Homolog of NCBI NO: 28210396 NR Description: riboflavin synthase alpha chain [Clostridium E88] >gi|28202833|gb|AAO35277.1| riboflavin synthase alpha chain
  misc_feature (63)..(258): Homolog of NCBI NO: 23020140 NR Description: hypothetical protein [Clostridium thermocellum
  misc_feature (63)..(258): Homolog of NCBI NO: 19075812 NR Description: riboflavin synthase alpha chain
  misc_feature (63)..(270): Homolog of NCBI NO: 1710403 NR Description: Riboflavin synthase alpha chain
  misc_feature (63)..(256): Homolog of NCBI NO: 18252608 NR Description: riboflavin synthase [Pichia guilliermondii]
  misc_feature (63)..(258): Homolog of NCBI NO: 33152275 NR Description: riboflavin synthase, alpha chain [Haemophilus

SEQ ID NO: 102359 - protein, 200 aa, Arabidopsis thaliana; identical to SEQ ID NO: 25761
  peptide (1)..(200): Ceres Seq. ID no. 13610045
  misc_feature (92)..(178): Pfam Name: Lumazine binding domain Pfam Description: Lumazine binding domain
  misc_feature (1)..(200): Homolog of NCBI NO: 18399445 NR Description: riboflavin synthase alpha chain -related thaliana] >gi|13605593|gb|AAK32790.1|AF361622_1 [Arabidopsis thaliana] >gi|19548077|gb|AAL87403.1|
  misc_feature (1)..(200): Homolog of NCBI NO: 21593865 NR Description: putative riboflavin synthase alpha chain
  misc_feature (1)..(196): Homolog of NCBI NO: 25287068 NR Description: probable riboflavin synthase alpha chain
  misc_feature (1)..(188): Homolog of NCBI NO: 22971150 NR Description: hypothetical protein [Chloroflexus aurantiacus]
  misc_feature (1)..(198): Homolog of NCBI NO: 28210396 NR Description: riboflavin synthase alpha chain [Clostridium E88] >gi|28202833|gb|AAO35277.1| riboflavin synthase alpha chain
  misc_feature (1)..(188): Homolog of NCBI NO: 23020140 NR Description: hypothetical protein [Clostridium thermocellum
  misc_feature (1)..(188): Homolog of NCBI NO: 19075812 NR Description: riboflavin synthase alpha chain
  misc_feature (1)..(200): Homolog of NCBI NO: 1710403 NR Description: Riboflavin synthase alpha chain
  misc_feature (1)..(186): Homolog of NCBI NO: 18252608 NR Description: riboflavin synthase [Pichia guilliermondii]
  misc_feature (1)..(188): Homolog of NCBI NO: 33152275 NR Description: riboflavin synthase, alpha chain [Haemophilus

SEQ ID NO: 102360 - DNA, 1889 bp, Arabidopsis thaliana
  misc_feature (1)..(1889): Ceres Seq. ID no. 13610046
  misc_feature: MA Experiment ID: 20001451 Result: Up-regulated in Transcription
  misc_feature: MA Experiment 20001451 PARAMETER Experiment Name: At_Far-red-induction_P Parameter: Age (day) Value: 7
  misc_feature: MA Experiment 20001451 PARAMETER Experiment Name: At_Far-red-induction_P Parameter: Light Value: Far-red vs. White
  misc_feature: MA Experiment 20001451 PARAMETER Experiment Name: At_Far-red-induction_P Parameter: Organism Value: A. thaliana
  misc_feature: MA Experiment 20001451 PARAMETER Experiment Name: At_Far-red-induction_P Parameter: Plant Line Value: Columbia
  misc_feature: MA Experiment 20001451 PARAMETER Experiment Name: At_Far-red-induction_P Parameter: Timepoint (hr) Value: 24
  misc_feature: MA Experiment 20001451 PARAMETER Experiment Name: At_Far-red-induction_P Parameter: Tissue Value: Whole Plant
  misc_feature: MA Experiment ID: 20001905 Result: Up-regulated in Transcription
  misc_feature: MA Experiment 20001905 PARAMETER Experiment Name: At_Drought_Reproduction_P Parameter: Age (day) Value: 40
  misc_feature: MA Experiment 20001905 PARAMETER Experiment Name: At_Drought_Reproduction_P Parameter: Organism Value: A. thaliana
  misc_feature: MA Experiment 20001905 PARAMETER Experiment Name: At_Drought_Reproduction_P Parameter: Plant Line Value: WS
  misc_feature: MA Experiment 20001905 PARAMETER Experiment Name: At_Drought_Reproduction_P Parameter: Timepoint (day) Value: 10
  misc_feature: MA Experiment 20001905 PARAMETER Experiment Name: At_Drought_Reproduction_P Parameter: Tissue Value: Rosettes
  misc_feature: MA Experiment 20001905 PARAMETER Experiment Name: At_Drought_Reproduction_P Parameter: Treatment Value: Drought vs. No Drought
  misc_feature: MA Experiment ID: 20001911 Result: Up-regulated in Transcription
  misc_feature: MA Experiment 20001911 PARAMETER Experiment Name: At_Drought_Reproduction_P Parameter: Age (day) Value: 40
  misc_feature: MA Experiment 20001911 PARAMETER Experiment Name: At_Drought_Reproduction_P Parameter: Organism Value: A. thaliana
  misc_feature: MA Experiment 20001911 PARAMETER Experiment Name: At_Drought_Reproduction_P Parameter: Plant Line Value: WS
  misc_feature: MA Experiment 20001911 PARAMETER Experiment Name: At_Drought_Reproduction_P Parameter: Timepoint (day) Value: 10
  misc_feature: MA Experiment 20001911 PARAMETER Experiment Name: At_Drought_Reproduction_P Parameter: Tissue Value: Flowers
  misc_feature: MA Experiment 20001911 PARAMETER Experiment Name: At_Drought_Reproduction_P Parameter: Treatment Value: Drought vs. No Drought
tccattaattctgctgctgcaaattctatcgaactggtgagttttgttaatctctttcctcgttcgtccttgtctgtatatcagatcgatctctattaccgttttagcttgttcttgatctttgtcaacataaaaacaatcaaacaaagtttcttctatgagttctggtctgaacgaagatttcctcgattgtatcgtgcgtttagaggagacacatgttcaacaaggcttcgatgagggttacgaagaaggtcttgtgtccggtcgtgaagacgctcgtcatctgggtttgaaactcgggttcgagacaggcgagctgattggattctacagaggttgctctgctctttggaattcagctctccgtattgatcctacacgcttctctcctcagctccataagcatctcaatgatttccatgtcttgctcgataaaatcccgcttttggatcccgaggacgaagctaaagacgggatcaaggatgatctcagagtcaaattcagcatcatttgtgcatctctcggcttttccaagaaacaatttgagtataaaggatacccgaatccttcctccaatctcgacttttaagacctccctccatcaaaacactcttgtattgtatgtatggctttcaaagtttctctcgtttcctcaaagtttgtatttttaagagaagtgtgtgtgtagacaatctatgttttattggcttgtccttttttctggacatgtgaatgctgaccacaagtctaaatctggtggataacttcttttttagccttataatgaacaaacaaactcacatctgtagatatatatttgtataggtggtcggaggagatgttgagagaaatgcttggttgttgcaaggtttacatatctgaagcgcggaataagacggccctcgaagccattgagagagctttaaagccttttccaccagctgcaattgtcaacaagtttgaagatgcggcttatggcagggttggttacactgttgtatcctcgcttgctaacgggtcgtcttcttccttgaagaatgcggtgtttgctatggttaagactgctctcgacactatcaatcttgagttgcactgtggatctcatccccgccttggagtggttgaccacatatgctttcaccccttatctcaaacctctatagaacaagtttcttccgtcgccaattcccttgcaatggatatcggctccattcttcgagttcctacatatctctatggagcagcagaaaaggagcagtgcaccctggattcgatcagaagaaagctggggtacttcaaggcaaacagggagggacatgaatgggcaggtgggtttgacctggagatggtgccactgaagccagacgcagggccacaagaggtgagcaaagccaaaggggttgtagcggttggggcgtgtgggtgggtaagtaactataacgtgcctgtcatgtcaaacgatctcaaggcagtgaggagaatagcgaggaagacgagcgagagaggagggggcttggcttcagtgcagacaatggcgctggtgcacggggaaggagtcatagaggttgcctgtaacttgttgaatccaagccaagtggggggagatgaagtacagggactgatcgagaggcttggcagagaggaaggtctgcttgtgggaaaagggtattatacggactatacacctgaccagatcgttgaaagatatatggacttgctcaacaattcataaatttcaaagtaaaaaaagtaaaaacagtatgatgttgtcattcttagaacgtattattaccgacatcgatcatttatcttcattttgtgtttagatgtgatatacattgccatgagtgacaattgaaattagcaaagattaaataaaaagtgaaatg

SEQ ID NO: 102361 - protein, 297 aa, Arabidopsis thaliana; identical to SEQ ID NO: 20322
  peptide (1)..(297): Ceres Seq. ID no. 13610047
  misc_feature (199)..(249): Pfam Name: Formiminotransferase domain Pfam Description: Formiminotransferase domain
  misc_feature (1)..(297): Homolog of NCBI NO: 25411995 NR Description: hypothetical protein At2g20830 [imported] -
  misc_feature (1)..(297): Homolog of NCBI NO: 18399493 NR Description: expressed protein [Arabidopsis thaliana] unknown protein [Arabidopsis thaliana] unknown protein [Arabidopsis thaliana]
  misc_feature (5)..(290): Homolog of NCBI NO: 5734618 NR Description: Similar to Arabidopsis thaliana chromosome II BAC
  misc_feature (5)..(290): Homolog of NCBI NO: 34898040 NR Description: OSJNBa0038F22.18 [Oryza sativa (japonica
  misc_feature (142)..(297): Homolog of NCBI NO: 34897974 NR Description: hypothetical protein~similar to Oryza sativa
  misc_feature (5)..(55): Homolog of NCBI NO: 34897974 NR Description: hypothetical protein~similar to Oryza sativa
  misc_feature (14)..(249): Homolog of NCBI NO: 15643606 NR Description: formiminotransferase-
  misc_feature (9)..(249): Homolog of NCBI NO: 28211902 NR Description: glutamate formiminotransferase [Clostridium E88] >gi|28204345|gb|AAO36783.1| glutamate formiminotransferase
  misc_feature (9)..(247): Homolog of NCBI NO: 20806959 NR Description: Glutamate formiminotransferase tengcongensis] >gi|20515438|gb|AAM23734.1| Glutamate
  misc_feature (9)..(249): Homolog of NCBI NO: 13540922 NR Description: Glutamate formiminotransferase [Thermoplasma >gi|14324304|dbj|BAB59232.1| hypothetical protein [Thermoplasma

SEQ ID NO: 102362 - protein, 293 aa, Arabidopsis thaliana; identical to SEQ ID NO: 20323
  peptide (1)..(293): Ceres Seq. ID no. 13610048
  misc_feature (195)..(245): Pfam Name: Formiminotransferase domain Pfam Description: Formiminotransferase domain
  misc_feature (1)..(293): Homolog of NCBI NO: 25411995 NR Description: hypothetical protein At2g20830 [imported] -
  misc_feature (1)..(293): Homolog of NCBI NO: 18399493 NR Description: expressed protein [Arabidopsis thaliana] unknown protein [Arabidopsis thaliana] unknown protein [Arabidopsis thaliana]
  misc_feature (1)..(286): Homolog of NCBI NO: 5734618 NR Description: Similar to Arabidopsis thaliana chromosome II BAC
  misc_feature (1)..(286): Homolog of NCBI NO: 34898040 NR Description: OSJNBa0038F22.18 [Oryza sativa (japonica
  misc_feature (138)..(293): Homolog of NCBI NO: 34897974 NR Description: hypothetical protein~similar to Oryza sativa
  misc_feature (1)..(51): Homolog of NCBI NO: 34897974 NR Description: hypothetical protein~similar to Oryza sativa
  misc_feature (10)..(245): Homolog of NCBI NO: 15643606 NR Description: formiminotransferase-
  misc_feature (5)..(245): Homolog of NCBI NO: 28211902 NR Description: glutamate formiminotransferase [Clostridium E88] >gi|28204345|gb|AAO36783.1| glutamate formiminotransferase
  misc_feature (5)..(243): Homolog of NCBI NO: 20806959 NR Description: Glutamate formiminotransferase tengcongensis] >gi|20515438|gb|AAM23734.1| Glutamate
  misc_feature (5)..(245): Homolog of NCBI NO: 13540922 NR Description: Glutamate formiminotransferase [Thermoplasma >gi|14324304|dbj|BAB59232.1| hypothetical protein [Thermoplasma

SEQ ID NO: 102363 - protein, 226 aa, Arabidopsis thaliana; identical to SEQ ID NO: 20324
  peptide (1)..(226): Ceres Seq. ID no. 13610049
  misc_feature (128)..(178): Pfam Name: Formiminotransferase domain Pfam Description: Formiminotransferase domain
  misc_feature (1)..(226): Homolog of NCBI NO: 25411995 NR Description: hypothetical protein At2g20830 [imported] -
  misc_feature (1)..(226): Homolog of NCBI NO: 18399493 NR Description: expressed protein [Arabidopsis thaliana] unknown protein [Arabidopsis thaliana] unknown protein [Arabidopsis thaliana]
  misc_feature (1)..(219): Homolog of NCBI NO: 5734618 NR Description: Similar to Arabidopsis thaliana chromosome II BAC
  misc_feature (1)..(219): Homolog of NCBI NO: 34898040 NR Description: OSJNBa0038F22.18 [Oryza sativa (japonica
  misc_feature (71)..(226): Homolog of NCBI NO: 34897974 NR Description: hypothetical protein~similar to Oryza sativa
  misc_feature (1)..(178): Homolog of NCBI NO: 15643606 NR Description: formiminotransferase-
  misc_feature (1)..(178): Homolog of NCBI NO: 28211902 NR Description: glutamate formiminotransferase [Clostridium E88] >gi|28204345|gb|AAO36783.1| glutamate formiminotransferase
  misc_feature (1)..(176): Homolog of NCBI NO: 20806959 NR Description: Glutamate formiminotransferase tengcongensis] >gi|20515438|gb|AAM23734.1| Glutamate
  misc_feature (1)..(178): Homolog of NCBI NO: 13540922 NR Description: Glutamate formiminotransferase [Thermoplasma >gi|14324304|dbj|BAB59232.1| hypothetical protein [Thermoplasma
  misc_feature (1)..(176): Homolog of NCBI NO: 34540165 NR Description: formiminotransferase-cyclodeaminase-related

SEQ ID NO: 102364 - DNA, 1249 bp, Arabidopsis thaliana
  misc_feature (1)..(1249): Ceres Seq. ID no. 13610058
  misc_feature: MA Experiment ID: 108461 Result: Up-regulated in Transcription
  misc_feature: MA Experiment 108461 PARAMETER Experiment Name: At_Germinating_Seeds_cDNA_P Parameter: Age (day) Value: 1 vs. 0
  misc_feature: MA Experiment 108461 PARAMETER Experiment Name: At_Germinating_Seeds_cDNA_P Parameter: Tissue Value: Germinating Seeds
  misc_feature: MA Experiment ID: 108462 Result: Up-regulated in Transcription
  misc_feature: MA Experiment 108462 PARAMETER Experiment Name: At_Germinating_Seeds_cDNA_P Parameter: Age (day) Value: 2 vs. 0
  misc_feature: MA Experiment 108462 PARAMETER Experiment Name: At_Germinating_Seeds_cDNA_P Parameter: Tissue Value: Germinating Seeds
  misc_feature: MA Experiment ID: 108463 Result: Up-regulated in Transcription
  misc_feature: MA Experiment 108463 PARAMETER Experiment Name: At_Germinating_Seeds_cDNA_P Parameter: Age (day) Value: 3 vs. 0
  misc_feature: MA Experiment 108463 PARAMETER Experiment Name: At_Germinating_Seeds_cDNA_P Parameter: Tissue Value: Germinating Seeds
  misc_feature: MA Experiment ID: 108464 Result: Up-regulated in Transcription
  misc_feature: MA Experiment 108464 PARAMETER Experiment Name: At_Germinating_Seeds_cDNA_P Parameter: Age (day) Value: 4 vs. 0
  misc_feature: MA Experiment 108464 PARAMETER Experiment Name: At_Germinating_Seeds_cDNA_P Parameter: Tissue Value: Germinating Seeds
  misc_feature: MA Experiment ID: 108585 Result: Down-regulated in Transcription
  misc_feature: MA Experiment 108585 PARAMETER Experiment Name: At_5mM_NaNP_cDNA_P Parameter: Timepoint (hr) Value: 6
  misc_feature: MA Experiment 108585 PARAMETER Experiment Name: At_5mM_NaNP_cDNA_P Parameter: Tissue Value: Aerial
  misc_feature: MA Experiment 108585 PARAMETER Experiment Name: At_5mM_NaNP_cDNA_P Parameter: Treatment Value: null
  misc_feature: MA Experiment ID: 108595 Result: Down-regulated in Transcription
  misc_feature: MA Experiment 108595 PARAMETER Experiment Name: At_Ler-pi_Ovule_cDNA_P Parameter: Plant Line Value: null
  misc_feature: MA Experiment ID: 20000069 Result: Down-regulated in Transcription
  misc_feature: MA Experiment 20000069 PARAMETER Experiment Name: At_100uM_ABA_Mutants_cDNA_P Parameter: Plant Line Value: CS23
  misc_feature: MA Experiment 20000069 PARAMETER Experiment Name: At_100uM_ABA_Mutants_cDNA_P Parameter: Timepoint (hr) Value: 6
  misc_feature: MA Experiment 20000069 PARAMETER Experiment Name: At_100uM_ABA_Mutants_cDNA_P Parameter: Tissue Value: Aerial
  misc_feature: MA Experiment 20000069 PARAMETER Experiment Name: At_100uM_ABA_Mutants_cDNA_P Parameter: Treatment Value: 100uM ABA vs. No Treatment
  misc_feature: MA Experiment ID: 20000070 Result: Down-regulated in Transcription
  misc_feature: MA Experiment 20000070 PARAMETER Experiment Name: At_100uM_ABA_Mutants_cDNA_P Parameter: Plant Line Value: CS24
  misc_feature: MA Experiment 20000070 PARAMETER Experiment Name: At_100uM_ABA_Mutants_cDNA_P Parameter: Timepoint (hr) Value: 6
  misc_feature: MA Experiment 20000070 PARAMETER Experiment Name: At_100uM_ABA_Mutants_cDNA_P Parameter: Tissue Value: Aerial
  misc_feature: MA Experiment 20000070 PARAMETER Experiment Name: At_100uM_ABA_Mutants_cDNA_P Parameter: Treatment Value: 100uM ABA vs. No Treatment
  misc_feature: MA Experiment ID: 20000071 Result: Down-regulated in Transcription
  misc_feature: MA Experiment 20000071 PARAMETER Experiment Name: At_100uM_ABA_Mutants_cDNA_P Parameter: Plant Line Value: CS8104
  misc_feature: MA Experiment 20000071 PARAMETER Experiment Name: At_100uM_ABA_Mutants_cDNA_P Parameter: Timepoint (hr) Value: 6
  misc_feature: MA Experiment 20000071 PARAMETER Experiment Name: At_100uM_ABA_Mutants_cDNA_P Parameter: Tissue Value: Aerial
  misc_feature: MA Experiment 20000071 PARAMETER Experiment Name: At_100uM_ABA_Mutants_cDNA_P Parameter: Treatment Value: 100uM ABA vs. No Treatment
  misc_feature: MA Experiment ID: 20000072 Result: Down-regulated in Transcription
  misc_feature: MA Experiment 20000072 PARAMETER Experiment Name: At_100uM_ABA_Mutants_cDNA_P Parameter: Plant Line Value: CS8105
  misc_feature: MA Experiment 20000072 PARAMETER Experiment Name: At_100uM_ABA_Mutants_cDNA_P Parameter: Timepoint (hr) Value: 6
  misc_feature: MA Experiment 20000072 PARAMETER Experiment Name: At_100uM_ABA_Mutants_cDNA_P Parameter: Tissue Value: Aerial
  misc_feature: MA Experiment 20000072 PARAMETER Experiment Name: At_100uM_ABA_Mutants_cDNA_P Parameter: Treatment Value: 100uM ABA vs. No Treatment
  misc_feature: MA Experiment ID: 20000086 Result: Down-regulated in Transcription
  misc_feature: MA Experiment 20000086 PARAMETER Experiment Name: At_100uM_ABA_Mutants_cDNA_P Parameter: Plant Line Value: CS22
  misc_feature: MA Experiment 20000086 PARAMETER Experiment Name: At_100uM_ABA_Mutants_cDNA_P Parameter: Timepoint (hr) Value: 6
  misc_feature: MA Experiment 20000086 PARAMETER Experiment Name: At_100uM_ABA_Mutants_cDNA_P Parameter: Tissue Value: Aerial
  misc_feature: MA Experiment 20000086 PARAMETER Experiment Name: At_100uM_ABA_Mutants_cDNA_P Parameter: Treatment Value: 100uM ABA vs. No Treatment
  misc_feature: MA Experiment ID: 20000087 Result: Down-regulated in Transcription
  misc_feature: MA Experiment 20000087 PARAMETER Experiment Name: At_100uM_ABA_Mutants_cDNA_P Parameter: Plant Line Value: WS
  misc_feature: MA Experiment 20000087 PARAMETER Experiment Name: At_100uM_ABA_Mutants_cDNA_P Parameter: Timepoint (hr) Value: 6
  misc_feature: MA Experiment 20000087 PARAMETER Experiment Name: At_100uM_ABA_Mutants_cDNA_P Parameter: Tissue Value: Aerial
  misc_feature: MA Experiment 20000087 PARAMETER Experiment Name: At_100uM_ABA_Mutants_cDNA_P Parameter: Treatment Value: 100uM ABA vs. No Treatment
  misc_feature: MA Experiment ID: 20000117 Result: Down-regulated in Transcription
  misc_feature: MA Experiment 20000117 PARAMETER Experiment Name: At_100uM_ABA_Mutants_cDNA_P Parameter: Plant Line Value: Columbia
  misc_feature: MA Experiment 20000117 PARAMETER Experiment Name: At_100uM_ABA_Mutants_cDNA_P Parameter: Timepoint (hr) Value: 6
  misc_feature: MA Experiment 20000117 PARAMETER Experiment Name: At_100uM_ABA_Mutants_cDNA_P Parameter: Tissue Value: Aerial
  misc_feature: MA Experiment 20000117 PARAMETER Experiment Name: At_100uM_ABA_Mutants_cDNA_P Parameter: Treatment Value: 100uM ABA vs. No Treatment
  misc_feature: MA Experiment ID: 20000179 Result: Up-regulated in Transcription
  misc_feature: MA Experiment 20000179 PARAMETER Experiment Name: At_Germinating_Seeds_P Parameter: Age (hr) Value: 6 vs. 0
  misc_feature: MA Experiment 20000179 PARAMETER Experiment Name: At_Germinating_Seeds_P Parameter: Tissue Value: Germinating Seeds
  misc_feature: MA Experiment ID: 20000180 Result: Up-regulated in Transcription
  misc_feature: MA Experiment 20000180 PARAMETER Experiment Name: At_Germinating_Seeds_P Parameter: Age (hr) Value: 24 vs. 0
  misc_feature: MA Experiment 20000180 PARAMETER Experiment Name: At_Germinating_Seeds_P Parameter: Tissue Value: Germinating Seeds
  misc_feature: MA Experiment ID: 20000184 Result: Up-regulated in Transcription
  misc_feature: MA Experiment 20000184 PARAMETER Experiment Name: At_Shoots__P Parameter: Age (day) Value: 7
  misc_feature: MA Experiment 20000184 PARAMETER Experiment Name: At_Shoots__P Parameter: Tissue Value: Shoots vs. Whole Plant
  misc_feature: MA Experiment ID: 20000185 Result: Down-regulated in Transcription
  misc_feature: MA Experiment 20000185 PARAMETER Experiment Name: At_Roots__P Parameter: Age (day) Value: 7 vs. 21
  misc_feature: MA Experiment 20000185 PARAMETER Experiment Name: At_Roots__P Parameter: Organism Value: A. thaliana
  misc_feature: MA Experiment 20000185 PARAMETER Experiment Name: At_Roots__P Parameter: Tissue Value: Roots vs. Whole Plant
  misc_feature: MA Experiment ID: 20000227 Result: Down-regulated in Transcription
  misc_feature: MA Experiment 20000227 PARAMETER Experiment Name: At_Root-Tips-vs-Tops_P Parameter: Tissue Value: Root Tips vs. Root Tops
  misc_feature: MA Experiment ID: 20000235 Result: Up-regulated in Transcription
  misc_feature: MA Experiment 20000235 PARAMETER Experiment Name: At_Siliques_P Parameter: Age (day) Value: 21
  misc_feature: MA Experiment 20000235 PARAMETER Experiment Name: At_Siliques_P Parameter: Organism Value: A. thaliana
  misc_feature: MA Experiment 20000235 PARAMETER Experiment Name: At_Siliques_P Parameter: Plant Line Value: WS
  misc_feature: MA Experiment 20000235 PARAMETER Experiment Name: At_Siliques_P Parameter: Tissue Value: 5-10mm Siliques vs. Whole Plant
  misc_feature: MA Experiment ID: 20000439 Result: Down-regulated in Transcription
  misc_feature: MA Experiment 20000439 PARAMETER Experiment Name: At_Roots__P Parameter: Age (day) Value: 14 vs. 21
  misc_feature: MA Experiment 20000439 PARAMETER Experiment Name: At_Roots__P Parameter: Organism Value: A. thaliana
  misc_feature: MA Experiment 20000439 PARAMETER Experiment Name: At_Roots__P Parameter: Tissue Value: Roots vs. Whole Plant
  misc_feature: MA Experiment ID: 20001248 Result: Down-regulated in Transcription
  misc_feature: MA Experiment 20001248 PARAMETER Experiment Name: At_Far-red-induction_P Parameter: Age (day) Value: 7
  misc_feature: MA Experiment 20001248 PARAMETER Experiment Name: At_Far-red-induction_P Parameter: Light Value: Far-red vs. White
  misc_feature: MA Experiment 20001248 PARAMETER Experiment Name: At_Far-red-induction_P Parameter: Organism Value: A. thaliana
  misc_feature: MA Experiment 20001248 PARAMETER Experiment Name: At_Far-red-induction_P Parameter: Plant Line Value: Columbia
  misc_feature: MA Experiment 20001248 PARAMETER Experiment Name: At_Far-red-induction_P Parameter: Timepoint (hr) Value: 4
  misc_feature: MA Experiment 20001248 PARAMETER Experiment Name: At_Far-red-induction_P Parameter: Tissue Value: Whole Plant
  misc_feature: MA Experiment ID: 20001450 Result: Down-regulated in Transcription
  misc_feature: MA Experiment 20001450 PARAMETER Experiment Name: At_Far-red-induction_P Parameter: Age (day) Value: 7
  misc_feature: MA Experiment 20001450 PARAMETER Experiment Name: At_Far-red-induction_P Parameter: Light Value: Far-red vs. White
  misc_feature: MA Experiment 20001450 PARAMETER Experiment Name: At_Far-red-induction_P Parameter: Organism Value: A. thaliana
  misc_feature: MA Experiment 20001450 PARAMETER Experiment Name: At_Far-red-induction_P Parameter: Plant Line Value: Columbia
  misc_feature: MA Experiment 20001450 PARAMETER Experiment Name: At_Far-red-induction_P Parameter: Timepoint (hr) Value: 8
  misc_feature: MA Experiment 20001450 PARAMETER Experiment Name: At_Far-red-induction_P Parameter: Tissue Value: Whole Plant
  misc_feature: MA Experiment ID: 20001451 Result: Down-regulated in Transcription
  misc_feature: MA Experiment 20001451 PARAMETER Experiment Name: At_Far-red-induction_P Parameter: Age (day) Value: 7
  misc_feature: MA Experiment 20001451 PARAMETER Experiment Name: At_Far-red-induction_P Parameter: Light Value: Far-red vs. White
  misc_feature: MA Experiment 20001451 PARAMETER Experiment Name: At_Far-red-induction_P Parameter: Organism Value: A. thaliana
  misc_feature: MA Experiment 20001451 PARAMETER Experiment Name: At_Far-red-induction_P Parameter: Plant Line Value: Columbia
  misc_feature: MA Experiment 20001451 PARAMETER Experiment Name: At_Far-red-induction_P Parameter: Timepoint (hr) Value: 24
  misc_feature: MA Experiment 20001451 PARAMETER Experiment Name: At_Far-red-induction_P Parameter: Tissue Value: Whole Plant
atcagtttcagcgaaacgatggagcttctctgctcaccaacgtctctttcctcctccttcgctctctcttctgctcttttagtccctcgttcgttctccatgccagggacaaggagattcatggttctgtgtagttcccagaaggaaagtcagatgacagtgtcagtaactggagcaactggattcatagggagacgattggttcagagacttcgtgctgataaccacgctatccgggtcttaacacgctctaaatccaaagctgagcaaatatttcctgccaaggacttcccaggtattgtgattgcagaagaatcggagtggaagaactgtgtacaaggctctactgctgttgtgaacttggcaggactgcctattagtacaaggtggtctcccgagatcaagaaagagattaagggcagccggatccgtgtcacctccaaagttgttgacttaatcaataattcaccagcagaagctaggcctaccgttctagttagcgccacggctgttggttactatggtactagtgagacaggagtattcgacgaaaatagtccatcagggaaggactatcttgcagaggtttgcagagaatgggaaggaactgcattgaaagcaaataaggatgttagagtggcacttatccgcattggtgttgttcttggcaaagacggtggagctttggccatgatgataccctttttccaaatgtttgctggaggacctctgggttccggacaacaatggttctcttggattcacgtggatgacttggtgaacttaatttacgaggccctcactaatccatcttataaaggagttattaatgggactgcgccgaatccggttaggcttggggaaatgtgccagcagctaggcagtgttcttagccgaccatcgtggctaccagttcctgactttgcactcaaagctttgctcggagaaggtgccactgtagttctggagggacagaaggtattacctgtaagagccaaagagcttggttttgaattcaagtataaatacgtgaaggatgcactcagagccattatgcaataaggtgacacacataagcatctttgtaaaattggttttgatcacagaaaatccccagaaaaacaagatattcttttcttttcgtctctatatctttctttttgagtaaaactcgagaaatgtatttatggtaaaaagtgttttcggtgttatctcagaaaccagagatcacagatgtgttgaggatatt

SEQ ID NO: 102365 - protein, 353 aa, Arabidopsis thaliana; identical to SEQ ID NO: 40611
  peptide (1)..(353): Ceres Seq. ID no. 13610059
  misc_feature (54)..(297): Pfam Name: NAD dependent epimerase/dehydratase family Pfam Description: NAD dependent epimerase/dehydratase family
  misc_feature (7)..(353): Homolog of NCBI NO: 18399648 NR Description: expressed protein [Arabidopsis thaliana] At2g21280 [Arabidopsis thaliana] unknown protein [Arabidopsis thaliana]
  misc_feature (73)..(353): Homolog of NCBI NO: 25326146 NR Description: hypothetical protein At2g21280 [imported] -
  misc_feature (52)..(352): Homolog of NCBI NO: 23130096 NR Description: hypothetical protein [Nostoc punctiforme]
  misc_feature (52)..(353): Homolog of NCBI NO: 17229882 NR Description: cell division inhibitor [Nostoc sp. PCC 7120]
  misc_feature (52)..(352): Homolog of NCBI NO: 23043197 NR Description: hypothetical protein [Trichodesmium erythraeum
  misc_feature (52)..(352): Homolog of NCBI NO: 25019701 NR Description: unknown [Synechococcus sp. PCC 7942]
  misc_feature (48)..(352): Homolog of NCBI NO: 16330099 NR Description: cell division inhibitor [Synechocystis sp. PCC
  misc_feature (52)..(352): Homolog of NCBI NO: 7388457 NR Description: Hypothetical protein slr1223
  misc_feature (52)..(353): Homolog of NCBI NO: 22298008 NR Description: ORF_ID:tll0465~putative sugar nucleotide epimerase
  misc_feature (52)..(351): Homolog of NCBI NO: 33239592 NR Description: Predicted nucleoside-diphosphate sugar epimerase

SEQ ID NO: 102366 - protein, 347 aa, Arabidopsis thaliana; identical to SEQ ID NO: 40612
  peptide (1)..(347): Ceres Seq. ID no. 13610060
  misc_feature (48)..(291): Pfam Name: NAD dependent epimerase/dehydratase family Pfam Description: NAD dependent epimerase/dehydratase family
  misc_feature (1)..(347): Homolog of NCBI NO: 18399648 NR Description: expressed protein [Arabidopsis thaliana] At2g21280 [Arabidopsis thaliana] unknown protein [Arabidopsis thaliana]
  misc_feature (67)..(347): Homolog of NCBI NO: 25326146 NR Description: hypothetical protein At2g21280 [imported] -
  misc_feature (46)..(346): Homolog of NCBI NO: 23130096 NR Description: hypothetical protein [Nostoc punctiforme]
  misc_feature (46)..(347): Homolog of NCBI NO: 17229882 NR Description: cell division inhibitor [Nostoc sp. PCC 7120]
  misc_feature (46)..(346): Homolog of NCBI NO: 23043197 NR Description: hypothetical protein [Trichodesmium erythraeum
  misc_feature (46)..(346): Homolog of NCBI NO: 25019701 NR Description: unknown [Synechococcus sp. PCC 7942]
  misc_feature (42)..(346): Homolog of NCBI NO: 16330099 NR Description: cell division inhibitor [Synechocystis sp. PCC
  misc_feature (46)..(346): Homolog of NCBI NO: 7388457 NR Description: Hypothetical protein slr1223
  misc_feature (46)..(347): Homolog of NCBI NO: 22298008 NR Description: ORF_ID:tll0465~putative sugar nucleotide epimerase
  misc_feature (46)..(345): Homolog of NCBI NO: 33239592 NR Description: Predicted nucleoside-diphosphate sugar epimerase

SEQ ID NO: 102367 - protein, 320 aa, Arabidopsis thaliana; identical to SEQ ID NO: 40613
  peptide (1)..(320): Ceres Seq. ID no. 13610061
  misc_feature (21)..(264): Pfam Name: NAD dependent epimerase/dehydratase family Pfam Description: NAD dependent epimerase/dehydratase family
  misc_feature (1)..(320): Homolog of NCBI NO: 18399648 NR Description: expressed protein [Arabidopsis thaliana] At2g21280 [Arabidopsis thaliana] unknown protein [Arabidopsis thaliana]
  misc_feature (40)..(320): Homolog of NCBI NO: 25326146 NR Description: hypothetical protein At2g21280 [imported] -
  misc_feature (19)..(319): Homolog of NCBI NO: 23130096 NR Description: hypothetical protein [Nostoc punctiforme]
  misc_feature (19)..(320): Homolog of NCBI NO: 17229882 NR Description: cell division inhibitor [Nostoc sp. PCC 7120]
  misc_feature (19)..(319): Homolog of NCBI NO: 23043197 NR Description: hypothetical protein [Trichodesmium erythraeum
  misc_feature (19)..(319): Homolog of NCBI NO: 25019701 NR Description: unknown [Synechococcus sp. PCC 7942]
  misc_feature (15)..(319): Homolog of NCBI NO: 16330099 NR Description: cell division inhibitor [Synechocystis sp. PCC
  misc_feature (19)..(319): Homolog of NCBI NO: 7388457 NR Description: Hypothetical protein slr1223
  misc_feature (19)..(320): Homolog of NCBI NO: 22298008 NR Description: ORF_ID:tll0465~putative sugar nucleotide epimerase
  misc_feature (19)..(318): Homolog of NCBI NO: 33239592 NR Description: Predicted nucleoside-diphosphate sugar epimerase

SEQ ID NO: 102368 - DNA, 1056 bp, Arabidopsis thaliana
  misc_feature (1)..(1056): Ceres Seq. ID no. 13610077
  misc_feature: MA Experiment ID: 20000173 Result: Up-regulated in Transcription
  misc_feature: MA Experiment 20000173 PARAMETER Experiment Name: At_42deg_Heat_P Parameter: Age (day) Value: 14
  misc_feature: MA Experiment 20000173 PARAMETER Experiment Name: At_42deg_Heat_P Parameter: Organism Value: A. thaliana
  misc_feature: MA Experiment 20000173 PARAMETER Experiment Name: At_42deg_Heat_P Parameter: Plant Line Value: WS
  misc_feature: MA Experiment 20000173 PARAMETER Experiment Name: At_42deg_Heat_P Parameter: Temperature (deg C) Value: 42 vs. 22
  misc_feature: MA Experiment 20000173 PARAMETER Experiment Name: At_42deg_Heat_P Parameter: Timepoint (hr) Value: 6
  misc_feature: MA Experiment 20000173 PARAMETER Experiment Name: At_42deg_Heat_P Parameter: Tissue Value: Aerial
  misc_feature: MA Experiment ID: 20000453 Result: Up-regulated in Transcription
  misc_feature: MA Experiment 20000453 PARAMETER Experiment Name: At_100uM_ABA_P Parameter: Age (day) Value: 15
  misc_feature: MA Experiment 20000453 PARAMETER Experiment Name: At_100uM_ABA_P Parameter: Organism Value: A. thaliana
  misc_feature: MA Experiment 20000453 PARAMETER Experiment Name: At_100uM_ABA_P Parameter: Plant Line Value: WS
  misc_feature: MA Experiment 20000453 PARAMETER Experiment Name: At_100uM_ABA_P Parameter: Timepoint (hr) Value: 24
  misc_feature: MA Experiment 20000453 PARAMETER Experiment Name: At_100uM_ABA_P Parameter: Tissue Value: Aerial
  misc_feature: MA Experiment 20000453 PARAMETER Experiment Name: At_100uM_ABA_P Parameter: Treatment Value: 100uM ABA vs. No Treatment
  misc_feature: MA Experiment ID: 20001451 Result: Down-regulated in Transcription
  misc_feature: MA Experiment 20001451 PARAMETER Experiment Name: At_Far-red-induction_P Parameter: Age (day) Value: 7
  misc_feature: MA Experiment 20001451 PARAMETER Experiment Name: At_Far-red-induction_P Parameter: Light Value: Far-red vs. White
  misc_feature: MA Experiment 20001451 PARAMETER Experiment Name: At_Far-red-induction_P Parameter: Organism Value: A. thaliana
  misc_feature: MA Experiment 20001451 PARAMETER Experiment Name: At_Far-red-induction_P Parameter: Plant Line Value: Columbia
  misc_feature: MA Experiment 20001451 PARAMETER Experiment Name: At_Far-red-induction_P Parameter: Timepoint (hr) Value: 24
  misc_feature: MA Experiment 20001451 PARAMETER Experiment Name: At_Far-red-induction_P Parameter: Tissue Value: Whole Plant
  misc_feature: MA Experiment ID: 20001560 Result: Up-regulated in Transcription
  misc_feature: MA Experiment 20001560 PARAMETER Experiment Name: At_Drought_Soil_Dry_P Parameter: Age (day) Value: 28
  misc_feature: MA Experiment 20001560 PARAMETER Experiment Name: At_Drought_Soil_Dry_P Parameter: Organism Value: A. thaliana
  misc_feature: MA Experiment 20001560 PARAMETER Experiment Name: At_Drought_Soil_Dry_P Parameter: Plant Line Value: WS
  misc_feature: MA Experiment 20001560 PARAMETER Experiment Name: At_Drought_Soil_Dry_P Parameter: Post Timepoint (hr) Value: None
  misc_feature: MA Experiment 20001560 PARAMETER Experiment Name: At_Drought_Soil_Dry_P Parameter: Post-Treatment Value: None
  misc_feature: MA Experiment 20001560 PARAMETER Experiment Name: At_Drought_Soil_Dry_P Parameter: Timepoint (day) Value: 14
  misc_feature: MA Experiment 20001560 PARAMETER Experiment Name: At_Drought_Soil_Dry_P Parameter: Treatment Value: Drought vs. No Drought
  misc_feature: MA Experiment ID: 20001911 Result: Up-regulated in Transcription
  misc_feature: MA Experiment 20001911 PARAMETER Experiment Name: At_Drought_Reproduction_P Parameter: Age (day) Value: 40
  misc_feature: MA Experiment 20001911 PARAMETER Experiment Name: At_Drought_Reproduction_P Parameter: Organism Value: A. thaliana
  misc_feature: MA Experiment 20001911 PARAMETER Experiment Name: At_Drought_Reproduction_P Parameter: Plant Line Value: WS
  misc_feature: MA Experiment 20001911 PARAMETER Experiment Name: At_Drought_Reproduction_P Parameter: Timepoint (day) Value: 10
  misc_feature: MA Experiment 20001911 PARAMETER Experiment Name: At_Drought_Reproduction_P Parameter: Tissue Value: Flowers
  misc_feature: MA Experiment 20001911 PARAMETER Experiment Name: At_Drought_Reproduction_P Parameter: Treatment Value: Drought vs. No Drought
atggctgcagcgtcatcagtttcttctccaccgctttgcctcgccggtcgagtagctatagtcacaggatcttctcgaggaataggtcgtgccatagccatccaccttgccgagcttggggctagggtcgtcgttaattactcaactagccccgttgaggctgagaaggttgccacggcgattaccaccaactgttcaaaggacgcggaagtcgccggcaaaagtccacgtgtcattgtggtgaaggctgatatctcagagccgagccaggtaaagtcgcttttcgatgaggcagagcgagtcttcgagtcgccggttcatatcttggttaactcagcggctatagccgatcctaatcattccactatctcagacatgtcagtagaactttttgatcgcattatcagtgtgaacacaagaggtgcgtttatttgtgctagagaagctgcgaataggctaaaacgtggaggcggtggccggataattctcctctcaacatcactggttcaaaccttaaatacaaactatggctcatacacggcttcaaaggcagccgtagaagccatggccaagattcttgcaaaagagctcaaaggaacagagatcacagttaactgtgtttctccgggtcccgtcgccacagaaatgttttacacaggattgagcaatgagattgttgagaaagttaagtcacagaacttatttggtaggatcggtgagaccaaagacatcgcacctgttgttgggttcttagccagtgatgctggcgaatggatcaacggtcaagtcatcatggctaatggtggctgtctcttgtaaagaaagagagtggttattagtcttcttataaaatcaaaagctttcaaatttcaaacgttggatttgatctgatgaaaagaaacatcaataatccatgtatcaataaccagtcaaatacaacctcaagctctgctttatgtgctctgttctcggagataagaattagggtttgtgtactcttcttatcataacgttacaacatccctatacgtttaattatctattacgttattttgt

SEQ ID NO: 102369 - protein, 272 aa, Arabidopsis thaliana
  peptide (1)..(272): Ceres Seq. ID no. 13610078
  misc_feature (1)..(272): Homolog of NCBI NO: 30679011 NR Description: short-chain type dehydrogenase/reductase -related
  misc_feature (28)..(272): Homolog of NCBI NO: 21954081 NR Description: putative short-chain type dehydrogenase/reductase
  misc_feature (1)..(269): Homolog of NCBI NO: 15229203 NR Description: short-chain dehydrogenase/reductase family protein
  misc_feature (4)..(271): Homolog of NCBI NO: 9758903 NR Description: Brn1-like protein [Arabidopsis thaliana]
  misc_feature (4)..(256): Homolog of NCBI NO: 30686710 NR Description: short-chain dehydrogenase/reductase family
  misc_feature (8)..(269): Homolog of NCBI NO: 15235621 NR Description: short-chain dehydrogenase/reductase family protein
  misc_feature (11)..(269): Homolog of NCBI NO: 1711355 NR Description: SHORT-CHAIN TYPE DEHYDROGENASE/REDUCTASE
  misc_feature (2)..(269): Homolog of NCBI NO: 34393370 NR Description: putative short-chain dehydrogenase/reductase
  misc_feature (2)..(269): Homolog of NCBI NO: 34395018 NR Description: putative short-chain dehydrogenase/reductase
  misc_feature (2)..(269): Homolog of NCBI NO: 34395019 NR Description: putative short-chain dehydrogenase/reductase
MAAASSVSSPPLCLAGRVAIVTGSSRGIGRAIAIHLAELGARVVVNYSTSPVEAEKVATAITTNCSKDAEVAGKSPRVIVVKADISEPSQVKSLFDEAERVFESPVHILVNSAAIADPNHSTISDMSVELFDRIISVNTRGAFICAREAANRLKRGGGGRIILLSTSLVQTLNTNYGSYTASKAAVEAMAKILAKELKGTEITVNCVSPGPVATEMFYTGLSNEIVEKVKSQNLFGRIGETKDIAPVVGFLASDAGEWINGQVIMANGGCLL

SEQ ID NO: 102370 - protein, 147 aa, Arabidopsis thaliana
  peptide (1)..(147): Ceres Seq. ID no. 13610079
  misc_feature (1)..(147): Homolog of NCBI NO: 30679011 NR Description: short-chain type dehydrogenase/reductase -related
  misc_feature (1)..(147): Homolog of NCBI NO: 21954081 NR Description: putative short-chain type dehydrogenase/reductase
  misc_feature (1)..(144): Homolog of NCBI NO: 15229203 NR Description: short-chain dehydrogenase/reductase family protein
  misc_feature (1)..(146): Homolog of NCBI NO: 9758903 NR Description: Brn1-like protein [Arabidopsis thaliana]
  misc_feature (1)..(131): Homolog of NCBI NO: 30686710 NR Description: short-chain dehydrogenase/reductase family
  misc_feature (1)..(144): Homolog of NCBI NO: 15235621 NR Description: short-chain dehydrogenase/reductase family protein
  misc_feature (1)..(144): Homolog of NCBI NO: 1711355 NR Description: SHORT-CHAIN TYPE DEHYDROGENASE/REDUCTASE
  misc_feature (1)..(144): Homolog of NCBI NO: 34393370 NR Description: putative short-chain dehydrogenase/reductase
  misc_feature (1)..(144): Homolog of NCBI NO: 34395018 NR Description: putative short-chain dehydrogenase/reductase
  misc_feature (1)..(144): Homolog of NCBI NO: 34395019 NR Description: putative short-chain dehydrogenase/reductase
MSVELFDRIISVNTRGAFICAREAANRLKRGGGGRIILLSTSLVQTLNTNYGSYTASKAAVEAMAKILAKELKGTEITVNCVSPGPVATEMFYTGLSNEIVEKVKSQNLFGRIGETKDIAPVVGFLASDAGEWINGQVIMANGGCLL

SEQ ID NO: 102371 - DNA, 1306 bp, Arabidopsis thaliana
  misc_feature (1)..(1306): Ceres Seq. ID no. 13610084
  misc_feature: MA Experiment ID: 20000234 Result: Up-regulated in Transcription
  misc_feature: MA Experiment 20000234 PARAMETER Experiment Name: At_Siliques_P Parameter: Age (day) Value: 21
  misc_feature: MA Experiment 20000234 PARAMETER Experiment Name: At_Siliques_P Parameter: Organism Value: A. thaliana
  misc_feature: MA Experiment 20000234 PARAMETER Experiment Name: At_Siliques_P Parameter: Plant Line Value: WS
  misc_feature: MA Experiment 20000234 PARAMETER Experiment Name: At_Siliques_P Parameter: Tissue Value: Less Than 5mm Siliques vs. Whole Plant
  misc_feature: MA Experiment ID: 20000265 Result: Up-regulated in Transcription
  misc_feature: MA Experiment 20000265 PARAMETER Experiment Name: At_Open_Flower_P Parameter: Age (day) Value: 21
  misc_feature: MA Experiment 20000265 PARAMETER Experiment Name: At_Open_Flower_P Parameter: Plant Line Value: WS
  misc_feature: MA Experiment 20000265 PARAMETER Experiment Name: At_Open_Flower_P Parameter: Tissue Value: Closed Flower vs. Whole Plant
  misc_feature: MA Experiment ID: 20000286 Result: Up-regulated in Transcription
  misc_feature: MA Experiment 20000286 PARAMETER Experiment Name: At_Open_Flower_P Parameter: Age (day) Value: 21
  misc_feature: MA Experiment 20000286 PARAMETER Experiment Name: At_Open_Flower_P Parameter: Plant Line Value: WS
  misc_feature: MA Experiment 20000286 PARAMETER Experiment Name: At_Open_Flower_P Parameter: Tissue Value: Half Open vs. Whole Plant
  misc_feature: MA Experiment ID: 20000794 Result: Up-regulated in Transcription
  misc_feature: MA Experiment 20000794 PARAMETER Experiment Name: At_Petals_P Parameter: Age (day) Value: 23-25 days
  misc_feature: MA Experiment 20000794 PARAMETER Experiment Name: At_Petals_P Parameter: Plant Line Value: WS
  misc_feature: MA Experiment 20000794 PARAMETER Experiment Name: At_Petals_P Parameter: Tissue Value: Petals vs. Whole plant
  misc_feature: MA Experiment ID: 20001910 Result: Up-regulated in Transcription
  misc_feature: MA Experiment 20001910 PARAMETER Experiment Name: At_Drought_Reproduction_P Parameter: Age (day) Value: 37
  misc_feature: MA Experiment 20001910 PARAMETER Experiment Name: At_Drought_Reproduction_P Parameter: Organism Value: A. thaliana
  misc_feature: MA Experiment 20001910 PARAMETER Experiment Name: At_Drought_Reproduction_P Parameter: Plant Line Value: WS
  misc_feature: MA Experiment 20001910 PARAMETER Experiment Name: At_Drought_Reproduction_P Parameter: Timepoint (day) Value: 7
  misc_feature: MA Experiment 20001910 PARAMETER Experiment Name: At_Drought_Reproduction_P Parameter: Tissue Value: Flowers
  misc_feature: MA Experiment 20001910 PARAMETER Experiment Name: At_Drought_Reproduction_P Parameter: Treatment Value: Drought vs. No Drought
aactgatcgtataatcattctcacggagacgagtgaccaaaacaaggtctcccgcttcttgcgaagattaaacgaatccatttagattttaaaaaccacacaaaaaaaatatgggtcggctcaagttcgcatgtccggttcttgagatcaatttaatctcagctcaagacttagcccctgtctcaagaaacatgaaaacgtattccgtcgcttggatcaacaccgatcctatgagaaaactcaccacgcgtgttgatcaatccaacagagctaaccctatatggaacgagaagtttgtgtttcgtgtcaacgacaagattctctacgttgacgcatcagcgattgtgattgagatctacgcagcggcttgggctaaagatgctcttgttggtactgtgaatgttcttctcagcgatctttttgctccttggtctggttttggtgatggtaacgacggtggtggtgggaataacaacatgaggcttgtgactcttcagattcgtcgtccttcagggaggctacaagggtttttacgtctcggtgttgcacttcttgacggtggtcaacggagtatgcctttatctattgaggttttcgatggaagtcgaaaaggagagaggaatagtgttaaaagagaccaagaggcttcaagaatgatgcatcgccgtacgaatagcgatcaaacggatttaaccacgtctacgaatgattacggtgtgaaaacaggggttgttactggcaatggaggagaggtggtggtggtggcggtattgttgttggtgcggatagtatggttaatggttcgctttgtagctctgatattggaccatcagcgtctgtggttgcggctgcgattgcgcaagggctttacaatagacagaaaacagcggttaaagcggctaacaaagaggacgcaagttcgatacttgaagggaaaacagagggaattgagcatagagttgaacggtggagagcagagaaaaatggcacgggtggagcgggtggagcggctggatcaagcgatgattctagcgggaaaggaggagcgggaaggagaagaaggaggaggagaagaaaggagaaacaacaagggaggagaaacggtggaggagagggtaagaaagggttgttttcatgttttggaaacgtgtttggatgtgagatttcgataacatgtggcggtggaagcggcggagaaggagacagcacaaagaagagatataataacaataaagtagtaaatcttagtgctgtagacgaaacgtttagtcattctgcgacttgagataagagaaaatgtttactt

SEQ ID NO: 102372 - protein, 353 aa, Arabidopsis thaliana
  peptide (1)..(353): Ceres Seq. ID no. 13610085
  misc_feature (11)..(97): Pfam Name: C2 domain Pfam Description: C2 domain
  misc_feature (1)..(213): Homolog of NCBI NO: 21618096 NR Description: unknown [Arabidopsis thaliana]
  misc_feature (1)..(353): Homolog of NCBI NO: 18396861 NR Description: C2 domain-containing protein [Arabidopsis >gi|6721150|gb|AAF26778.1|AC016829_2 hypothetical protein
  misc_feature (10)..(201): Homolog of NCBI NO: 15225835 NR Description: C2 domain-containing protein [Arabidopsis
  misc_feature (10)..(201): Homolog of NCBI NO: 15219742 NR Description: C2 domain-containing protein [Arabidopsis
  misc_feature (8)..(199): Homolog of NCBI NO: 15225023 NR Description: C2 domain-containing protein [Arabidopsis
  misc_feature (10)..(201): Homolog of NCBI NO: 25372827 NR Description: hypothetical protein [imported] - Arabidopsis >gi|2494130|gb|AAB80639.1| Contains similarity to Glycine SRC2
  misc_feature (10)..(180): Homolog of NCBI NO: 15234097 NR Description: C2 domain-containing protein [Arabidopsis
  misc_feature (10)..(148): Homolog of NCBI NO: 34912020 NR Description: P0684E06.19 [Oryza sativa (japonica
MGRLKFACPVLEINLISAQDLAPVSRNMKTYSVAWINTDPMRKLTTRVDQSNRANPIWNEKFVFRVNDKILYVDASAIVIEIYAAAWAKDALVGTVNVLLSDLFAPWSGFGDGNDGGGGNNNMRLVTLQIRRPSGRLQGFLRLGVALLDGGQRSMPLSIEVFDGSRKGERNSVKRDQEASRMMHRRTNSDQTDLTTSTNDYGVKTGVVTGNGGEVVVVAVLLLVRIVWLMVRFVALILDHQRLWLRLRLRKGFTIDRKQRLKRLTKRTQVRYLKGKQRELSIELNGGEQRKMARVERVERLDQAMILAGKEEREGEEGGGEERRNNKGGETVEERVRKGCFHVLETCLDVRFR

SEQ ID NO: 102373 - protein, 326 aa, Arabidopsis thaliana
  peptide (1)..(326): Ceres Seq. ID no. 13610086
  misc_feature (1)..(70): Pfam Name: C2 domain Pfam Description: C2 domain
  misc_feature (1)..(186): Homolog of NCBI NO: 21618096 NR Description: unknown [Arabidopsis thaliana]
  misc_feature (1)..(326): Homolog of NCBI NO: 18396861 NR Description: C2 domain-containing protein [Arabidopsis >gi|6721150|gb|AAF26778.1|AC016829_2 hypothetical protein
  misc_feature (1)..(174): Homolog of NCBI NO: 15225835 NR Description: C2 domain-containing protein [Arabidopsis
  misc_feature (1)..(174): Homolog of NCBI NO: 15219742 NR Description: C2 domain-containing protein [Arabidopsis
  misc_feature (1)..(172): Homolog of NCBI NO: 15225023 NR Description: C2 domain-containing protein [Arabidopsis
  misc_feature (1)..(174): Homolog of NCBI NO: 25372827 NR Description: hypothetical protein [imported] - Arabidopsis >gi|2494130|gb|AAB80639.1| Contains similarity to Glycine SRC2
  misc_feature (1)..(153): Homolog of NCBI NO: 15234097 NR Description: C2 domain-containing protein [Arabidopsis
  misc_feature (1)..(121): Homolog of NCBI NO: 34912020 NR Description: P0684E06.19 [Oryza sativa (japonica
MKTYSVAWINTDPMRKLTTRVDQSNRANPIWNEKFVFRVNDKILYVDASAIVIEIYAAAWAKDALVGTVNVLLSDLFAPWSGFGDGNDGGGGNNNMRLVTLQIRRPSGRLQGFLRLGVALLDGGQRSMPLSIEVFDGSRKGERNSVKRDQEASRMMHRRTNSDQTDLTTSTNDYGVKTGVVTGNGGEVVVVAVLLLVRIVWLMVRFVALILDHQRLWLRLRLRKGFTIDRKQRLKRLTKRTQVRYLKGKQRELSIELNGGEQRKMARVERVERLDQAMILAGKEEREGEEGGGEERRNNKGGETVEERVRKGCFHVLETCLDVRFR

SEQ ID NO: 102374 - protein, 313 aa, Arabidopsis thaliana
  peptide (1)..(313): Ceres Seq. ID no. 13610087
  misc_feature (1)..(57): Pfam Name: C2 domain Pfam Description: C2 domain
  misc_feature (1)..(173): Homolog of NCBI NO: 21618096 NR Description: unknown [Arabidopsis thaliana]
  misc_feature (1)..(313): Homolog of NCBI NO: 18396861 NR Description: C2 domain-containing protein [Arabidopsis >gi|6721150|gb|AAF26778.1|AC016829_2 hypothetical protein
  misc_feature (1)..(161): Homolog of NCBI NO: 15225835 NR Description: C2 domain-containing protein [Arabidopsis
  misc_feature (1)..(161): Homolog of NCBI NO: 15219742 NR Description: C2 domain-containing protein [Arabidopsis
  misc_feature (1)..(159): Homolog of NCBI NO: 15225023 NR Description: C2 domain-containing protein [Arabidopsis
  misc_feature (1)..(161): Homolog of NCBI NO: 25372827 NR Description: hypothetical protein [imported] - Arabidopsis >gi|2494130|gb|AAB80639.1| Contains similarity to Glycine SRC2
  misc_feature (1)..(140): Homolog of NCBI NO: 15234097 NR Description: C2 domain-containing protein [Arabidopsis
  misc_feature (1)..(108): Homolog of NCBI NO: 34912020 NR Description: P0684E06.19 [Oryza sativa (japonica
MRKLTTRVDQSNRANPIWNEKFVFRVNDKILYVDASAIVIEIYAAAWAKDALVGTVNVLLSDLFAPWSGFGDGNDGGGGNNNMRLVTLQIRRPSGRLQGFLRLGVALLDGGQRSMPLSIEVFDGSRKGERNSVKRDQEASRMMHRRTNSDQTDLTTSTNDYGVKTGVVTGNGGEVVVVAVLLLVRIVWLMVRFVALILDHQRLWLRLRLRKGFTIDRKQRLKRLTKRTQVRYLKGKQRELSIELNGGEQRKMARVERVERLDQAMILAGKEEREGEEGGGEERRNNKGGETVEERVRKGCFHVLETCLDVRFR

SEQ ID NO: 102375 - DNA, 1135 bp, Arabidopsis thaliana
  misc_feature (1)..(1135): Ceres Seq. ID no. 13610097
  misc_feature: MA Experiment ID: 108434 Result: Down-regulated in Transcription
  misc_feature: MA Experiment 108434 PARAMETER Experiment Name: At_Root_Tips_cDNA_P Parameter: Tissue Value: Root Tips
  misc_feature: MA Experiment ID: 108462 Result: Up-regulated in Transcription
  misc_feature: MA Experiment 108462 PARAMETER Experiment Name: At_Germinating_Seeds_cDNA_P Parameter: Age (day) Value: 2 vs. 0
  misc_feature: MA Experiment 108462 PARAMETER Experiment Name: At_Germinating_Seeds_cDNA_P Parameter: Tissue Value: Germinating Seeds
  misc_feature: MA Experiment ID: 108463 Result: Up-regulated in Transcription
  misc_feature: MA Experiment 108463 PARAMETER Experiment Name: At_Germinating_Seeds_cDNA_P Parameter: Age (day) Value: 3 vs. 0
  misc_feature: MA Experiment 108463 PARAMETER Experiment Name: At_Germinating_Seeds_cDNA_P Parameter: Tissue Value: Germinating Seeds
  misc_feature: MA Experiment ID: 108464 Result: Up-regulated in Transcription
  misc_feature: MA Experiment 108464 PARAMETER Experiment Name: At_Germinating_Seeds_cDNA_P Parameter: Age (day) Value: 4 vs. 0
  misc_feature: MA Experiment 108464 PARAMETER Experiment Name: At_Germinating_Seeds_cDNA_P Parameter: Tissue Value: Germinating Seeds
  misc_feature: MA Experiment ID: 108569 Result: Up-regulated in Transcription
  misc_feature: MA Experiment 108569 PARAMETER Experiment Name: At_0.001%_MeJA__cDNA_P Parameter: Timepoint (hr) Value: 6
  misc_feature: MA Experiment 108569 PARAMETER Experiment Name: At_0.001%_MeJA__cDNA_P Parameter: Tissue Value: Aerial
  misc_feature: MA Experiment 108569 PARAMETER Experiment Name: At_0.001%_MeJA__cDNA_P Parameter: Treatment Value: 0.001% MeJA vs. No Treatment
  misc_feature: MA Experiment ID: 108572 Result: Up-regulated in Transcription
  misc_feature: MA Experiment 108572 PARAMETER Experiment Name: At_Drought_cDNA_P Parameter: Timepoint (hr) Value: 1
  misc_feature: MA Experiment 108572 PARAMETER Experiment Name: At_Drought_cDNA_P Parameter: Tissue Value: Aerial
  misc_feature: MA Experiment 108572 PARAMETER Experiment Name: At_Drought_cDNA_P Parameter: Treatment Value: Drought vs. No Drought
  misc_feature: MA Experiment ID: 108573 Result: Up-regulated in Transcription
  misc_feature: MA Experiment 108573 PARAMETER Experiment Name: At_Drought_cDNA_P Parameter: Timepoint (hr) Value: 6
  misc_feature: MA Experiment 108573 PARAMETER Experiment Name: At_Drought_cDNA_P Parameter: Tissue Value: Aerial
  misc_feature: MA Experiment 108573 PARAMETER Experiment Name: At_Drought_cDNA_P Parameter: Treatment Value: Drought vs. No Drought
  misc_feature: MA Experiment ID: 108576 Result: Up-regulated in Transcription
  misc_feature: MA Experiment 108576 PARAMETER Experiment Name: At_42deg_Heat_cDNA_P Parameter: Temperature (deg C) Value: 42 vs. 22
  misc_feature: MA Experiment 108576 PARAMETER Experiment Name: At_42deg_Heat_cDNA_P Parameter: Timepoint (hr) Value: 1
  misc_feature: MA Experiment 108576 PARAMETER Experiment Name: At_42deg_Heat_cDNA_P Parameter: Tissue Value: Aerial
  misc_feature: MA Experiment ID: 108577 Result: Up-regulated in Transcription
  misc_feature: MA Experiment 108577 PARAMETER Experiment Name: At_42deg_Heat_cDNA_P Parameter: Temperature (deg C) Value: 42 vs. 22
  misc_feature: MA Experiment 108577 PARAMETER Experiment Name: At_42deg_Heat_cDNA_P Parameter: Timepoint (hr) Value: 6
  misc_feature: MA Experiment 108577 PARAMETER Experiment Name: At_42deg_Heat_cDNA_P Parameter: Tissue Value: Aerial
  misc_feature: MA Experiment ID: 108579 Result: Down-regulated in Transcription
  misc_feature: MA Experiment 108579 PARAMETER Experiment Name: At_4deg_Cold_cDNA_P Parameter: Temperature (deg C) Value: 4 vs. 22
  misc_feature: MA Experiment 108579 PARAMETER Experiment Name: At_4deg_Cold_cDNA_P Parameter: Timepoint (hr) Value: 6
  misc_feature: MA Experiment 108579 PARAMETER Experiment Name: At_4deg_Cold_cDNA_P Parameter: Tissue Value: Aerial
  misc_feature: MA Experiment ID: 108594 Result: Down-regulated in Transcription
  misc_feature: MA Experiment 108594 PARAMETER Experiment Name: At_Ler-rhl_Root_cDNA_P Parameter: Plant Line Value: null
  misc_feature: MA Experiment ID: 108668 Result: Up-regulated in Transcription
  misc_feature: MA Experiment 108668 PARAMETER Experiment Name: At_2mM_SA_cDNA_P Parameter: Plant Line Value: WS
  misc_feature: MA Experiment 108668 PARAMETER Experiment Name: At_2mM_SA_cDNA_P Parameter: Timepoint (hr) Value: 6
  misc_feature: MA Experiment 108668 PARAMETER Experiment Name: At_2mM_SA_cDNA_P Parameter: Treatment Value: 2mM SA vs. No Treatment
  misc_feature: MA Experiment ID: 20000069 Result: Down-regulated in Transcription
  misc_feature: MA Experiment 20000069 PARAMETER Experiment Name: At_100uM_ABA_Mutants_cDNA_P Parameter: Plant Line Value: CS23
  misc_feature: MA Experiment 20000069 PARAMETER Experiment Name: At_100uM_ABA_Mutants_cDNA_P Parameter: Timepoint (hr) Value: 6
  misc_feature: MA Experiment 20000069 PARAMETER Experiment Name: At_100uM_ABA_Mutants_cDNA_P Parameter: Tissue Value: Aerial
  misc_feature: MA Experiment 20000069 PARAMETER Experiment Name: At_100uM_ABA_Mutants_cDNA_P Parameter: Treatment Value: 100uM ABA vs. No Treatment
  misc_feature: MA Experiment ID: 20000089 Result: Down-regulated in Transcription
  misc_feature: MA Experiment ID: 20000113 Result: Up-regulated in Transcription
  misc_feature: MA Experiment 20000113 PARAMETER Experiment Name: At_42deg_Heat_cDNA_P Parameter: Temperature (deg C) Value: 42 vs. 22
  misc_feature: MA Experiment 20000113 PARAMETER Experiment Name: At_42deg_Heat_cDNA_P Parameter: Timepoint (hr) Value: 8
  misc_feature: MA Experiment 20000113 PARAMETER Experiment Name: At_42deg_Heat_cDNA_P Parameter: Tissue Value: Aerial
  misc_feature: MA Experiment ID: 20000144 Result: Up-regulated in Transcription
  misc_feature: MA Experiment 20000144 PARAMETER Experiment Name: At_42deg_Heat_cDNA_P Parameter: Temperature (deg C) Value: 42 vs. 22
  misc_feature: MA Experiment 20000144 PARAMETER Experiment Name: At_42deg_Heat_cDNA_P Parameter: Timepoint (hr) Value: 1
  misc_feature: MA Experiment 20000144 PARAMETER Experiment Name: At_42deg_Heat_cDNA_P Parameter: Tissue Value: Aerial
  misc_feature: MA Experiment ID: 20000171 Result: Up-regulated in Transcription
  misc_feature: MA Experiment 20000171 PARAMETER Experiment Name: At_42deg_Heat_P Parameter: Age (day) Value: 14
  misc_feature: MA Experiment 20000171 PARAMETER Experiment Name: At_42deg_Heat_P Parameter: Organism Value: A. thaliana
  misc_feature: MA Experiment 20000171 PARAMETER Experiment Name: At_42deg_Heat_P Parameter: Plant Line Value: WS
  misc_feature: MA Experiment 20000171 PARAMETER Experiment Name: At_42deg_Heat_P Parameter: Temperature (deg C) Value: 42 vs. 22
  misc_feature: MA Experiment 20000171 PARAMETER Experiment Name: At_42deg_Heat_P Parameter: Timepoint (hr) Value: 1
  misc_feature: MA Experiment 20000171 PARAMETER Experiment Name: At_42deg_Heat_P Parameter: Tissue Value: Aerial
  misc_feature: MA Experiment ID: 20000173 Result: Up-regulated in Transcription
  misc_feature: MA Experiment 20000173 PARAMETER Experiment Name: At_42deg_Heat_P Parameter: Age (day) Value: 14
  misc_feature: MA Experiment 20000173 PARAMETER Experiment Name: At_42deg_Heat_P Parameter: Organism Value: A. thaliana
  misc_feature: MA Experiment 20000173 PARAMETER Experiment Name: At_42deg_Heat_P Parameter: Plant Line Value: WS
  misc_feature: MA Experiment 20000173 PARAMETER Experiment Name: At_42deg_Heat_P Parameter: Temperature (deg C) Value: 42 vs. 22
  misc_feature: MA Experiment 20000173 PARAMETER Experiment Name: At_42deg_Heat_P Parameter: Timepoint (hr) Value: 6
  misc_feature: MA Experiment 20000173 PARAMETER Experiment Name: At_42deg_Heat_P Parameter: Tissue Value: Aerial
  misc_feature: MA Experiment ID: 20000180 Result: Up-regulated in Transcription
  misc_feature: MA Experiment 20000180 PARAMETER Experiment Name: At_Germinating_Seeds_P Parameter: Age (hr) Value: 24 vs. 0
  misc_feature: MA Experiment 20000180 PARAMETER Experiment Name: At_Germinating_Seeds_P Parameter: Tissue Value: Germinating Seeds
  misc_feature: MA Experiment ID: 20000182 Result: Up-regulated in Transcription
  misc_feature: MA Experiment 20000182 PARAMETER Experiment Name: At_2mM_SA_P Parameter: Age (day) Value: 14
  misc_feature: MA Experiment 20000182 PARAMETER Experiment Name: At_2mM_SA_P Parameter: Organism Value: A. thaliana
  misc_feature: MA Experiment 20000182 PARAMETER Experiment Name: At_2mM_SA_P Parameter: Plant Line Value: WS
  misc_feature: MA Experiment 20000182 PARAMETER Experiment Name: At_2mM_SA_P Parameter: Timepoint (hr) Value: 6
  misc_feature: MA Experiment 20000182 PARAMETER Experiment Name: At_2mM_SA_P Parameter: Tissue Value: Aerial
  misc_feature: MA Experiment 20000182 PARAMETER Experiment Name: At_2mM_SA_P Parameter: Treatment Value: 2mM SA vs. No Treatment
  misc_feature: MA Experiment ID: 20000184 Result: Up-regulated in Transcription
  misc_feature: MA Experiment 20000184 PARAMETER Experiment Name: At_Shoots__P Parameter: Age (day) Value: 7
  misc_feature: MA Experiment 20000184 PARAMETER Experiment Name: At_Shoots__P Parameter: Tissue Value: Shoots vs. Whole Plant
  misc_feature: MA Experiment ID: 20000185 Result: Up-regulated in Transcription
  misc_feature: MA Experiment 20000185 PARAMETER Experiment Name: At_Roots__P Parameter: Age (day) Value: 7 vs. 21
  misc_feature: MA Experiment 20000185 PARAMETER Experiment Name: At_Roots__P Parameter: Organism Value: A. thaliana
  misc_feature: MA Experiment 20000185 PARAMETER Experiment Name: At_Roots__P Parameter: Tissue Value: Roots vs. Whole Plant
  misc_feature: MA Experiment ID: 20000234 Result: Down-regulated in Transcription
  misc_feature: MA Experiment 20000234 PARAMETER Experiment Name: At_Siliques_P Parameter: Age (day) Value: 21
  misc_feature: MA Experiment 20000234 PARAMETER Experiment Name: At_Siliques_P Parameter: Organism Value: A. thaliana
  misc_feature: MA Experiment 20000234 PARAMETER Experiment Name: At_Siliques_P Parameter: Plant Line Value: WS
  misc_feature: MA Experiment 20000234 PARAMETER Experiment Name: At_Siliques_P Parameter: Tissue Value: Less Than 5mm Siliques vs. Whole Plant
  misc_feature: MA Experiment ID: 20000235 Result: Down-regulated in Transcription
  misc_feature: MA Experiment 20000235 PARAMETER Experiment Name: At_Siliques_P Parameter: Age (day) Value: 21
  misc_feature: MA Experiment 20000235 PARAMETER Experiment Name: At_Siliques_P Parameter: Organism Value: A. thaliana
  misc_feature: MA Experiment 20000235 PARAMETER Experiment Name: At_Siliques_P Parameter: Plant Line Value: WS
  misc_feature: MA Experiment 20000235 PARAMETER Experiment Name: At_Siliques_P Parameter: Tissue Value: 5-10mm Siliques vs. Whole Plant
  misc_feature: MA Experiment ID: 20000264 Result: Down-regulated in Transcription
  misc_feature: MA Experiment 20000264 PARAMETER Experiment Name: At_Open_Flower_P Parameter: Age (day) Value: 21
  misc_feature: MA Experiment 20000264 PARAMETER Experiment Name: At_Open_Flower_P Parameter: Plant Line Value: WS
  misc_feature: MA Experiment 20000264 PARAMETER Experiment Name: At_Open_Flower_P Parameter: Tissue Value: Open Flower vs. Whole Plant
  misc_feature: MA Experiment ID: 20000265 Result: Down-regulated in Transcription
  misc_feature: MA Experiment 20000265 PARAMETER Experiment Name: At_Open_Flower_P Parameter: Age (day) Value: 21
  misc_feature: MA Experiment 20000265 PARAMETER Experiment Name: At_Open_Flower_P Parameter: Plant Line Value: WS
  misc_feature: MA Experiment 20000265 PARAMETER Experiment Name: At_Open_Flower_P Parameter: Tissue Value: Closed Flower vs. Whole Plant
  misc_feature: MA Experiment ID: 20000286 Result: Down-regulated in Transcription
  misc_feature: MA Experiment 20000286 PARAMETER Experiment Name: At_Open_Flower_P Parameter: Age (day) Value: 21
  misc_feature: MA Experiment 20000286 PARAMETER Experiment Name: At_Open_Flower_P Parameter: Plant Line Value: WS
  misc_feature: MA Experiment 20000286 PARAMETER Experiment Name: At_Open_Flower_P Parameter: Tissue Value: Half Open vs. Whole Plant
  misc_feature: MA Experiment ID: 20000437 Result: Down-regulated in Transcription
  misc_feature: MA Experiment 20000437 PARAMETER Experiment Name: At_Drought_P Parameter: Age (day) Value: 8
  misc_feature: MA Experiment 20000437 PARAMETER Experiment Name: At_Drought_P Parameter: Organism Value: A. thaliana
  misc_feature: MA Experiment 20000437 PARAMETER Experiment Name: At_Drought_P Parameter: Plant Line Value: WS
  misc_feature: MA Experiment 20000437 PARAMETER Experiment Name: At_Drought_P Parameter: Timepoint (hr) Value: 24
  misc_feature: MA Experiment 20000437 PARAMETER Experiment Name: At_Drought_P Parameter: Tissue Value: Whole Plant
  misc_feature: MA Experiment 20000437 PARAMETER Experiment Name: At_Drought_P Parameter: Treatment Value: Drought vs. No Drought
  misc_feature: MA Experiment ID: 20000438 Result: Up-regulated in Transcription
  misc_feature: MA Experiment 20000438 PARAMETER Experiment Name: At_Shoots__P Parameter: Age (day) Value: 14
  misc_feature: MA Experiment 20000438 PARAMETER Experiment Name: At_Shoots__P Parameter: Tissue Value: Shoots vs. Whole Plant
  misc_feature: MA Experiment ID: 20000439 Result: Up-regulated in Transcription
  misc_feature: MA Experiment 20000439 PARAMETER Experiment Name: At_Roots__P Parameter: Age (day) Value: 14 vs. 21
  misc_feature: MA Experiment 20000439 PARAMETER Experiment Name: At_Roots__P Parameter: Organism Value: A. thaliana
  misc_feature: MA Experiment 20000439 PARAMETER Experiment Name: At_Roots__P Parameter: Tissue Value: Roots vs. Whole Plant
  misc_feature: MA Experiment ID: 20000709 Result: Down-regulated in Transcription
  misc_feature: MA Experiment 20000709 PARAMETER Experiment Name: At_15mM_NH4NO3_L-to-H_P Parameter: Age (hr) Value: 14
  misc_feature: MA Experiment 20000709 PARAMETER Experiment Name: At_15mM_NH4NO3_L-to-H_P Parameter: Organism Value: A. thaliana
  misc_feature: MA Experiment 20000709 PARAMETER Experiment Name: At_15mM_NH4NO3_L-to-H_P Parameter: Plant Line Value: WS
  misc_feature: MA Experiment 20000709 PARAMETER Experiment Name: At_15mM_NH4NO3_L-to-H_P Parameter: Timepoint (hr) Value: 4
  misc_feature: MA Experiment 20000709 PARAMETER Experiment Name: At_15mM_NH4NO3_L-to-H_P Parameter: Tissue Value: Aerial
  misc_feature: MA Experiment 20000709 PARAMETER Experiment Name: At_15mM_NH4NO3_L-to-H_P Parameter: Treatment Value: 15mM NH4NO3 vs. 30mM Mannitol
  misc_feature: MA Experiment ID: 20000794 Result: Down-regulated in Transcription
  misc_feature: MA Experiment 20000794 PARAMETER Experiment Name: At_Petals_P Parameter: Age (day) Value: 23-25 days
  misc_feature: MA Experiment 20000794 PARAMETER Experiment Name: At_Petals_P Parameter: Plant Line Value: WS
  misc_feature: MA Experiment 20000794 PARAMETER Experiment Name: At_Petals_P Parameter: Tissue Value: Petals vs. Whole plant
  misc_feature: MA Experiment ID: 20001555 Result: Down-regulated in Transcription
  misc_feature: MA Experiment 20001555 PARAMETER Experiment Name: At_Drought_Soil_Dry_P Parameter: Age (day) Value: 24
  misc_feature: MA Experiment 20001555 PARAMETER Experiment Name: At_Drought_Soil_Dry_P Parameter: Organism Value: A. thaliana
  misc_feature: MA Experiment 20001555 PARAMETER Experiment Name: At_Drought_Soil_Dry_P Parameter: Plant Line Value: WS
  misc_feature: MA Experiment 20001555 PARAMETER Experiment Name: At_Drought_Soil_Dry_P Parameter: Post Timepoint (hr) Value: None
  misc_feature: MA Experiment 20001555 PARAMETER Experiment Name: At_Drought_Soil_Dry_P Parameter: Post-Treatment Value: None
  misc_feature: MA Experiment 20001555 PARAMETER Experiment Name: At_Drought_Soil_Dry_P Parameter: Timepoint (day) Value: 10
  misc_feature: MA Experiment 20001555 PARAMETER Experiment Name: At_Drought_Soil_Dry_P Parameter: Treatment Value: Drought vs. No Drought
  misc_feature: MA Experiment ID: 20001556 Result: Down-regulated in Transcription
  misc_feature: MA Experiment 20001556 PARAMETER Experiment Name: At_Drought_Soil_Dry_P Parameter: Age (day) Value: 26
  misc_feature: MA Experiment 20001556 PARAMETER Experiment Name: At_Drought_Soil_Dry_P Parameter: Organism Value: A. thaliana
  misc_feature: MA Experiment 20001556 PARAMETER Experiment Name: At_Drought_Soil_Dry_P Parameter: Plant Line Value: WS
  misc_feature: MA Experiment 20001556 PARAMETER Experiment Name: At_Drought_Soil_Dry_P Parameter: Post Timepoint (hr) Value: None
  misc_feature: MA Experiment 20001556 PARAMETER Experiment Name: At_Drought_Soil_Dry_P Parameter: Post-Treatment Value: None
  misc_feature: MA Experiment 20001556 PARAMETER Experiment Name: At_Drought_Soil_Dry_P Parameter: Timepoint (day) Value: 12
  misc_feature: MA Experiment 20001556 PARAMETER Experiment Name: At_Drought_Soil_Dry_P Parameter: Treatment Value: Drought vs. No Drought
  misc_feature: MA Experiment ID: 20001905 Result: Down-regulated in Transcription
  misc_feature: MA Experiment 20001905 PARAMETER Experiment Name: At_Drought_Reproduction_P Parameter: Age (day) Value: 40
  misc_feature: MA Experiment 20001905 PARAMETER Experiment Name: At_Drought_Reproduction_P Parameter: Organism Value: A. thaliana
  misc_feature: MA Experiment 20001905 PARAMETER Experiment Name: At_Drought_Reproduction_P Parameter: Plant Line Value: WS
  misc_feature: MA Experiment 20001905 PARAMETER Experiment Name: At_Drought_Reproduction_P Parameter: Timepoint (day) Value: 10
  misc_feature: MA Experiment 20001905 PARAMETER Experiment Name: At_Drought_Reproduction_P Parameter: Tissue Value: Rosettes
  misc_feature: MA Experiment 20001905 PARAMETER Experiment Name: At_Drought_Reproduction_P Parameter: Treatment Value: Drought vs. No Drought
  misc_feature: MA Experiment ID: 20001911 Result: Down-regulated in Transcription
  misc_feature: MA Experiment 20001911 PARAMETER Experiment Name: At_Drought_Reproduction_P Parameter: Age (day) Value: 40
  misc_feature: MA Experiment 20001911 PARAMETER Experiment Name: At_Drought_Reproduction_P Parameter: Organism Value: A. thaliana
  misc_feature: MA Experiment 20001911 PARAMETER Experiment Name: At_Drought_Reproduction_P Parameter: Plant Line Value: WS
  misc_feature: MA Experiment 20001911 PARAMETER Experiment Name: At_Drought_Reproduction_P Parameter: Timepoint (day) Value: 10
  misc_feature: MA Experiment 20001911 PARAMETER Experiment Name: At_Drought_Reproduction_P Parameter: Tissue Value: Flowers
  misc_feature: MA Experiment 20001911 PARAMETER Experiment Name: At_Drought_Reproduction_P Parameter: Treatment Value: Drought vs. No Drought
acaaacacaacatatccacaatacaaaacacaactttcatatataacaaaaaaagttatagaaatggccaaagacgtggaaggacctgagggatttcagacaagagactacgaagatccgccaccaactccgtttttcgatgcggacgagcttaccaagtggtctttatacagagccgtcattgccgagttcgtagccactctcctcttcttgtacatcaccgttttaactgtcatcggttacaagattcagtccgacacaaaagccggtggagttgactgcggcggcgtcggaatccttggcatcgcgtgggcttttggtggcatgatcttcatccttgtctactgcaccgccggtatctcaggtggtcacataaaccctgcggtgacgtttggtttgttcttagcccggaaggtatcgctgattagggcggtgctttacatggtggctcagtgtttgggtgctatttgtggagttggtttcgtcaaagcctttcaaagctcttactatgatcgttacggtggaggagccaactctctagcagacggctacaacacaggcaccggactagccgcagagatcattggaacattcgttctcgtctacacagtcttctccgctactgatcccaaacgtaacgctagagactcccacgttccggttttggcgccacttccgattgggtttgcggtgtttatggtacatttggccactattccgatcaccggaaccggcatcaacccggctaggagtttcggagctgccgtaatctataacaagagcaagccatgggatgaccactggatattctgggtgggaccattcattggagctgcgatagctgcattttatcaccaatttgtcctaagggcttcaggttccaagtcacttggatccttcagaagtgcagccaacgtttgagtttttgccacacaaaaaaaaacctatcataataacaacaattacaaaatggttgtgttattatgtatgtacaaaaattggcaactttgcttgtaaaactatgcactatatttcttcttgtttttctgttttcattgtggtgtaatactttgatatgtgccaatgccaatgtttgtgtactcgggaaaacaattaatgaaaaccaaattgtttt

SEQ ID NO: 102376 - protein, 306 aa, Arabidopsis thaliana
  peptide (1)..(306): Ceres Seq. ID no. 13610098
  misc_feature (50)..(285): Pfam Name: Major intrinsic protein Pfam Description: Major intrinsic protein
  misc_feature (22)..(306): Homolog of NCBI NO: 15228095 NR Description: plasma membrane intrinsic protein 2B, putative thaliana] >gi|21431896|sp|P43287|WC2B_ARATH Plasma membrane
  misc_feature (22)..(306): Homolog of NCBI NO: 21554356 NR Description: aquaporin (plasma membrane intrinsic protein 2B)
  misc_feature (22)..(306): Homolog of NCBI NO: 629543 NR Description: plasma membrane intrinsic protein 2b - thaliana >gi|472879|emb|CAA53478.1| plasma membrane intrinsic
  misc_feature (22)..(306): Homolog of NCBI NO: 15228096 NR Description: plasma membrane intrinsic protein 2C [Arabidopsis
  misc_feature (22)..(306): Homolog of NCBI NO: 21537097 NR Description: aquaporin (plasma membrane intrinsic protein 2C)
  misc_feature (22)..(304): Homolog of NCBI NO: 7209560 NR Description: Plasma membrane aquaporin 2b [Raphanus sativus]
  misc_feature (22)..(304): Homolog of NCBI NO: 5081423 NR Description: plasma membrane intrinsic protein 2 [Brassica
  misc_feature (22)..(304): Homolog of NCBI NO: 7209562 NR Description: Plasma membrane aquaporin 2c [Raphanus sativus]
  misc_feature (22)..(306): Homolog of NCBI NO: 15231810 NR Description: plasma membrane intrinsic protein 2A [Arabidopsis >gi|1175013|sp|P43286|WC2A_ARATH Plasma membrane intrinsic
  misc_feature (22)..(306): Homolog of NCBI NO: 5081421 NR Description: plasma membrane intrinsic protein 1 [Brassica
TNTTYPQYKTQLSYITKKVIEMAKDVEGPEGFQTRDYEDPPPTPFFDADELTKWSLYRAVIAEFVATLLFLYITVLTVIGYKIQSDTKAGGVDCGGVGILGIAWAFGGMIFILVYCTAGISGGHINPAVTFGLFLARKVSLIRAVLYMVAQCLGAICGVGFVKAFQSSYYDRYGGGANSLADGYNTGTGLAAEIIGTFVLVYTVFSATDPKRNARDSHVPVLAPLPIGFAVFMVHLATIPITGTGINPARSFGAAVIYNKSKPWDDHWIFWVGPFIGAAIAAFYHQFVLRASGSKSLGSFRSAANV

SEQ ID NO: 102377 - protein, 285 aa, Arabidopsis thaliana
  peptide (1)..(285): Ceres Seq. ID no. 13610099
  misc_feature (29)..(264): Pfam Name: Major intrinsic protein Pfam Description: Major intrinsic protein
  misc_feature (1)..(285): Homolog of NCBI NO: 15228095 NR Description: plasma membrane intrinsic protein 2B, putative thaliana] >gi|21431896|sp|P43287|WC2B_ARATH Plasma membrane
  misc_feature (1)..(285): Homolog of NCBI NO: 21554356 NR Description: aquaporin (plasma membrane intrinsic protein 2B)
  misc_feature (1)..(285): Homolog of NCBI NO: 629543 NR Description: plasma membrane intrinsic protein 2b - thaliana >gi|472879|emb|CAA53478.1| plasma membrane intrinsic
  misc_feature (1)..(285): Homolog of NCBI NO: 15228096 NR Description: plasma membrane intrinsic protein 2C [Arabidopsis
  misc_feature (1)..(285): Homolog of NCBI NO: 21537097 NR Description: aquaporin (plasma membrane intrinsic protein 2C)
  misc_feature (1)..(283): Homolog of NCBI NO: 7209560 NR Description: Plasma membrane aquaporin 2b [Raphanus sativus]
  misc_feature (1)..(283): Homolog of NCBI NO: 5081423 NR Description: plasma membrane intrinsic protein 2 [Brassica
  misc_feature (1)..(283): Homolog of NCBI NO: 7209562 NR Description: Plasma membrane aquaporin 2c [Raphanus sativus]
  misc_feature (1)..(285): Homolog of NCBI NO: 15231810 NR Description: plasma membrane intrinsic protein 2A [Arabidopsis >gi|1175013|sp|P43286|WC2A_ARATH Plasma membrane intrinsic
  misc_feature (1)..(285): Homolog of NCBI NO: 5081421 NR Description: plasma membrane intrinsic protein 1 [Brassica
MAKDVEGPEGFQTRDYEDPPPTPFFDADELTKWSLYRAVIAEFVATLLFLYITVLTVIGYKIQSDTKAGGVDCGGVGILGIAWAFGGMIFILVYCTAGISGGHINPAVTFGLFLARKVSLIRAVLYMVAQCLGAICGVGFVKAFQSSYYDRYGGGANSLADGYNTGTGLAAEIIGTFVLVYTVFSATDPKRNARDSHVPVLAPLPIGFAVFMVHLATIPITGTGINPARSFGAAVIYNKSKPWDDHWIFWVGPFIGAAIAAFYHQFVLRASGSKSLGSFRSAANV

SEQ ID NO: 102378 - protein, 198 aa, Arabidopsis thaliana
  peptide (1)..(198): Ceres Seq. ID no. 13610100
  misc_feature (1)..(177): Pfam Name: Major intrinsic protein Pfam Description: Major intrinsic protein
  misc_feature (1)..(198): Homolog of NCBI NO: 15228095 NR Description: plasma membrane intrinsic protein 2B, putative thaliana] >gi|21431896|sp|P43287|WC2B_ARATH Plasma membrane
  misc_feature (1)..(198): Homolog of NCBI NO: 21554356 NR Description: aquaporin (plasma membrane intrinsic protein 2B)
  misc_feature (1)..(198): Homolog of NCBI NO: 629543 NR Description: plasma membrane intrinsic protein 2b - thaliana >gi|472879|emb|CAA53478.1| plasma membrane intrinsic
  misc_feature (1)..(198): Homolog of NCBI NO: 15228096 NR Description: plasma membrane intrinsic protein 2C [Arabidopsis
  misc_feature (1)..(198): Homolog of NCBI NO: 21537097 NR Description: aquaporin (plasma membrane intrinsic protein 2C)
  misc_feature (1)..(196): Homolog of NCBI NO: 7209560 NR Description: Plasma membrane aquaporin 2b [Raphanus sativus]
  misc_feature (1)..(196): Homolog of NCBI NO: 5081423 NR Description: plasma membrane intrinsic protein 2 [Brassica
  misc_feature (1)..(196): Homolog of NCBI NO: 7209562 NR Description: Plasma membrane aquaporin 2c [Raphanus sativus]
  misc_feature (1)..(198): Homolog of NCBI NO: 15231810 NR Description: plasma membrane intrinsic protein 2A [Arabidopsis >gi|1175013|sp|P43286|WC2A_ARATH Plasma membrane intrinsic
  misc_feature (1)..(198): Homolog of NCBI NO: 5081421 NR Description: plasma membrane intrinsic protein 1 [Brassica
MIFILVYCTAGISGGHINPAVTFGLFLARKVSLIRAVLYMVAQCLGAICGVGFVKAFQSSYYDRYGGGANSLADGYNTGTGLAAEIIGTFVLVYTVFSATDPKRNARDSHVPVLAPLPIGFAVFMVHLATIPITGTGINPARSFGAAVIYNKSKPWDDHWIFWVGPFIGAAIAAFYHQFVLRASGSKSLGSFRSAANV

SEQ ID NO: 102379 - DNA, 758 bp, Arabidopsis thaliana
  misc_feature (1)..(758): Ceres Seq. ID no. 13610101
  misc_feature: MA Experiment ID: 108461 Result: Down-regulated in Transcription
  misc_feature: MA Experiment 108461 PARAMETER Experiment Name: At_Germinating_Seeds_cDNA_P Parameter: Age (day) Value: 1 vs. 0
  misc_feature: MA Experiment 108461 PARAMETER Experiment Name: At_Germinating_Seeds_cDNA_P Parameter: Tissue Value: Germinating Seeds
  misc_feature: MA Experiment ID: 108462 Result: Down-regulated in Transcription
  misc_feature: MA Experiment 108462 PARAMETER Experiment Name: At_Germinating_Seeds_cDNA_P Parameter: Age (day) Value: 2 vs. 0
  misc_feature: MA Experiment 108462 PARAMETER Experiment Name: At_Germinating_Seeds_cDNA_P Parameter: Tissue Value: Germinating Seeds
  misc_feature: MA Experiment ID: 108463 Result: Down-regulated in Transcription
  misc_feature: MA Experiment 108463 PARAMETER Experiment Name: At_Germinating_Seeds_cDNA_P Parameter: Age (day) Value: 3 vs. 0
  misc_feature: MA Experiment 108463 PARAMETER Experiment Name: At_Germinating_Seeds_cDNA_P Parameter: Tissue Value: Germinating Seeds
  misc_feature: MA Experiment ID: 108464 Result: Down-regulated in Transcription
  misc_feature: MA Experiment 108464 PARAMETER Experiment Name: At_Germinating_Seeds_cDNA_P Parameter: Age (day) Value: 4 vs. 0
  misc_feature: MA Experiment 108464 PARAMETER Experiment Name: At_Germinating_Seeds_cDNA_P Parameter: Tissue Value: Germinating Seeds
  misc_feature: MA Experiment ID: 108609 Result: Up-regulated in Transcription
  misc_feature: MA Experiment 108609 PARAMETER Experiment Name: At_100uM_ABA_cDNA_P Parameter: Timepoint (hr) Value: 24
  misc_feature: MA Experiment 108609 PARAMETER Experiment Name: At_100uM_ABA_cDNA_P Parameter: Tissue Value: Aerial
  misc_feature: MA Experiment 108609 PARAMETER Experiment Name: At_100uM_ABA_cDNA_P Parameter: Treatment Value: 100uM ABA vs. No Treatment
  misc_feature: MA Experiment ID: 20000113 Result: Up-regulated in Transcription
  misc_feature: MA Experiment 20000113 PARAMETER Experiment Name: At_42deg_Heat_cDNA_P Parameter: Temperature (deg C) Value: 42 vs. 22
  misc_feature: MA Experiment 20000113 PARAMETER Experiment Name: At_42deg_Heat_cDNA_P Parameter: Timepoint (hr) Value: 8
  misc_feature: MA Experiment 20000113 PARAMETER Experiment Name: At_42deg_Heat_cDNA_P Parameter: Tissue Value: Aerial
  misc_feature: MA Experiment ID: 20000227 Result: Down-regulated in Transcription
  misc_feature: MA Experiment 20000227 PARAMETER Experiment Name: At_Root-Tips-vs-Tops_P Parameter: Tissue Value: Root Tips vs. Root Tops
  misc_feature: MA Experiment ID: 20001555 Result: Up-regulated in Transcription
  misc_feature: MA Experiment 20001555 PARAMETER Experiment Name: At_Drought_Soil_Dry_P Parameter: Age (day) Value: 24
  misc_feature: MA Experiment 20001555 PARAMETER Experiment Name: At_Drought_Soil_Dry_P Parameter: Organism Value: A. thaliana
  misc_feature: MA Experiment 20001555 PARAMETER Experiment Name: At_Drought_Soil_Dry_P Parameter: Plant Line Value: WS
  misc_feature: MA Experiment 20001555 PARAMETER Experiment Name: At_Drought_Soil_Dry_P Parameter: Post Timepoint (hr) Value: None
  misc_feature: MA Experiment 20001555 PARAMETER Experiment Name: At_Drought_Soil_Dry_P Parameter: Post-Treatment Value: None
  misc_feature: MA Experiment 20001555 PARAMETER Experiment Name: At_Drought_Soil_Dry_P Parameter: Timepoint (day) Value: 10
  misc_feature: MA Experiment 20001555 PARAMETER Experiment Name: At_Drought_Soil_Dry_P Parameter: Treatment Value: Drought vs. No Drought
atgacattatttatatcatttgtcaaaaggcccaaacgtctttttcagttgctctttcttggtgggaactgtttgagctcgagttctatgatgaacgtgagccggccggcgattcacccggttgatgctcttccggtggctcctactgccggagcgatcgatagaccaccagtgaggatgaaggatgtgcaaggcatgcccggaaccaccggcggtctcatcctccgtctctctcagttcgttcccgctcttatctccgtctccgtcatggtcactacctccgacttccgctccgccaccgcattctgttgcttggttcttgcggttagcctgcaaagcctgtggagcttgtctctttttattatcgatgcttatgctcttctggtgagaagaagccttcgaaatcactccgttgttcagtgtttcactattggagatggagtcacatcgacgctcacgtttgcagctgcatctgcttctgctggcataactgtactcatcaacgatcttggacaatgtaacgtgaatcactgcacaaggtttgagactgccacagcaatggccttcatcagctggtttgctgtgtctccttcctttattctcaacttctggtccttagccacccactaaatatatagcacacaagttgagttcagagaaatccatctttctagtataatgtaaataaagggtggagtataatgtatcgcttgattagcaaatgttttgagacagatattatattggaaaatcatagt

SEQ ID NO: 102380 - protein, 209 aa, Arabidopsis thaliana
  peptide (1)..(209): Ceres Seq. ID no. 13610102
  misc_feature (65)..(194): Pfam Name: Domain of unknown function (DUF588) Pfam Description: Domain of unknown function (DUF588)
  misc_feature (30)..(209): Homolog of NCBI NO: 30687069 NR Description: expressed protein [Arabidopsis thaliana]
  misc_feature (31)..(209): Homolog of NCBI NO: 25408537 NR Description: hypothetical protein At2g37200 [imported] - thaliana >gi|4371281|gb|AAD18139.1| unknown protein [Arabidopsis
  misc_feature (31)..(208): Homolog of NCBI NO: 18401722 NR Description: expressed protein [Arabidopsis thaliana]
  misc_feature (66)..(192): Homolog of NCBI NO: 26006486 NR Description: Unknown protein [Oryza sativa (japonica
  misc_feature (60)..(208): Homolog of NCBI NO: 30686969 NR Description: expressed protein [Arabidopsis thaliana] ethylene responsive element binding protein, putative thaliana] >gi|30102860|gb|AAP21348.1| At3g23220 [Arabidopsis
  misc_feature (60)..(208): Homolog of NCBI NO: 18409932 NR Description: expressed protein [Arabidopsis thaliana] AT4g31460/F3L17_30 [Arabidopsis thaliana]
  misc_feature (60)..(206): Homolog of NCBI NO: 15241672 NR Description: hypothetical protein [Arabidopsis thaliana]
  misc_feature (60)..(206): Homolog of NCBI NO: 22330130 NR Description: hypothetical protein [Arabidopsis thaliana]
  misc_feature (83)..(208): Homolog of NCBI NO: 11357817 NR Description: hypothetical protein F5K20.150 - Arabidopsis >gi|7630005|emb|CAB88347.1| putative protein [Arabidopsis
  misc_feature (60)..(166): Homolog of NCBI NO: 7939530 NR Description: gb|AAD20689.1~gene_id:K14B15.11~similar to
MTLFISFVKRPKRLFQLLFLGGNCLSSSSMMNVSRPAIHPVDALPVAPTAGAIDRPPVRMKDVQGMPGTTGGLILRLSQFVPALISVSVMVTTSDFRSATAFCCLVLAVSLQSLWSLSLFIIDAYALLVRRSLRNHSVVQCFTIGDGVTSTLTFAAASASAGITVLINDLGQCNVNHCTRFETATAMAFISWFAVSPSFILNFWSLATH

SEQ ID NO: 102381 - protein, 180 aa, Arabidopsis thaliana
  peptide (1)..(180): Ceres Seq. ID no. 13610103
  misc_feature (36)..(165): Pfam Name: Domain of unknown function (DUF588) Pfam Description: Domain of unknown function (DUF588)
  misc_feature (1)..(180): Homolog of NCBI NO: 30687069 NR Description: expressed protein [Arabidopsis thaliana]
  misc_feature (2)..(180): Homolog of NCBI NO: 25408537 NR Description: hypothetical protein At2g37200 [imported] - thaliana >gi|4371281|gb|AAD18139.1| unknown protein [Arabidopsis
  misc_feature (2)..(179): Homolog of NCBI NO: 18401722 NR Description: expressed protein [Arabidopsis thaliana]
  misc_feature (37)..(163): Homolog of NCBI NO: 26006486 NR Description: Unknown protein [Oryza sativa (japonica
  misc_feature (31)..(179): Homolog of NCBI NO: 30686969 NR Description: expressed protein [Arabidopsis thaliana] ethylene responsive element binding protein, putative thaliana] >gi|30102860|gb|AAP21348.1| At3g23220 [Arabidopsis
  misc_feature (31)..(179): Homolog of NCBI NO: 18409932 NR Description: expressed protein [Arabidopsis thaliana] AT4g31460/F3L17_30 [Arabidopsis thaliana]
  misc_feature (31)..(177): Homolog of NCBI NO: 15241672 NR Description: hypothetical protein [Arabidopsis thaliana]
  misc_feature (31)..(177): Homolog of NCBI NO: 22330130 NR Description: hypothetical protein [Arabidopsis thaliana]
  misc_feature (54)..(179): Homolog of NCBI NO: 11357817 NR Description: hypothetical protein F5K20.150 - Arabidopsis >gi|7630005|emb|CAB88347.1| putative protein [Arabidopsis
  misc_feature (31)..(137): Homolog of NCBI NO: 7939530 NR Description: gb|AAD20689.1~gene_id:K14B15.11~similar to
MMNVSRPAIHPVDALPVAPTAGAIDRPPVRMKDVQGMPGTTGGLILRLSQFVPALISVSVMVTTSDFRSATAFCCLVLAVSLQSLWSLSLFIIDAYALLVRRSLRNHSVVQCFTIGDGVTSTLTFAAASASAGITVLINDLGQCNVNHCTRFETATAMAFISWFAVSPSFILNFWSLATH

SEQ ID NO: 102382 - protein, 179 aa, Arabidopsis thaliana
  peptide (1)..(179): Ceres Seq. ID no. 13610104
  misc_feature (35)..(164): Pfam Name: Domain of unknown function (DUF588) Pfam Description: Domain of unknown function (DUF588)
  misc_feature (1)..(179): Homolog of NCBI NO: 30687069 NR Description: expressed protein [Arabidopsis thaliana]
  misc_feature (1)..(179): Homolog of NCBI NO: 25408537 NR Description: hypothetical protein At2g37200 [imported] - thaliana >gi|4371281|gb|AAD18139.1| unknown protein [Arabidopsis
  misc_feature (1)..(178): Homolog of NCBI NO: 18401722 NR Description: expressed protein [Arabidopsis thaliana]
  misc_feature (36)..(162): Homolog of NCBI NO: 26006486 NR Description: Unknown protein [Oryza sativa (japonica
  misc_feature (30)..(178): Homolog of NCBI NO: 30686969 NR Description: expressed protein [Arabidopsis thaliana] ethylene responsive element binding protein, putative thaliana] >gi|30102860|gb|AAP21348.1| At3g23220 [Arabidopsis
  misc_feature (30)..(178): Homolog of NCBI NO: 18409932 NR Description: expressed protein [Arabidopsis thaliana] AT4g31460/F3L17_30 [Arabidopsis thaliana]
  misc_feature (30)..(176): Homolog of NCBI NO: 15241672 NR Description: hypothetical protein [Arabidopsis thaliana]
  misc_feature (30)..(176): Homolog of NCBI NO: 22330130 NR Description: hypothetical protein [Arabidopsis thaliana]
  misc_feature (53)..(178): Homolog of NCBI NO: 11357817 NR Description: hypothetical protein F5K20.150 - Arabidopsis >gi|7630005|emb|CAB88347.1| putative protein [Arabidopsis
  misc_feature (30)..(136): Homolog of NCBI NO: 7939530 NR Description: gb|AAD20689.1~gene_id:K14B15.11~similar to
MNVSRPAIHPVDALPVAPTAGAIDRPPVRMKDVQGMPGTTGGLILRLSQFVPALISVSVMVTTSDFRSATAFCCLVLAVSLQSLWSLSLFIIDAYALLVRRSLRNHSVVQCFTIGDGVTSTLTFAAASASAGITVLINDLGQCNVNHCTRFETATAMAFISWFAVSPSFILNFWSLATH

SEQ ID NO: 102383 - DNA, 1369 bp, Arabidopsis thaliana
  misc_feature (1)..(1369): Ceres Seq. ID no. 13610120
  misc_feature: MA Experiment ID: 108434 Result: Down-regulated in Transcription
  misc_feature: MA Experiment 108434 PARAMETER Experiment Name: At_Root_Tips_cDNA_P Parameter: Tissue Value: Root Tips
  misc_feature: MA Experiment ID: 108461 Result: Up-regulated in Transcription
  misc_feature: MA Experiment 108461 PARAMETER Experiment Name: At_Germinating_Seeds_cDNA_P Parameter: Age (day) Value: 1 vs. 0
  misc_feature: MA Experiment 108461 PARAMETER Experiment Name: At_Germinating_Seeds_cDNA_P Parameter: Tissue Value: Germinating Seeds
  misc_feature: MA Experiment ID: 108462 Result: Up-regulated in Transcription
  misc_feature: MA Experiment 108462 PARAMETER Experiment Name: At_Germinating_Seeds_cDNA_P Parameter: Age (day) Value: 2 vs. 0
  misc_feature: MA Experiment 108462 PARAMETER Experiment Name: At_Germinating_Seeds_cDNA_P Parameter: Tissue Value: Germinating Seeds
  misc_feature: MA Experiment ID: 108463 Result: Up-regulated in Transcription
  misc_feature: MA Experiment 108463 PARAMETER Experiment Name: At_Germinating_Seeds_cDNA_P Parameter: Age (day) Value: 3 vs. 0
  misc_feature: MA Experiment 108463 PARAMETER Experiment Name: At_Germinating_Seeds_cDNA_P Parameter: Tissue Value: Germinating Seeds
  misc_feature: MA Experiment ID: 108573 Result: Down-regulated in Transcription
  misc_feature: MA Experiment 108573 PARAMETER Experiment Name: At_Drought_cDNA_P Parameter: Timepoint (hr) Value: 6
  misc_feature: MA Experiment 108573 PARAMETER Experiment Name: At_Drought_cDNA_P Parameter: Tissue Value: Aerial
  misc_feature: MA Experiment 108573 PARAMETER Experiment Name: At_Drought_cDNA_P Parameter: Treatment Value: Drought vs. No Drought
  misc_feature: MA Experiment ID: 108594 Result: Down-regulated in Transcription
  misc_feature: MA Experiment 108594 PARAMETER Experiment Name: At_Ler-rhl_Root_cDNA_P Parameter: Plant Line Value: null
  misc_feature: MA Experiment ID: 108607 Result: Down-regulated in Transcription
  misc_feature: MA Experiment 108607 PARAMETER Experiment Name: At_100uM_ABA_cDNA_P Parameter: Timepoint (hr) Value: 4
  misc_feature: MA Experiment 108607 PARAMETER Experiment Name: At_100uM_ABA_cDNA_P Parameter: Tissue Value: Aerial
  misc_feature: MA Experiment 108607 PARAMETER Experiment Name: At_100uM_ABA_cDNA_P Parameter: Treatment Value: 100uM ABA vs. No Treatment
  misc_feature: MA Experiment ID: 108608 Result: Down-regulated in Transcription
  misc_feature: MA Experiment 108608 PARAMETER Experiment Name: At_100uM_ABA_cDNA_P Parameter: Timepoint (hr) Value: 1
  misc_feature: MA Experiment 108608 PARAMETER Experiment Name: At_100uM_ABA_cDNA_P Parameter: Tissue Value: Aerial
  misc_feature: MA Experiment 108608 PARAMETER Experiment Name: At_100uM_ABA_cDNA_P Parameter: Treatment Value: 100uM ABA vs. No Treatment
  misc_feature: MA Experiment ID: 108667 Result: Down-regulated in Transcription
  misc_feature: MA Experiment 108667 PARAMETER Experiment Name: At_2mM_SA_cDNA_P Parameter: Plant Line Value: WS
  misc_feature: MA Experiment 108667 PARAMETER Experiment Name: At_2mM_SA_cDNA_P Parameter: Timepoint (hr) Value: 1
  misc_feature: MA Experiment 108667 PARAMETER Experiment Name: At_2mM_SA_cDNA_P Parameter: Treatment Value: 2mM SA vs. No Treatment
  misc_feature: MA Experiment ID: 108668 Result: Down-regulated in Transcription
  misc_feature: MA Experiment 108668 PARAMETER Experiment Name: At_2mM_SA_cDNA_P Parameter: Plant Line Value: WS
  misc_feature: MA Experiment 108668 PARAMETER Experiment Name: At_2mM_SA_cDNA_P Parameter: Timepoint (hr) Value: 6
  misc_feature: MA Experiment 108668 PARAMETER Experiment Name: At_2mM_SA_cDNA_P Parameter: Treatment Value: 2mM SA vs. No Treatment
  misc_feature: MA Experiment ID: 20000069 Result: Down-regulated in Transcription
  misc_feature: MA Experiment 20000069 PARAMETER Experiment Name: At_100uM_ABA_Mutants_cDNA_P Parameter: Plant Line Value: CS23
  misc_feature: MA Experiment 20000069 PARAMETER Experiment Name: At_100uM_ABA_Mutants_cDNA_P Parameter: Timepoint (hr) Value: 6
  misc_feature: MA Experiment 20000069 PARAMETER Experiment Name: At_100uM_ABA_Mutants_cDNA_P Parameter: Tissue Value: Aerial
  misc_feature: MA Experiment 20000069 PARAMETER Experiment Name: At_100uM_ABA_Mutants_cDNA_P Parameter: Treatment Value: 100uM ABA vs. No Treatment
  misc_feature: MA Experiment ID: 20000070 Result: Down-regulated in Transcription
  misc_feature: MA Experiment 20000070 PARAMETER Experiment Name: At_100uM_ABA_Mutants_cDNA_P Parameter: Plant Line Value: CS24
  misc_feature: MA Experiment 20000070 PARAMETER Experiment Name: At_100uM_ABA_Mutants_cDNA_P Parameter: Timepoint (hr) Value: 6
  misc_feature: MA Experiment 20000070 PARAMETER Experiment Name: At_100uM_ABA_Mutants_cDNA_P Parameter: Tissue Value: Aerial
  misc_feature: MA Experiment 20000070 PARAMETER Experiment Name: At_100uM_ABA_Mutants_cDNA_P Parameter: Treatment Value: 100uM ABA vs. No Treatment
  misc_feature: MA Experiment ID: 20000071 Result: Down-regulated in Transcription
  misc_feature: MA Experiment 20000071 PARAMETER Experiment Name: At_100uM_ABA_Mutants_cDNA_P Parameter: Plant Line Value: CS8104
  misc_feature: MA Experiment 20000071 PARAMETER Experiment Name: At_100uM_ABA_Mutants_cDNA_P Parameter: Timepoint (hr) Value: 6
  misc_feature: MA Experiment 20000071 PARAMETER Experiment Name: At_100uM_ABA_Mutants_cDNA_P Parameter: Tissue Value: Aerial
  misc_feature: MA Experiment 20000071 PARAMETER Experiment Name: At_100uM_ABA_Mutants_cDNA_P Parameter: Treatment Value: 100uM ABA vs. No Treatment
  misc_feature: MA Experiment ID: 20000072 Result: Down-regulated in Transcription
  misc_feature: MA Experiment 20000072 PARAMETER Experiment Name: At_100uM_ABA_Mutants_cDNA_P Parameter: Plant Line Value: CS8105
  misc_feature: MA Experiment 20000072 PARAMETER Experiment Name: At_100uM_ABA_Mutants_cDNA_P Parameter: Timepoint (hr) Value: 6
  misc_feature: MA Experiment 20000072 PARAMETER Experiment Name: At_100uM_ABA_Mutants_cDNA_P Parameter: Tissue Value: Aerial
  misc_feature: MA Experiment 20000072 PARAMETER Experiment Name: At_100uM_ABA_Mutants_cDNA_P Parameter: Treatment Value: 100uM ABA vs. No Treatment
  misc_feature: MA Experiment ID: 20000087 Result: Down-regulated in Transcription
  misc_feature: MA Experiment 20000087 PARAMETER Experiment Name: At_100uM_ABA_Mutants_cDNA_P Parameter: Plant Line Value: WS
  misc_feature: MA Experiment 20000087 PARAMETER Experiment Name: At_100uM_ABA_Mutants_cDNA_P Parameter: Timepoint (hr) Value: 6
  misc_feature: MA Experiment 20000087 PARAMETER Experiment Name: At_100uM_ABA_Mutants_cDNA_P Parameter: Tissue Value: Aerial
  misc_feature: MA Experiment 20000087 PARAMETER Experiment Name: At_100uM_ABA_Mutants_cDNA_P Parameter: Treatment Value: 100uM ABA vs. No Treatment
  misc_feature: MA Experiment ID: 20000089 Result: Down-regulated in Transcription
  misc_feature: MA Experiment ID: 20000090 Result: Down-regulated in Transcription
  misc_feature: MA Experiment ID: 20000117 Result: Down-regulated in Transcription
  misc_feature: MA Experiment 20000117 PARAMETER Experiment Name: At_100uM_ABA_Mutants_cDNA_P Parameter: Plant Line Value: Columbia
  misc_feature: MA Experiment 20000117 PARAMETER Experiment Name: At_100uM_ABA_Mutants_cDNA_P Parameter: Timepoint (hr) Value: 6
  misc_feature: MA Experiment 20000117 PARAMETER Experiment Name: At_100uM_ABA_Mutants_cDNA_P Parameter: Tissue Value: Aerial
  misc_feature: MA Experiment 20000117 PARAMETER Experiment Name: At_100uM_ABA_Mutants_cDNA_P Parameter: Treatment Value: 100uM ABA vs. No Treatment
  misc_feature: MA Experiment ID: 20000166 Result: Down-regulated in Transcription
  misc_feature: MA Experiment 20000166 PARAMETER Experiment Name: At_100uM_ABA_P Parameter: Age (day) Value: 14
  misc_feature: MA Experiment 20000166 PARAMETER Experiment Name: At_100uM_ABA_P Parameter: Organism Value: A. thaliana
  misc_feature: MA Experiment 20000166 PARAMETER Experiment Name: At_100uM_ABA_P Parameter: Plant Line Value: WS
  misc_feature: MA Experiment 20000166 PARAMETER Experiment Name: At_100uM_ABA_P Parameter: Timepoint (hr) Value: 1
  misc_feature: MA Experiment 20000166 PARAMETER Experiment Name: At_100uM_ABA_P Parameter: Tissue Value: Aerial
  misc_feature: MA Experiment 20000166 PARAMETER Experiment Name: At_100uM_ABA_P Parameter: Treatment Value: 100uM ABA vs. No Treatment
  misc_feature: MA Experiment ID: 20000173 Result: Down-regulated in Transcription
  misc_feature: MA Experiment 20000173 PARAMETER Experiment Name: At_42deg_Heat_P Parameter: Age (day) Value: 14
  misc_feature: MA Experiment 20000173 PARAMETER Experiment Name: At_42deg_Heat_P Parameter: Organism Value: A. thaliana
  misc_feature: MA Experiment 20000173 PARAMETER Experiment Name: At_42deg_Heat_P Parameter: Plant Line Value: WS
  misc_feature: MA Experiment 20000173 PARAMETER Experiment Name: At_42deg_Heat_P Parameter: Temperature (deg C) Value: 42 vs. 22
  misc_feature: MA Experiment 20000173 PARAMETER Experiment Name: At_42deg_Heat_P Parameter: Timepoint (hr) Value: 6
  misc_feature: MA Experiment 20000173 PARAMETER Experiment Name: At_42deg_Heat_P Parameter: Tissue Value: Aerial
  misc_feature: MA Experiment ID: 20000179 Result: Up-regulated in Transcription
  misc_feature: MA Experiment 20000179 PARAMETER Experiment Name: At_Germinating_Seeds_P Parameter: Age (hr) Value: 6 vs. 0
  misc_feature: MA Experiment 20000179 PARAMETER Experiment Name: At_Germinating_Seeds_P Parameter: Tissue Value: Germinating Seeds
  misc_feature: MA Experiment ID: 20000180 Result: Up-regulated in Transcription
  misc_feature: MA Experiment 20000180 PARAMETER Experiment Name: At_Germinating_Seeds_P Parameter: Age (hr) Value: 24 vs. 0
  misc_feature: MA Experiment 20000180 PARAMETER Experiment Name: At_Germinating_Seeds_P Parameter: Tissue Value: Germinating Seeds
  misc_feature: MA Experiment ID: 20000182 Result: Down-regulated in Transcription
  misc_feature: MA Experiment 20000182 PARAMETER Experiment Name: At_2mM_SA_P Parameter: Age (day) Value: 14
  misc_feature: MA Experiment 20000182 PARAMETER Experiment Name: At_2mM_SA_P Parameter: Organism Value: A. thaliana
  misc_feature: MA Experiment 20000182 PARAMETER Experiment Name: At_2mM_SA_P Parameter: Plant Line Value: WS
  misc_feature: MA Experiment 20000182 PARAMETER Experiment Name: At_2mM_SA_P Parameter: Timepoint (hr) Value: 6
  misc_feature: MA Experiment 20000182 PARAMETER Experiment Name: At_2mM_SA_P Parameter: Tissue Value: Aerial
  misc_feature: MA Experiment 20000182 PARAMETER Experiment Name: At_2mM_SA_P Parameter: Treatment Value: 2mM SA vs. No Treatment
  misc_feature: MA Experiment ID: 20000184 Result: Down-regulated in Transcription
  misc_feature: MA Experiment 20000184 PARAMETER Experiment Name: At_Shoots__P Parameter: Age (day) Value: 7
  misc_feature: MA Experiment 20000184 PARAMETER Experiment Name: At_Shoots__P Parameter: Tissue Value: Shoots vs. Whole Plant
  misc_feature: MA Experiment ID: 20000234 Result: Down-regulated in Transcription
  misc_feature: MA Experiment 20000234 PARAMETER Experiment Name: At_Siliques_P Parameter: Age (day) Value: 21
  misc_feature: MA Experiment 20000234 PARAMETER Experiment Name: At_Siliques_P Parameter: Organism Value: A. thaliana
  misc_feature: MA Experiment 20000234 PARAMETER Experiment Name: At_Siliques_P Parameter: Plant Line Value: WS
  misc_feature: MA Experiment 20000234 PARAMETER Experiment Name: At_Siliques_P Parameter: Tissue Value: Less Than 5mm Siliques vs. Whole Plant
  misc_feature: MA Experiment ID: 20000264 Result: Up-regulated in Transcription
  misc_feature: MA Experiment 20000264 PARAMETER Experiment Name: At_Open_Flower_P Parameter: Age (day) Value: 21
  misc_feature: MA Experiment 20000264 PARAMETER Experiment Name: At_Open_Flower_P Parameter: Plant Line Value: WS
  misc_feature: MA Experiment 20000264 PARAMETER Experiment Name: At_Open_Flower_P Parameter: Tissue Value: Open Flower vs. Whole Plant
  misc_feature: MA Experiment ID: 20000437 Result: Down-regulated in Transcription
  misc_feature: MA Experiment 20000437 PARAMETER Experiment Name: At_Drought_P Parameter: Age (day) Value: 8
  misc_feature: MA Experiment 20000437 PARAMETER Experiment Name: At_Drought_P Parameter: Organism Value: A. thaliana
  misc_feature: MA Experiment 20000437 PARAMETER Experiment Name: At_Drought_P Parameter: Plant Line Value: WS
  misc_feature: MA Experiment 20000437 PARAMETER Experiment Name: At_Drought_P Parameter: Timepoint (hr) Value: 24
  misc_feature: MA Experiment 20000437 PARAMETER Experiment Name: At_Drought_P Parameter: Tissue Value: Whole Plant
  misc_feature: MA Experiment 20000437 PARAMETER Experiment Name: At_Drought_P Parameter: Treatment Value: Drought vs. No Drought
  misc_feature: MA Experiment ID: 20000438 Result: Down-regulated in Transcription
  misc_feature: MA Experiment 20000438 PARAMETER Experiment Name: At_Shoots__P Parameter: Age (day) Value: 14
  misc_feature: MA Experiment 20000438 PARAMETER Experiment Name: At_Shoots__P Parameter: Tissue Value: Shoots vs. Whole Plant
  misc_feature: MA Experiment ID: 20000451 Result: Down-regulated in Transcription
  misc_feature: MA Experiment 20000451 PARAMETER Experiment Name: At_CS6879_Shoots-Roots_P Parameter: Age (day) Value: 14
  misc_feature: MA Experiment 20000451 PARAMETER Experiment Name: At_CS6879_Shoots-Roots_P Parameter: Organism Value: A. thaliana
  misc_feature: MA Experiment 20000451 PARAMETER Experiment Name: At_CS6879_Shoots-Roots_P Parameter: Plant Line Value: CS6879 vs. WS
  misc_feature: MA Experiment 20000451 PARAMETER Experiment Name: At_CS6879_Shoots-Roots_P Parameter: Tissue Value: Roots
  misc_feature: MA Experiment ID: 20000495 Result: Up-regulated in Transcription
  misc_feature: MA Experiment 20000495 PARAMETER Experiment Name: At_Guard_Cells_P Parameter: Harvest Date Value: 8/2/2002
  misc_feature: MA Experiment 20000495 PARAMETER Experiment Name: At_Guard_Cells_P Parameter: Organism Value: A. thaliana
  misc_feature: MA Experiment 20000495 PARAMETER Experiment Name: At_Guard_Cells_P Parameter: Tissue Value: Guard Cells vs. Leaves
  misc_feature: MA Experiment ID: 20000794 Result: Up-regulated in Transcription
  misc_feature: MA Experiment 20000794 PARAMETER Experiment Name: At_Petals_P Parameter: Age (day) Value: 23-25 days
  misc_feature: MA Experiment 20000794 PARAMETER Experiment Name: At_Petals_P Parameter: Plant Line Value: WS
  misc_feature: MA Experiment 20000794 PARAMETER Experiment Name: At_Petals_P Parameter: Tissue Value: Petals vs. Whole plant
  misc_feature: MA Experiment ID: 20001248 Result: Down-regulated in Transcription
  misc_feature: MA Experiment 20001248 PARAMETER Experiment Name: At_Far-red-induction_P Parameter: Age (day) Value: 7
  misc_feature: MA Experiment 20001248 PARAMETER Experiment Name: At_Far-red-induction_P Parameter: Light Value: Far-red vs. White
  misc_feature: MA Experiment 20001248 PARAMETER Experiment Name: At_Far-red-induction_P Parameter: Organism Value: A. thaliana
  misc_feature: MA Experiment 20001248 PARAMETER Experiment Name: At_Far-red-induction_P Parameter: Plant Line Value: Columbia
  misc_feature: MA Experiment 20001248 PARAMETER Experiment Name: At_Far-red-induction_P Parameter: Timepoint (hr) Value: 4
  misc_feature: MA Experiment 20001248 PARAMETER Experiment Name: At_Far-red-induction_P Parameter: Tissue Value: Whole Plant
  misc_feature: MA Experiment ID: 20001555 Result: Down-regulated in Transcription
  misc_feature: MA Experiment 20001555 PARAMETER Experiment Name: At_Drought_Soil_Dry_P Parameter: Age (day) Value: 24
  misc_feature: MA Experiment 20001555 PARAMETER Experiment Name: At_Drought_Soil_Dry_P Parameter: Organism Value: A. thaliana
  misc_feature: MA Experiment 20001555 PARAMETER Experiment Name: At_Drought_Soil_Dry_P Parameter: Plant Line Value: WS
  misc_feature: MA Experiment 20001555 PARAMETER Experiment Name: At_Drought_Soil_Dry_P Parameter: Post Timepoint (hr) Value: None
  misc_feature: MA Experiment 20001555 PARAMETER Experiment Name: At_Drought_Soil_Dry_P Parameter: Post-Treatment Value: None
  misc_feature: MA Experiment 20001555 PARAMETER Experiment Name: At_Drought_Soil_Dry_P Parameter: Timepoint (day) Value: 10
  misc_feature: MA Experiment 20001555 PARAMETER Experiment Name: At_Drought_Soil_Dry_P Parameter: Treatment Value: Drought vs. No Drought
  misc_feature: MA Experiment ID: 20001556 Result: Down-regulated in Transcription
  misc_feature: MA Experiment 20001556 PARAMETER Experiment Name: At_Drought_Soil_Dry_P Parameter: Age (day) Value: 26
  misc_feature: MA Experiment 20001556 PARAMETER Experiment Name: At_Drought_Soil_Dry_P Parameter: Organism Value: A. thaliana
  misc_feature: MA Experiment 20001556 PARAMETER Experiment Name: At_Drought_Soil_Dry_P Parameter: Plant Line Value: WS
  misc_feature: MA Experiment 20001556 PARAMETER Experiment Name: At_Drought_Soil_Dry_P Parameter: Post Timepoint (hr) Value: None
  misc_feature: MA Experiment 20001556 PARAMETER Experiment Name: At_Drought_Soil_Dry_P Parameter: Post-Treatment Value: None
  misc_feature: MA Experiment 20001556 PARAMETER Experiment Name: At_Drought_Soil_Dry_P Parameter: Timepoint (day) Value: 12
  misc_feature: MA Experiment 20001556 PARAMETER Experiment Name: At_Drought_Soil_Dry_P Parameter: Treatment Value: Drought vs. No Drought
  misc_feature: MA Experiment ID: 20001560 Result: Down-regulated in Transcription
  misc_feature: MA Experiment 20001560 PARAMETER Experiment Name: At_Drought_Soil_Dry_P Parameter: Age (day) Value: 28
  misc_feature: MA Experiment 20001560 PARAMETER Experiment Name: At_Drought_Soil_Dry_P Parameter: Organism Value: A. thaliana
  misc_feature: MA Experiment 20001560 PARAMETER Experiment Name: At_Drought_Soil_Dry_P Parameter: Plant Line Value: WS
  misc_feature: MA Experiment 20001560 PARAMETER Experiment Name: At_Drought_Soil_Dry_P Parameter: Post Timepoint (hr) Value: None
  misc_feature: MA Experiment 20001560 PARAMETER Experiment Name: At_Drought_Soil_Dry_P Parameter: Post-Treatment Value: None
  misc_feature: MA Experiment 20001560 PARAMETER Experiment Name: At_Drought_Soil_Dry_P Parameter: Timepoint (day) Value: 14
  misc_feature: MA Experiment 20001560 PARAMETER Experiment Name: At_Drought_Soil_Dry_P Parameter: Treatment Value: Drought vs. No Drought
  misc_feature: MA Experiment ID: 20001757 Result: Down-regulated in Transcription
  misc_feature: MA Experiment 20001757 PARAMETER Experiment Name: At_50mM_NH4NO3_L-to-H_P Parameter: Timepoint (hr) Value: 6
  misc_feature: MA Experiment 20001757 PARAMETER Experiment Name: At_50mM_NH4NO3_L-to-H_P Parameter: Tissue Value: Leaf
  misc_feature: MA Experiment 20001757 PARAMETER Experiment Name: At_50mM_NH4NO3_L-to-H_P Parameter: Treatment Value: 50mM NH4NO3 vs 100mM Mannitol
  misc_feature: MA Experiment ID: 20001905 Result: Down-regulated in Transcription
  misc_feature: MA Experiment 20001905 PARAMETER Experiment Name: At_Drought_Reproduction_P Parameter: Age (day) Value: 40
  misc_feature: MA Experiment 20001905 PARAMETER Experiment Name: At_Drought_Reproduction_P Parameter: Organism Value: A. thaliana
  misc_feature: MA Experiment 20001905 PARAMETER Experiment Name: At_Drought_Reproduction_P Parameter: Plant Line Value: WS
  misc_feature: MA Experiment 20001905 PARAMETER Experiment Name: At_Drought_Reproduction_P Parameter: Timepoint (day) Value: 10
  misc_feature: MA Experiment 20001905 PARAMETER Experiment Name: At_Drought_Reproduction_P Parameter: Tissue Value: Rosettes
  misc_feature: MA Experiment 20001905 PARAMETER Experiment Name: At_Drought_Reproduction_P Parameter: Treatment Value: Drought vs. No Drought
  misc_feature: MA Experiment ID: 20001908 Result: Up-regulated in Transcription
  misc_feature: MA Experiment 20001908 PARAMETER Experiment Name: At_Drought_Reproduction_P Parameter: Age (day) Value: 40
  misc_feature: MA Experiment 20001908 PARAMETER Experiment Name: At_Drought_Reproduction_P Parameter: Organism Value: A. thaliana
  misc_feature: MA Experiment 20001908 PARAMETER Experiment Name: At_Drought_Reproduction_P Parameter: Plant Line Value: WS
  misc_feature: MA Experiment 20001908 PARAMETER Experiment Name: At_Drought_Reproduction_P Parameter: Timepoint (day) Value: 10
  misc_feature: MA Experiment 20001908 PARAMETER Experiment Name: At_Drought_Reproduction_P Parameter: Tissue Value: Siliques
  misc_feature: MA Experiment 20001908 PARAMETER Experiment Name: At_Drought_Reproduction_P Parameter: Treatment Value: Drought vs. No Drought
  misc_feature: MA Experiment ID: 20001911 Result: Down-regulated in Transcription
  misc_feature: MA Experiment 20001911 PARAMETER Experiment Name: At_Drought_Reproduction_P Parameter: Age (day) Value: 40
  misc_feature: MA Experiment 20001911 PARAMETER Experiment Name: At_Drought_Reproduction_P Parameter: Organism Value: A. thaliana
  misc_feature: MA Experiment 20001911 PARAMETER Experiment Name: At_Drought_Reproduction_P Parameter: Plant Line Value: WS
  misc_feature: MA Experiment 20001911 PARAMETER Experiment Name: At_Drought_Reproduction_P Parameter: Timepoint (day) Value: 10
  misc_feature: MA Experiment 20001911 PARAMETER Experiment Name: At_Drought_Reproduction_P Parameter: Tissue Value: Flowers
  misc_feature: MA Experiment 20001911 PARAMETER Experiment Name: At_Drought_Reproduction_P Parameter: Treatment Value: Drought vs. No Drought
aacaactcatatcaattttttaaaaaaaactctccatatatctattacttctacgctaactagagagggagattattgctcttaagtgatggaggaagtaaagaagagggattgtatggagaaggcaaggccattcatttcaatggtagtgttgcaagtagggctagcaggaatggatattctctcaaaggctgttctaaacaaaggcatgagcaattacgtccttgttgtttaccgtcacgccgttgcaaccatcgttatggccccgttcgccttctatttcgacaagaaggtgagaccgaagatgacactgatgatattcttcaagatatcactccttggtttactcgagccagtgatcgaccagaacttatactatctcgggatgaaatatacgacagctacatttgcaaccgccatgtacaacgtcctacccgcaatcactttcgtccttgcctatatatttggcctcgaaagagtaaagctacggtgcattaggagcacgggtaaggtggttggaacattggctactgttggaggagccatgatcatgacacttgtcaaaggcccagttctcgatctgttttggaccaaaggagtctctgcacataacacagctgggaccgacattcatagcgccatcaaaggcgcagtattggtcacgattggttgttttagctatgcatgtttcatgattctccaagcgataacattaaggacttaccctgctgagctctctctcacagcatggatatgtcttatggggacaatagaaggaaccgccgtggcattagtgatggagaaaggaaatcccagcgcatgggccattggttgggacactaaacttcttacagccacctatagtgggatagtgtgctcagcattggcttactacgttggaggagtggtgatgaaaaccagaggtcctgtgtttgtgacagctttcagtcctctttgtatgatcatagtagcgattatgtcgaccatcatctttgctgagcaaatgtaccttggaagggttcttggtgctgtagttatatgtgcaggattataccttgtgatatggggcaaaggaaaagattacaaatataattccacgctgcaattagatgacgaatcagcacaaccaaagctagaactaagcggaaacgggaaggataatgttgatcatgaagtcattactataagcaagcaaggagaacaaagaagaacagctgtagaaacagtctaacttaacggtatcggcacaaatgtttttcatggaggagtaattaacgtatagcagtttcatttgttgtccattatgtttcagagcacaatgtcatagaattgctaactaccatgggagaataataattgtctaattaag

SEQ ID NO: 102384 - protein, 380 aa, Arabidopsis thaliana; identical to SEQ ID NO: 30041
  peptide (1)..(380): Ceres Seq. ID no. 13610121
  misc_feature (196)..(326): Pfam Name: Integral membrane protein DUF6 Pfam Description: Integral membrane protein DUF6
  misc_feature (1)..(380): Homolog of NCBI NO: 15224291 NR Description: nodulin MtN21 family protein [Arabidopsis
  misc_feature (19)..(380): Homolog of NCBI NO: 21553757 NR Description: nodulin-like protein [Arabidopsis thaliana]
  misc_feature (9)..(346): Homolog of NCBI NO: 25408555 NR Description: nodulin-like protein [imported] - Arabidopsis
  misc_feature (14)..(368): Homolog of NCBI NO: 15225480 NR Description: nodulin MtN21 family protein [Arabidopsis
  misc_feature (67)..(346): Homolog of NCBI NO: 18404429 NR Description: nodulin MtN21 family protein [Arabidopsis
  misc_feature (10)..(365): Homolog of NCBI NO: 21593603 NR Description: nodulin-like protein [Arabidopsis thaliana]
  misc_feature (10)..(365): Homolog of NCBI NO: 15236455 NR Description: nodulin MtN21 family protein [Arabidopsis
  misc_feature (1)..(355): Homolog of NCBI NO: 15240683 NR Description: nodulin MtN21 family protein [Arabidopsis
  misc_feature (10)..(365): Homolog of NCBI NO: 26452235 NR Description: putative nodulin [Arabidopsis thaliana]
  misc_feature (7)..(379): Homolog of NCBI NO: 15219123 NR Description: nodulin N21 family protein [Arabidopsis thaliana]

SEQ ID NO: 102385 - protein, 371 aa, Arabidopsis thaliana; identical to SEQ ID NO: 30042
  peptide (1)..(371): Ceres Seq. ID no. 13610122
  misc_feature (187)..(317): Pfam Name: Integral membrane protein DUF6 Pfam Description: Integral membrane protein DUF6
  misc_feature (1)..(371): Homolog of NCBI NO: 15224291 NR Description: nodulin MtN21 family protein [Arabidopsis
  misc_feature (10)..(371): Homolog of NCBI NO: 21553757 NR Description: nodulin-like protein [Arabidopsis thaliana]
  misc_feature (1)..(337): Homolog of NCBI NO: 25408555 NR Description: nodulin-like protein [imported] - Arabidopsis
  misc_feature (5)..(359): Homolog of NCBI NO: 15225480 NR Description: nodulin MtN21 family protein [Arabidopsis
  misc_feature (58)..(337): Homolog of NCBI NO: 18404429 NR Description: nodulin MtN21 family protein [Arabidopsis
  misc_feature (1)..(356): Homolog of NCBI NO: 21593603 NR Description: nodulin-like protein [Arabidopsis thaliana]
  misc_feature (1)..(356): Homolog of NCBI NO: 15236455 NR Description: nodulin MtN21 family protein [Arabidopsis
  misc_feature (1)..(346): Homolog of NCBI NO: 15240683 NR Description: nodulin MtN21 family protein [Arabidopsis
  misc_feature (1)..(356): Homolog of NCBI NO: 26452235 NR Description: putative nodulin [Arabidopsis thaliana]
  misc_feature (1)..(370): Homolog of NCBI NO: 15219123 NR Description: nodulin N21 family protein [Arabidopsis thaliana]

SEQ ID NO: 102386 - protein, 362 aa, Arabidopsis thaliana; identical to SEQ ID NO: 30043
  peptide (1)..(362): Ceres Seq. ID no. 13610123
  misc_feature (178)..(308): Pfam Name: Integral membrane protein DUF6 Pfam Description: Integral membrane protein DUF6
  misc_feature (1)..(362): Homolog of NCBI NO: 15224291 NR Description: nodulin MtN21 family protein [Arabidopsis
  misc_feature (1)..(362): Homolog of NCBI NO: 21553757 NR Description: nodulin-like protein [Arabidopsis thaliana]
  misc_feature (1)..(328): Homolog of NCBI NO: 25408555 NR Description: nodulin-like protein [imported] - Arabidopsis
  misc_feature (1)..(350): Homolog of NCBI NO: 15225480 NR Description: nodulin MtN21 family protein [Arabidopsis
  misc_feature (49)..(328): Homolog of NCBI NO: 18404429 NR Description: nodulin MtN21 family protein [Arabidopsis
  misc_feature (1)..(347): Homolog of NCBI NO: 21593603 NR Description: nodulin-like protein [Arabidopsis thaliana]
  misc_feature (1)..(347): Homolog of NCBI NO: 15236455 NR Description: nodulin MtN21 family protein [Arabidopsis
  misc_feature (1)..(337): Homolog of NCBI NO: 15240683 NR Description: nodulin MtN21 family protein [Arabidopsis
  misc_feature (1)..(347): Homolog of NCBI NO: 26452235 NR Description: putative nodulin [Arabidopsis thaliana]
  misc_feature (1)..(361): Homolog of NCBI NO: 15219123 NR Description: nodulin N21 family protein [Arabidopsis thaliana]

SEQ ID NO: 102387 - DNA, 570 bp, Arabidopsis thaliana
  misc_feature (1)..(570): Ceres Seq. ID no. 13610124
  misc_feature: MA Experiment ID: 108434 Result: Up-regulated in Transcription
  misc_feature: MA Experiment 108434 PARAMETER Experiment Name: At_Root_Tips_cDNA_P Parameter: Tissue Value: Root Tips
  misc_feature: MA Experiment ID: 108488 Result: Down-regulated in Transcription
  misc_feature: MA Experiment ID: 20000093 Result: Down-regulated in Transcription
  misc_feature: MA Experiment 20000093 PARAMETER Experiment Name: At_42deg_Heat_cDNA_P Parameter: Temperature (deg C) Value: 42 vs. 22
  misc_feature: MA Experiment 20000093 PARAMETER Experiment Name: At_42deg_Heat_cDNA_P Parameter: Timepoint (hr) Value: 0.5
  misc_feature: MA Experiment 20000093 PARAMETER Experiment Name: At_42deg_Heat_cDNA_P Parameter: Tissue Value: Aerial
  misc_feature: MA Experiment ID: 20000224 Result: Down-regulated in Transcription
  misc_feature: MA Experiment ID: 20000227 Result: Up-regulated in Transcription
  misc_feature: MA Experiment 20000227 PARAMETER Experiment Name: At_Root-Tips-vs-Tops_P Parameter: Tissue Value: Root Tips vs. Root Tops
  misc_feature: MA Experiment ID: 20000445 Result: Down-regulated in Transcription
  misc_feature: MA Experiment 20000445 PARAMETER Experiment Name: At_100uM_NAA__P Parameter: Age (day) Value: 14
  misc_feature: MA Experiment 20000445 PARAMETER Experiment Name: At_100uM_NAA__P Parameter: Organism Value: A. thaliana
  misc_feature: MA Experiment 20000445 PARAMETER Experiment Name: At_100uM_NAA__P Parameter: Plant Line Value: WS
  misc_feature: MA Experiment 20000445 PARAMETER Experiment Name: At_100uM_NAA__P Parameter: Timepoint (hr) Value: 6
  misc_feature: MA Experiment 20000445 PARAMETER Experiment Name: At_100uM_NAA__P Parameter: Tissue Value: Aerial
  misc_feature: MA Experiment 20000445 PARAMETER Experiment Name: At_100uM_NAA__P Parameter: Treatment Value: 100uM NAA vs. No Treatment
acgcgtctctcaattctcacattctcaaaatcactaaaatcaaactcaattttcatcaaatatctctaatggcgccgaaagcagcggagaagaaaccggcagagaagaaaccagccgggaaagctccggcggagaaactcccaaaggcggagaagaaaatcagcaaagacgccggaggaagcgagaagaagaagaagaaatcgaagaagagcgtcgagacttacaagatctacatcttcaaggttctgaaacaagttcatccagatgttggaatctctgggaaagctatggggattatgaacagtttcatcaatgacatcttcgagaaacttgctcaggaatcgtcaaagctcgctaggtacaataagaagccgacgattacatcgagggagattcaaaccgctgtgagacttgtgttgcctggagaactcgctaaacatgcggtttctgaaggcacgaaggcggttaccaaattcaccagttagggttttcctgtaaatttccggttaagtgtttggtttagactcggtttgtttagatgttttgagtttcgtgaattgtttgatgatc

SEQ ID NO: 102388 - protein, 160 aa, Arabidopsis thaliana; identical to SEQ ID NO: 21871
  peptide (1)..(160): Ceres Seq. ID no. 13610125
  misc_feature (33)..(160): Pfam Name: Core histone H2A/H2B/H3/H4 Pfam Description: Core histone H2A/H2B/H3/H4
  misc_feature (23)..(160): Homolog of NCBI NO: 15224292 NR Description: histone H2B, putative [Arabidopsis thaliana]
  misc_feature (23)..(160): Homolog of NCBI NO: 15231854 NR Description: histone H2B, putative [Arabidopsis thaliana]
  misc_feature (23)..(160): Homolog of NCBI NO: 7635498 NR Description: histone H2B [Cicer arietinum]
  misc_feature (23)..(160): Homolog of NCBI NO: 30024116 NR Description: putative histone H4 [Pinus pinaster]
  misc_feature (23)..(160): Homolog of NCBI NO: 15231313 NR Description: histone H2B, putative [Arabidopsis thaliana]
  misc_feature (26)..(160): Homolog of NCBI NO: 7439754 NR Description: histone H2B-3 - tomato (fragment)
  misc_feature (23)..(160): Homolog of NCBI NO: 7387727 NR Description: Histone H2B (CaH2B) >gi|7439757|pir||T08063 H2B - pepper >gi|2746719|gb|AAB94923.1| histone H2B [Capsicum
  misc_feature (23)..(160): Homolog of NCBI NO: 15238563 NR Description: histone H2B [Arabidopsis thaliana] Histone H2B >gi|9757912|dbj|BAB08359.1| contains similarity to H2B~gene_id:MMN10.15 [Arabidopsis thaliana]
  misc_feature (24)..(160): Homolog of NCBI NO: 7439753 NR Description: histone H2B-2 - tomato (fragment)
  misc_feature (23)..(160): Homolog of NCBI NO: 7439756 NR Description: histone H2B - tomato >gi|3021489|emb|CAA12233.1|

SEQ ID NO: 102389 - protein, 138 aa, Arabidopsis thaliana; identical to SEQ ID NO: 21872
  peptide (1)..(138): Ceres Seq. ID no. 13610126
  misc_feature (11)..(138): Pfam Name: Core histone H2A/H2B/H3/H4 Pfam Description: Core histone H2A/H2B/H3/H4
  misc_feature (1)..(138): Homolog of NCBI NO: 15224292 NR Description: histone H2B, putative [Arabidopsis thaliana]
  misc_feature (1)..(138): Homolog of NCBI NO: 15231854 NR Description: histone H2B, putative [Arabidopsis thaliana]
  misc_feature (1)..(138): Homolog of NCBI NO: 7635498 NR Description: histone H2B [Cicer arietinum]
  misc_feature (1)..(138): Homolog of NCBI NO: 30024116 NR Description: putative histone H4 [Pinus pinaster]
  misc_feature (1)..(138): Homolog of NCBI NO: 15231313 NR Description: histone H2B, putative [Arabidopsis thaliana]
  misc_feature (4)..(138): Homolog of NCBI NO: 7439754 NR Description: histone H2B-3 - tomato (fragment)
  misc_feature (1)..(138): Homolog of NCBI NO: 7387727 NR Description: Histone H2B (CaH2B) >gi|7439757|pir||T08063 H2B - pepper >gi|2746719|gb|AAB94923.1| histone H2B [Capsicum
  misc_feature (1)..(138): Homolog of NCBI NO: 15238563 NR Description: histone H2B [Arabidopsis thaliana] Histone H2B >gi|9757912|dbj|BAB08359.1| contains similarity to H2B~gene_id:MMN10.15 [Arabidopsis thaliana]
  misc_feature (2)..(138): Homolog of NCBI NO: 7439753 NR Description: histone H2B-2 - tomato (fragment)
  misc_feature (1)..(138): Homolog of NCBI NO: 7439756 NR Description: histone H2B - tomato >gi|3021489|emb|CAA12233.1|

SEQ ID NO: 102390 - DNA, 1232 bp, Arabidopsis thaliana
  misc_feature (1)..(1232): Ceres Seq. ID no. 13610130
  misc_feature: MA Experiment ID: 20000184 Result: Down-regulated in Transcription
  misc_feature: MA Experiment 20000184 PARAMETER Experiment Name: At_Shoots__P Parameter: Age (day) Value: 7
  misc_feature: MA Experiment 20000184 PARAMETER Experiment Name: At_Shoots__P Parameter: Tissue Value: Shoots vs. Whole Plant
  misc_feature: MA Experiment ID: 20000185 Result: Down-regulated in Transcription
  misc_feature: MA Experiment 20000185 PARAMETER Experiment Name: At_Roots__P Parameter: Age (day) Value: 7 vs. 21
  misc_feature: MA Experiment 20000185 PARAMETER Experiment Name: At_Roots__P Parameter: Organism Value: A. thaliana
  misc_feature: MA Experiment 20000185 PARAMETER Experiment Name: At_Roots__P Parameter: Tissue Value: Roots vs. Whole Plant
  misc_feature: MA Experiment ID: 20000227 Result: Up-regulated in Transcription
  misc_feature: MA Experiment 20000227 PARAMETER Experiment Name: At_Root-Tips-vs-Tops_P Parameter: Tissue Value: Root Tips vs. Root Tops
  misc_feature: MA Experiment ID: 20000234 Result: Down-regulated in Transcription
  misc_feature: MA Experiment 20000234 PARAMETER Experiment Name: At_Siliques_P Parameter: Age (day) Value: 21
  misc_feature: MA Experiment 20000234 PARAMETER Experiment Name: At_Siliques_P Parameter: Organism Value: A. thaliana
  misc_feature: MA Experiment 20000234 PARAMETER Experiment Name: At_Siliques_P Parameter: Plant Line Value: WS
  misc_feature: MA Experiment 20000234 PARAMETER Experiment Name: At_Siliques_P Parameter: Tissue Value: Less Than 5mm Siliques vs. Whole Plant
  misc_feature: MA Experiment ID: 20000235 Result: Down-regulated in Transcription
  misc_feature: MA Experiment 20000235 PARAMETER Experiment Name: At_Siliques_P Parameter: Age (day) Value: 21
  misc_feature: MA Experiment 20000235 PARAMETER Experiment Name: At_Siliques_P Parameter: Organism Value: A. thaliana
  misc_feature: MA Experiment 20000235 PARAMETER Experiment Name: At_Siliques_P Parameter: Plant Line Value: WS
  misc_feature: MA Experiment 20000235 PARAMETER Experiment Name: At_Siliques_P Parameter: Tissue Value: 5-10mm Siliques vs. Whole Plant
  misc_feature: MA Experiment ID: 20000264 Result: Down-regulated in Transcription
  misc_feature: MA Experiment 20000264 PARAMETER Experiment Name: At_Open_Flower_P Parameter: Age (day) Value: 21
  misc_feature: MA Experiment 20000264 PARAMETER Experiment Name: At_Open_Flower_P Parameter: Plant Line Value: WS
  misc_feature: MA Experiment 20000264 PARAMETER Experiment Name: At_Open_Flower_P Parameter: Tissue Value: Open Flower vs. Whole Plant
  misc_feature: MA Experiment ID: 20000265 Result: Down-regulated in Transcription
  misc_feature: MA Experiment 20000265 PARAMETER Experiment Name: At_Open_Flower_P Parameter: Age (day) Value: 21
  misc_feature: MA Experiment 20000265 PARAMETER Experiment Name: At_Open_Flower_P Parameter: Plant Line Value: WS
  misc_feature: MA Experiment 20000265 PARAMETER Experiment Name: At_Open_Flower_P Parameter: Tissue Value: Closed Flower vs. Whole Plant
  misc_feature: MA Experiment ID: 20000286 Result: Down-regulated in Transcription
  misc_feature: MA Experiment 20000286 PARAMETER Experiment Name: At_Open_Flower_P Parameter: Age (day) Value: 21
  misc_feature: MA Experiment 20000286 PARAMETER Experiment Name: At_Open_Flower_P Parameter: Plant Line Value: WS
  misc_feature: MA Experiment 20000286 PARAMETER Experiment Name: At_Open_Flower_P Parameter: Tissue Value: Half Open vs. Whole Plant
  misc_feature: MA Experiment ID: 20000438 Result: Down-regulated in Transcription
  misc_feature: MA Experiment 20000438 PARAMETER Experiment Name: At_Shoots__P Parameter: Age (day) Value: 14
  misc_feature: MA Experiment 20000438 PARAMETER Experiment Name: At_Shoots__P Parameter: Tissue Value: Shoots vs. Whole Plant
  misc_feature: MA Experiment ID: 20000439 Result: Down-regulated in Transcription
  misc_feature: MA Experiment 20000439 PARAMETER Experiment Name: At_Roots__P Parameter: Age (day) Value: 14 vs. 21
  misc_feature: MA Experiment 20000439 PARAMETER Experiment Name: At_Roots__P Parameter: Organism Value: A. thaliana
  misc_feature: MA Experiment 20000439 PARAMETER Experiment Name: At_Roots__P Parameter: Tissue Value: Roots vs. Whole Plant
  misc_feature: MA Experiment ID: 20000495 Result: Down-regulated in Transcription
  misc_feature: MA Experiment 20000495 PARAMETER Experiment Name: At_Guard_Cells_P Parameter: Harvest Date Value: 8/2/2002
  misc_feature: MA Experiment 20000495 PARAMETER Experiment Name: At_Guard_Cells_P Parameter: Organism Value: A. thaliana
  misc_feature: MA Experiment 20000495 PARAMETER Experiment Name: At_Guard_Cells_P Parameter: Tissue Value: Guard Cells vs. Leaves
  misc_feature: MA Experiment ID: 20000573 Result: Up-regulated in Transcription
  misc_feature: MA Experiment 20000573 PARAMETER Experiment Name: At_100uM_ABA_Mutants__P Parameter: Organism Value: A. thaliana
  misc_feature: MA Experiment 20000573 PARAMETER Experiment Name: At_100uM_ABA_Mutants__P Parameter: Plant Line Value: CS22 vs. Ler wt
  misc_feature: MA Experiment 20000573 PARAMETER Experiment Name: At_100uM_ABA_Mutants__P Parameter: Timepoint (hr) Value: N/A
  misc_feature: MA Experiment 20000573 PARAMETER Experiment Name: At_100uM_ABA_Mutants__P Parameter: Tissue Value: Whole Plant
  misc_feature: MA Experiment 20000573 PARAMETER Experiment Name: At_100uM_ABA_Mutants__P Parameter: Treatment Value: None
  misc_feature: MA Experiment ID: 20000794 Result: Down-regulated in Transcription
  misc_feature: MA Experiment 20000794 PARAMETER Experiment Name: At_Petals_P Parameter: Age (day) Value: 23-25 days
  misc_feature: MA Experiment 20000794 PARAMETER Experiment Name: At_Petals_P Parameter: Plant Line Value: WS
  misc_feature: MA Experiment 20000794 PARAMETER Experiment Name: At_Petals_P Parameter: Tissue Value: Petals vs. Whole plant
  misc_feature: MA Experiment ID: 20001450 Result: Down-regulated in Transcription
  misc_feature: MA Experiment 20001450 PARAMETER Experiment Name: At_Far-red-induction_P Parameter: Age (day) Value: 7
  misc_feature: MA Experiment 20001450 PARAMETER Experiment Name: At_Far-red-induction_P Parameter: Light Value: Far-red vs. White
  misc_feature: MA Experiment 20001450 PARAMETER Experiment Name: At_Far-red-induction_P Parameter: Organism Value: A. thaliana
  misc_feature: MA Experiment 20001450 PARAMETER Experiment Name: At_Far-red-induction_P Parameter: Plant Line Value: Columbia
  misc_feature: MA Experiment 20001450 PARAMETER Experiment Name: At_Far-red-induction_P Parameter: Timepoint (hr) Value: 8
  misc_feature: MA Experiment 20001450 PARAMETER Experiment Name: At_Far-red-induction_P Parameter: Tissue Value: Whole Plant
accatccatccaacttgtaactctctttctctatttcttctccattctgtttgctctgcaacatcttttagggtttattattgttggtttcttcattttctttctctaaaatatttgcagaggaagagagagagagagagagagatcatgggaatatatggagtgatgacagggaaaaaaggaaagagtgggtttggatctgcttctactgctgaagatgttactcaagccattgatgccagtcatctcactgccatcatcacaggtggaacaagtgggattggattggaggcagctagagtgttagcaatgagaggagctcatgtcatcattgccgcaagaaacccaaaagctgctaatgagtctaaagagatgattcttcagatgaaccctaatgctcgcgtcgactatctccagatcgatgtctcttccatcaaatcagtcagatccttcgttgatcagtttcttgcccttaatgttcctctcaacattctcataaacaatgcaggtgttatgttttgtcctttcaagctcaccgaagatgggattgaatcacaattcgcaacaaaccacattggtcattttctgttgacgaatctgcttctggacaaaatgaaaagtaccgcaagagaaagtggagtccaaggaaggattgtgaatctgtcatctattgctcatacttatacttactctgaaggtatcaagttccaaggcatcaatgaccctgctggatattcggagagaagggcttatggacagtccaaactctcaaacttgttgcactccaatgcactctctcgtagactacaggaagaaggtgtgaacatcactataaattcggtgcaccctggtcttgtcaccactaatctctttcgctactccggttttagcatgaaggtcttcagggctatgactttcctcttttggaaaaatatacctcagggagcagcaacaacatgctacgttgcacttcatccagatctcgaaggcgtcaccggaaagtatttcggcgactgtaacatcgttgctccgagcaaatttgctaccaacaattctctcgccgataaactttgggatttcagtgtctttctcatcgattctatctctaaataatctatcatcatcaagacaaattcttagacattcaaaatttatttatccttcttgatattgttacattaatgccatatctttttcaccaccacatatttctttatggaataccataattt

SEQ ID NO: 102391 - protein, 370 aa, Arabidopsis thaliana
  peptide (1)..(370): Ceres Seq. ID no. 13610131
  misc_feature (50)..(370): Homolog of NCBI NO: 15224306 NR Description: short-chain dehydrogenase/reductase family [Arabidopsis thaliana] >gi|7485438|pir||T02520 probable
  misc_feature (50)..(368): Homolog of NCBI NO: 629592 NR Description: hypothetical protein - rape
  misc_feature (50)..(370): Homolog of NCBI NO: 18413950 NR Description: short-chain dehydrogenase/reductase family
  misc_feature (50)..(370): Homolog of NCBI NO: 21554820 NR Description: putativepod-specific dehydrogenase SAC25
  misc_feature (50)..(370): Homolog of NCBI NO: 20260302 NR Description: putative protein [Arabidopsis thaliana]
  misc_feature (154)..(370): Homolog of NCBI NO: 11250521 NR Description: hypothetical protein T22P11.130 - Arabidopsis >gi|7413643|emb|CAB85991.1| putative protein [Arabidopsis
  misc_feature (50)..(177): Homolog of NCBI NO: 11250521 NR Description: hypothetical protein T22P11.130 - Arabidopsis >gi|7413643|emb|CAB85991.1| putative protein [Arabidopsis
  misc_feature (50)..(370): Homolog of NCBI NO: 34895876 NR Description: P0009G03.18 [Oryza sativa (japonica
  misc_feature (58)..(367): Homolog of NCBI NO: 23297050 NR Description: unknown protein [Arabidopsis thaliana]
  misc_feature (58)..(369): Homolog of NCBI NO: 30686197 NR Description: short-chain dehydrogenase/reductase family
TIHPTCNSLSLFLLHSVCSATSFRVYYCWFLHFLSLKYLQRKREREREIMGIYGVMTGKKGKSGFGSASTAEDVTQAIDASHLTAIITGGTSGIGLEAARVLAMRGAHVIIAARNPKAANESKEMILQMNPNARVDYLQIDVSSIKSVRSFVDQFLALNVPLNILINNAGVMFCPFKLTEDGIESQFATNHIGHFLLTNLLLDKMKSTARESGVQGRIVNLSSIAHTYTYSEGIKFQGINDPAGYSERRAYGQSKLSNLLHSNALSRRLQEEGVNITINSVHPGLVTTNLFRYSGFSMKVFRAMTFLFWKNIPQGAATTCYVALHPDLEGVTGKYFGDCNIVAPSKFATNNSLADKLWDFSVFLIDSISK

SEQ ID NO: 102392 - protein, 321 aa, Arabidopsis thaliana
  peptide (1)..(321): Ceres Seq. ID no. 13610132
  misc_feature (1)..(321): Homolog of NCBI NO: 15224306 NR Description: short-chain dehydrogenase/reductase family [Arabidopsis thaliana] >gi|7485438|pir||T02520 probable
  misc_feature (1)..(319): Homolog of NCBI NO: 629592 NR Description: hypothetical protein - rape
  misc_feature (1)..(321): Homolog of NCBI NO: 18413950 NR Description: short-chain dehydrogenase/reductase family
  misc_feature (1)..(321): Homolog of NCBI NO: 21554820 NR Description: putativepod-specific dehydrogenase SAC25
  misc_feature (1)..(321): Homolog of NCBI NO: 20260302 NR Description: putative protein [Arabidopsis thaliana]
  misc_feature (105)..(321): Homolog of NCBI NO: 11250521 NR Description: hypothetical protein T22P11.130 - Arabidopsis >gi|7413643|emb|CAB85991.1| putative protein [Arabidopsis
  misc_feature (1)..(128): Homolog of NCBI NO: 11250521 NR Description: hypothetical protein T22P11.130 - Arabidopsis >gi|7413643|emb|CAB85991.1| putative protein [Arabidopsis
  misc_feature (1)..(321): Homolog of NCBI NO: 34895876 NR Description: P0009G03.18 [Oryza sativa (japonica
  misc_feature (9)..(318): Homolog of NCBI NO: 23297050 NR Description: unknown protein [Arabidopsis thaliana]
  misc_feature (9)..(320): Homolog of NCBI NO: 30686197 NR Description: short-chain dehydrogenase/reductase family
MGIYGVMTGKKGKSGFGSASTAEDVTQAIDASHLTAIITGGTSGIGLEAARVLAMRGAHVIIAARNPKAANESKEMILQMNPNARVDYLQIDVSSIKSVRSFVDQFLALNVPLNILINNAGVMFCPFKLTEDGIESQFATNHIGHFLLTNLLLDKMKSTARESGVQGRIVNLSSIAHTYTYSEGIKFQGINDPAGYSERRAYGQSKLSNLLHSNALSRRLQEEGVNITINSVHPGLVTTNLFRYSGFSMKVFRAMTFLFWKNIPQGAATTCYVALHPDLEGVTGKYFGDCNIVAPSKFATNNSLADKLWDFSVFLIDSISK

SEQ ID NO: 102393 - protein, 315 aa, Arabidopsis thaliana
  peptide (1)..(315): Ceres Seq. ID no. 13610133
  misc_feature (1)..(315): Homolog of NCBI NO: 15224306 NR Description: short-chain dehydrogenase/reductase family [Arabidopsis thaliana] >gi|7485438|pir||T02520 probable
  misc_feature (1)..(313): Homolog of NCBI NO: 629592 NR Description: hypothetical protein - rape
  misc_feature (1)..(315): Homolog of NCBI NO: 18413950 NR Description: short-chain dehydrogenase/reductase family
  misc_feature (1)..(315): Homolog of NCBI NO: 21554820 NR Description: putativepod-specific dehydrogenase SAC25
  misc_feature (1)..(315): Homolog of NCBI NO: 20260302 NR Description: putative protein [Arabidopsis thaliana]
  misc_feature (99)..(315): Homolog of NCBI NO: 11250521 NR Description: hypothetical protein T22P11.130 - Arabidopsis >gi|7413643|emb|CAB85991.1| putative protein [Arabidopsis
  misc_feature (1)..(122): Homolog of NCBI NO: 11250521 NR Description: hypothetical protein T22P11.130 - Arabidopsis >gi|7413643|emb|CAB85991.1| putative protein [Arabidopsis
  misc_feature (1)..(315): Homolog of NCBI NO: 34895876 NR Description: P0009G03.18 [Oryza sativa (japonica
  misc_feature (3)..(312): Homolog of NCBI NO: 23297050 NR Description: unknown protein [Arabidopsis thaliana]
  misc_feature (3)..(314): Homolog of NCBI NO: 30686197 NR Description: short-chain dehydrogenase/reductase family
MTGKKGKSGFGSASTAEDVTQAIDASHLTAIITGGTSGIGLEAARVLAMRGAHVIIAARNPKAANESKEMILQMNPNARVDYLQIDVSSIKSVRSFVDQFLALNVPLNILINNAGVMFCPFKLTEDGIESQFATNHIGHFLLTNLLLDKMKSTARESGVQGRIVNLSSIAHTYTYSEGIKFQGINDPAGYSERRAYGQSKLSNLLHSNALSRRLQEEGVNITINSVHPGLVTTNLFRYSGFSMKVFRAMTFLFWKNIPQGAATTCYVALHPDLEGVTGKYFGDCNIVAPSKFATNNSLADKLWDFSVFLIDSISK

SEQ ID NO: 102394 - DNA, 1158 bp, Arabidopsis thaliana
  misc_feature (1)..(1158): Ceres Seq. ID no. 13610137
  misc_feature: MA Experiment ID: 108434 Result: Up-regulated in Transcription
  misc_feature: MA Experiment 108434 PARAMETER Experiment Name: At_Root_Tips_cDNA_P Parameter: Tissue Value: Root Tips
  misc_feature: MA Experiment ID: 108461 Result: Up-regulated in Transcription
  misc_feature: MA Experiment 108461 PARAMETER Experiment Name: At_Germinating_Seeds_cDNA_P Parameter: Age (day) Value: 1 vs. 0
  misc_feature: MA Experiment 108461 PARAMETER Experiment Name: At_Germinating_Seeds_cDNA_P Parameter: Tissue Value: Germinating Seeds
  misc_feature: MA Experiment ID: 108668 Result: Down-regulated in Transcription
  misc_feature: MA Experiment 108668 PARAMETER Experiment Name: At_2mM_SA_cDNA_P Parameter: Plant Line Value: WS
  misc_feature: MA Experiment 108668 PARAMETER Experiment Name: At_2mM_SA_cDNA_P Parameter: Timepoint (hr) Value: 6
  misc_feature: MA Experiment 108668 PARAMETER Experiment Name: At_2mM_SA_cDNA_P Parameter: Treatment Value: 2mM SA vs. No Treatment
  misc_feature: MA Experiment ID: 20000069 Result: Down-regulated in Transcription
  misc_feature: MA Experiment 20000069 PARAMETER Experiment Name: At_100uM_ABA_Mutants_cDNA_P Parameter: Plant Line Value: CS23
  misc_feature: MA Experiment 20000069 PARAMETER Experiment Name: At_100uM_ABA_Mutants_cDNA_P Parameter: Timepoint (hr) Value: 6
  misc_feature: MA Experiment 20000069 PARAMETER Experiment Name: At_100uM_ABA_Mutants_cDNA_P Parameter: Tissue Value: Aerial
  misc_feature: MA Experiment 20000069 PARAMETER Experiment Name: At_100uM_ABA_Mutants_cDNA_P Parameter: Treatment Value: 100uM ABA vs. No Treatment
  misc_feature: MA Experiment ID: 20000087 Result: Down-regulated in Transcription
  misc_feature: MA Experiment 20000087 PARAMETER Experiment Name: At_100uM_ABA_Mutants_cDNA_P Parameter: Plant Line Value: WS
  misc_feature: MA Experiment 20000087 PARAMETER Experiment Name: At_100uM_ABA_Mutants_cDNA_P Parameter: Timepoint (hr) Value: 6
  misc_feature: MA Experiment 20000087 PARAMETER Experiment Name: At_100uM_ABA_Mutants_cDNA_P Parameter: Tissue Value: Aerial
  misc_feature: MA Experiment 20000087 PARAMETER Experiment Name: At_100uM_ABA_Mutants_cDNA_P Parameter: Treatment Value: 100uM ABA vs. No Treatment
  misc_feature: MA Experiment ID: 20000111 Result: Up-regulated in Transcription
  misc_feature: MA Experiment 20000111 PARAMETER Experiment Name: At_42deg_Heat_cDNA_P Parameter: Temperature (deg C) Value: 42 vs. 22
  misc_feature: MA Experiment 20000111 PARAMETER Experiment Name: At_42deg_Heat_cDNA_P Parameter: Timepoint (hr) Value: 6
  misc_feature: MA Experiment 20000111 PARAMETER Experiment Name: At_42deg_Heat_cDNA_P Parameter: Tissue Value: Aerial
  misc_feature: MA Experiment ID: 20000113 Result: Up-regulated in Transcription
  misc_feature: MA Experiment 20000113 PARAMETER Experiment Name: At_42deg_Heat_cDNA_P Parameter: Temperature (deg C) Value: 42 vs. 22
  misc_feature: MA Experiment 20000113 PARAMETER Experiment Name: At_42deg_Heat_cDNA_P Parameter: Timepoint (hr) Value: 8
  misc_feature: MA Experiment 20000113 PARAMETER Experiment Name: At_42deg_Heat_cDNA_P Parameter: Tissue Value: Aerial
  misc_feature: MA Experiment ID: 20000117 Result: Down-regulated in Transcription
  misc_feature: MA Experiment 20000117 PARAMETER Experiment Name: At_100uM_ABA_Mutants_cDNA_P Parameter: Plant Line Value: Columbia
  misc_feature: MA Experiment 20000117 PARAMETER Experiment Name: At_100uM_ABA_Mutants_cDNA_P Parameter: Timepoint (hr) Value: 6
  misc_feature: MA Experiment 20000117 PARAMETER Experiment Name: At_100uM_ABA_Mutants_cDNA_P Parameter: Tissue Value: Aerial
  misc_feature: MA Experiment 20000117 PARAMETER Experiment Name: At_100uM_ABA_Mutants_cDNA_P Parameter: Treatment Value: 100uM ABA vs. No Treatment
  misc_feature: MA Experiment ID: 20000173 Result: Up-regulated in Transcription
  misc_feature: MA Experiment 20000173 PARAMETER Experiment Name: At_42deg_Heat_P Parameter: Age (day) Value: 14
  misc_feature: MA Experiment 20000173 PARAMETER Experiment Name: At_42deg_Heat_P Parameter: Organism Value: A. thaliana
  misc_feature: MA Experiment 20000173 PARAMETER Experiment Name: At_42deg_Heat_P Parameter: Plant Line Value: WS
  misc_feature: MA Experiment 20000173 PARAMETER Experiment Name: At_42deg_Heat_P Parameter: Temperature (deg C) Value: 42 vs. 22
  misc_feature: MA Experiment 20000173 PARAMETER Experiment Name: At_42deg_Heat_P Parameter: Timepoint (hr) Value: 6
  misc_feature: MA Experiment 20000173 PARAMETER Experiment Name: At_42deg_Heat_P Parameter: Tissue Value: Aerial
  misc_feature: MA Experiment ID: 20000179 Result: Up-regulated in Transcription
  misc_feature: MA Experiment 20000179 PARAMETER Experiment Name: At_Germinating_Seeds_P Parameter: Age (hr) Value: 6 vs. 0
  misc_feature: MA Experiment 20000179 PARAMETER Experiment Name: At_Germinating_Seeds_P Parameter: Tissue Value: Germinating Seeds
  misc_feature: MA Experiment ID: 20000180 Result: Up-regulated in Transcription
  misc_feature: MA Experiment 20000180 PARAMETER Experiment Name: At_Germinating_Seeds_P Parameter: Age (hr) Value: 24 vs. 0
  misc_feature: MA Experiment 20000180 PARAMETER Experiment Name: At_Germinating_Seeds_P Parameter: Tissue Value: Germinating Seeds
  misc_feature: MA Experiment ID: 20000182 Result: Down-regulated in Transcription
  misc_feature: MA Experiment 20000182 PARAMETER Experiment Name: At_2mM_SA_P Parameter: Age (day) Value: 14
  misc_feature: MA Experiment 20000182 PARAMETER Experiment Name: At_2mM_SA_P Parameter: Organism Value: A. thaliana
  misc_feature: MA Experiment 20000182 PARAMETER Experiment Name: At_2mM_SA_P Parameter: Plant Line Value: WS
  misc_feature: MA Experiment 20000182 PARAMETER Experiment Name: At_2mM_SA_P Parameter: Timepoint (hr) Value: 6
  misc_feature: MA Experiment 20000182 PARAMETER Experiment Name: At_2mM_SA_P Parameter: Tissue Value: Aerial
  misc_feature: MA Experiment 20000182 PARAMETER Experiment Name: At_2mM_SA_P Parameter: Treatment Value: 2mM SA vs. No Treatment
  misc_feature: MA Experiment ID: 20000234 Result: Up-regulated in Transcription
  misc_feature: MA Experiment 20000234 PARAMETER Experiment Name: At_Siliques_P Parameter: Age (day) Value: 21
  misc_feature: MA Experiment 20000234 PARAMETER Experiment Name: At_Siliques_P Parameter: Organism Value: A. thaliana
  misc_feature: MA Experiment 20000234 PARAMETER Experiment Name: At_Siliques_P Parameter: Plant Line Value: WS
  misc_feature: MA Experiment 20000234 PARAMETER Experiment Name: At_Siliques_P Parameter: Tissue Value: Less Than 5mm Siliques vs. Whole Plant
  misc_feature: MA Experiment ID: 20000235 Result: Up-regulated in Transcription
  misc_feature: MA Experiment 20000235 PARAMETER Experiment Name: At_Siliques_P Parameter: Age (day) Value: 21
  misc_feature: MA Experiment 20000235 PARAMETER Experiment Name: At_Siliques_P Parameter: Organism Value: A. thaliana
  misc_feature: MA Experiment 20000235 PARAMETER Experiment Name: At_Siliques_P Parameter: Plant Line Value: WS
  misc_feature: MA Experiment 20000235 PARAMETER Experiment Name: At_Siliques_P Parameter: Tissue Value: 5-10mm Siliques vs. Whole Plant
  misc_feature: MA Experiment ID: 20000496 Result: Up-regulated in Transcription
  misc_feature: MA Experiment 20000496 PARAMETER Experiment Name: At_Guard_Cells_P Parameter: Harvest Date Value: 7/19/2002
  misc_feature: MA Experiment 20000496 PARAMETER Experiment Name: At_Guard_Cells_P Parameter: Organism Value: Canola
  misc_feature: MA Experiment 20000496 PARAMETER Experiment Name: At_Guard_Cells_P Parameter: Tissue Value: Guard Cells vs. Leaves
  misc_feature: MA Experiment ID: 20000573 Result: Down-regulated in Transcription
  misc_feature: MA Experiment 20000573 PARAMETER Experiment Name: At_100uM_ABA_Mutants__P Parameter: Organism Value: A. thaliana
  misc_feature: MA Experiment 20000573 PARAMETER Experiment Name: At_100uM_ABA_Mutants__P Parameter: Plant Line Value: CS22 vs. Ler wt
  misc_feature: MA Experiment 20000573 PARAMETER Experiment Name: At_100uM_ABA_Mutants__P Parameter: Timepoint (hr) Value: N/A
  misc_feature: MA Experiment 20000573 PARAMETER Experiment Name: At_100uM_ABA_Mutants__P Parameter: Tissue Value: Whole Plant
  misc_feature: MA Experiment 20000573 PARAMETER Experiment Name: At_100uM_ABA_Mutants__P Parameter: Treatment Value: None
  misc_feature: MA Experiment ID: 20000574 Result: Down-regulated in Transcription
  misc_feature: MA Experiment 20000574 PARAMETER Experiment Name: At_100uM_ABA_Mutants__P Parameter: Organism Value: A. thaliana
  misc_feature: MA Experiment 20000574 PARAMETER Experiment Name: At_100uM_ABA_Mutants__P Parameter: Plant Line Value: CS23 vs. Ler wt
  misc_feature: MA Experiment 20000574 PARAMETER Experiment Name: At_100uM_ABA_Mutants__P Parameter: Timepoint (hr) Value: N/A
  misc_feature: MA Experiment 20000574 PARAMETER Experiment Name: At_100uM_ABA_Mutants__P Parameter: Tissue Value: Whole Plant
  misc_feature: MA Experiment 20000574 PARAMETER Experiment Name: At_100uM_ABA_Mutants__P Parameter: Treatment Value: None
  misc_feature: MA Experiment ID: 20001555 Result: Up-regulated in Transcription
  misc_feature: MA Experiment 20001555 PARAMETER Experiment Name: At_Drought_Soil_Dry_P Parameter: Age (day) Value: 24
  misc_feature: MA Experiment 20001555 PARAMETER Experiment Name: At_Drought_Soil_Dry_P Parameter: Organism Value: A. thaliana
  misc_feature: MA Experiment 20001555 PARAMETER Experiment Name: At_Drought_Soil_Dry_P Parameter: Plant Line Value: WS
  misc_feature: MA Experiment 20001555 PARAMETER Experiment Name: At_Drought_Soil_Dry_P Parameter: Post Timepoint (hr) Value: None
  misc_feature: MA Experiment 20001555 PARAMETER Experiment Name: At_Drought_Soil_Dry_P Parameter: Post-Treatment Value: None
  misc_feature: MA Experiment 20001555 PARAMETER Experiment Name: At_Drought_Soil_Dry_P Parameter: Timepoint (day) Value: 10
  misc_feature: MA Experiment 20001555 PARAMETER Experiment Name: At_Drought_Soil_Dry_P Parameter: Treatment Value: Drought vs. No Drought
  misc_feature: MA Experiment ID: 20001556 Result: Up-regulated in Transcription
  misc_feature: MA Experiment 20001556 PARAMETER Experiment Name: At_Drought_Soil_Dry_P Parameter: Age (day) Value: 26
  misc_feature: MA Experiment 20001556 PARAMETER Experiment Name: At_Drought_Soil_Dry_P Parameter: Organism Value: A. thaliana
  misc_feature: MA Experiment 20001556 PARAMETER Experiment Name: At_Drought_Soil_Dry_P Parameter: Plant Line Value: WS
  misc_feature: MA Experiment 20001556 PARAMETER Experiment Name: At_Drought_Soil_Dry_P Parameter: Post Timepoint (hr) Value: None
  misc_feature: MA Experiment 20001556 PARAMETER Experiment Name: At_Drought_Soil_Dry_P Parameter: Post-Treatment Value: None
  misc_feature: MA Experiment 20001556 PARAMETER Experiment Name: At_Drought_Soil_Dry_P Parameter: Timepoint (day) Value: 12
  misc_feature: MA Experiment 20001556 PARAMETER Experiment Name: At_Drought_Soil_Dry_P Parameter: Treatment Value: Drought vs. No Drought
  misc_feature: MA Experiment ID: 20001558 Result: Up-regulated in Transcription
  misc_feature: MA Experiment 20001558 PARAMETER Experiment Name: At_Drought_Soil_Dry_P Parameter: Age (day) Value: 27
  misc_feature: MA Experiment 20001558 PARAMETER Experiment Name: At_Drought_Soil_Dry_P Parameter: Organism Value: A. thaliana
  misc_feature: MA Experiment 20001558 PARAMETER Experiment Name: At_Drought_Soil_Dry_P Parameter: Plant Line Value: WS
  misc_feature: MA Experiment 20001558 PARAMETER Experiment Name: At_Drought_Soil_Dry_P Parameter: Post Timepoint (hr) Value: 6
  misc_feature: MA Experiment 20001558 PARAMETER Experiment Name: At_Drought_Soil_Dry_P Parameter: Post-Treatment Value: Re-Water vs. No Drought
  misc_feature: MA Experiment 20001558 PARAMETER Experiment Name: At_Drought_Soil_Dry_P Parameter: Timepoint (day) Value: 13
  misc_feature: MA Experiment 20001558 PARAMETER Experiment Name: At_Drought_Soil_Dry_P Parameter: Treatment Value: Drought vs. No Drought
ctcagtgtcggctaatcagaggatcagtctcagtgttgatttcaggtgataaatctctttgctttgacaatggcagaggaaattagattctttgaactcaacaccggagcgaagataccatccgtcggtctaggaacgtggcaggccgatcctggtctcgtcggaaacgctgtcgacgctgctgtgaagattggttatcgtcacattgattgtgctcaaatctatggcaatgaaaaagagattgggttagtcctgaagaaattgtttgatggtggagttgttaagcgtgaggaaatgttcatcacatccaaactatggtgtacttatcatgatcctcaagaagtgcctgaggcacttaatagaactctacaggatctgcagcttgactacgtcgatctgtatctcattcactggcctgttagcctcaagaaaggatctactggctttaaaccagagaacattttgccaactgatattcctagcacatggaaagcaatggaatcactctttgattcaggcaaggcccgtgctattggtgtaagtaatttctcctcaaagaaactcgcagatctcttggtggtggctcgtgttcctcccgctgttaaccaggtggagtgtcacccttcatggcaacaaaacgtgctcagggatttctgcaaatctaaaggcgttcatctctcagggtactctcctttgggttctccaggaacaacgtggctaacgagcgatgttttgaagaaccctattcttggtggtgttgctgagaagctcggcaagactcctgcacaggttgcattacgctggggtctccaaatgggtcaaagtgttcttccaaaaagcacccatgaagacaggatcaaacagaatttcgatgttttcaactggtccatacccgaagacatgttatccaagttttctgagattggacagggtaggttggtgcgaggcatgtcatttgttcatgagacgagtccatataagagtcttgaagaactctgggacggtgagatatgagactcagctgatttgattgtcatagatttgtcattagtaatgcacgttgtttcattacaaaggtacaacattttacttataaactccctccagcagttccacgtgaaaagacattaatgttctaattatactgaattgatgatc

SEQ ID NO: 102395 - protein, 314 aa, Arabidopsis thaliana
  peptide (1)..(314): Ceres Seq. ID no. 13610138
  misc_feature (1)..(314): Homolog of NCBI NO: 30687261 NR Description: aldo/keto reductase family [Arabidopsis thaliana]
  misc_feature (1)..(287): Homolog of NCBI NO: 25283479 NR Description: probable alcohol dehydrogenase [imported] -
  misc_feature (287)..(314): Homolog of NCBI NO: 25283479 NR Description: probable alcohol dehydrogenase [imported] -
  misc_feature (1)..(314): Homolog of NCBI NO: 30687247 NR Description: aldo/keto reductase family [Arabidopsis thaliana]
  misc_feature (12)..(314): Homolog of NCBI NO: 28393400 NR Description: putative aldo/keto reductase [Arabidopsis
  misc_feature (1)..(314): Homolog of NCBI NO: 15232354 NR Description: aldo/keto reductase family [Arabidopsis thaliana]
  misc_feature (1)..(289): Homolog of NCBI NO: 7431114 NR Description: aldehyde dehydrogenase homolog At2g37770 - thaliana >gi|3236259|gb|AAC23647.1| putative alcohol
  misc_feature (1)..(314): Homolog of NCBI NO: 13160397 NR Description: aldose reductase [Digitalis purpurea]
  misc_feature (1)..(314): Homolog of NCBI NO: 13160399 NR Description: aldose reductase [Digitalis purpurea]
  misc_feature (6)..(314): Homolog of NCBI NO: 34908280 NR Description: putative aldose reductase [Oryza sativa (japonica group)] >gi|15408884|dbj|BAB64275.1| putative aldose reductase
MAEEIRFFELNTGAKIPSVGLGTWQADPGLVGNAVDAAVKIGYRHIDCAQIYGNEKEIGLVLKKLFDGGVVKREEMFITSKLWCTYHDPQEVPEALNRTLQDLQLDYVDLYLIHWPVSLKKGSTGFKPENILPTDIPSTWKAMESLFDSGKARAIGVSNFSSKKLADLLVVARVPPAVNQVECHPSWQQNVLRDFCKSKGVHLSGYSPLGSPGTTWLTSDVLKNPILGGVAEKLGKTPAQVALRWGLQMGQSVLPKSTHEDRIKQNFDVFNWSIPEDMLSKFSEIGQGRLVRGMSFVHETSPYKSLEELWDGEI

SEQ ID NO: 102396 - protein, 239 aa, Arabidopsis thaliana
  peptide (1)..(239): Ceres Seq. ID no. 13610139
  misc_feature (1)..(239): Homolog of NCBI NO: 30687261 NR Description: aldo/keto reductase family [Arabidopsis thaliana]
  misc_feature (1)..(212): Homolog of NCBI NO: 25283479 NR Description: probable alcohol dehydrogenase [imported] -
  misc_feature (212)..(239): Homolog of NCBI NO: 25283479 NR Description: probable alcohol dehydrogenase [imported] -
  misc_feature (1)..(239): Homolog of NCBI NO: 30687247 NR Description: aldo/keto reductase family [Arabidopsis thaliana]
  misc_feature (1)..(239): Homolog of NCBI NO: 28393400 NR Description: putative aldo/keto reductase [Arabidopsis
  misc_feature (1)..(239): Homolog of NCBI NO: 15232354 NR Description: aldo/keto reductase family [Arabidopsis thaliana]
  misc_feature (1)..(214): Homolog of NCBI NO: 7431114 NR Description: aldehyde dehydrogenase homolog At2g37770 - thaliana >gi|3236259|gb|AAC23647.1| putative alcohol
  misc_feature (1)..(239): Homolog of NCBI NO: 13160397 NR Description: aldose reductase [Digitalis purpurea]
  misc_feature (1)..(239): Homolog of NCBI NO: 13160399 NR Description: aldose reductase [Digitalis purpurea]
  misc_feature (1)..(239): Homolog of NCBI NO: 34908280 NR Description: putative aldose reductase [Oryza sativa (japonica group)] >gi|15408884|dbj|BAB64275.1| putative aldose reductase
MFITSKLWCTYHDPQEVPEALNRTLQDLQLDYVDLYLIHWPVSLKKGSTGFKPENILPTDIPSTWKAMESLFDSGKARAIGVSNFSSKKLADLLVVARVPPAVNQVECHPSWQQNVLRDFCKSKGVHLSGYSPLGSPGTTWLTSDVLKNPILGGVAEKLGKTPAQVALRWGLQMGQSVLPKSTHEDRIKQNFDVFNWSIPEDMLSKFSEIGQGRLVRGMSFVHETSPYKSLEELWDGEI

SEQ ID NO: 102397 - protein, 172 aa, Arabidopsis thaliana
  peptide (1)..(172): Ceres Seq. ID no. 13610140
  misc_feature (1)..(172): Homolog of NCBI NO: 30687261 NR Description: aldo/keto reductase family [Arabidopsis thaliana]
  misc_feature (1)..(145): Homolog of NCBI NO: 25283479 NR Description: probable alcohol dehydrogenase [imported] -
  misc_feature (145)..(172): Homolog of NCBI NO: 25283479 NR Description: probable alcohol dehydrogenase [imported] -
  misc_feature (1)..(172): Homolog of NCBI NO: 30687247 NR Description: aldo/keto reductase family [Arabidopsis thaliana]
  misc_feature (1)..(172): Homolog of NCBI NO: 28393400 NR Description: putative aldo/keto reductase [Arabidopsis
  misc_feature (1)..(172): Homolog of NCBI NO: 15232354 NR Description: aldo/keto reductase family [Arabidopsis thaliana]
  misc_feature (1)..(147): Homolog of NCBI NO: 7431114 NR Description: aldehyde dehydrogenase homolog At2g37770 - thaliana >gi|3236259|gb|AAC23647.1| putative alcohol
  misc_feature (1)..(172): Homolog of NCBI NO: 13160397 NR Description: aldose reductase [Digitalis purpurea]
  misc_feature (1)..(172): Homolog of NCBI NO: 13160399 NR Description: aldose reductase [Digitalis purpurea]
  misc_feature (1)..(172): Homolog of NCBI NO: 34908280 NR Description: putative aldose reductase [Oryza sativa (japonica group)] >gi|15408884|dbj|BAB64275.1| putative aldose reductase
MESLFDSGKARAIGVSNFSSKKLADLLVVARVPPAVNQVECHPSWQQNVLRDFCKSKGVHLSGYSPLGSPGTTWLTSDVLKNPILGGVAEKLGKTPAQVALRWGLQMGQSVLPKSTHEDRIKQNFDVFNWSIPEDMLSKFSEIGQGRLVRGMSFVHETSPYKSLEELWDGEI

SEQ ID NO: 102398 - DNA, 1197 bp, Arabidopsis thaliana
  misc_feature (1)..(1197): Ceres Seq. ID no. 13610149
  misc_feature: MA Experiment ID: 108434 Result: Up-regulated in Transcription
  misc_feature: MA Experiment 108434 PARAMETER Experiment Name: At_Root_Tips_cDNA_P Parameter: Tissue Value: Root Tips
  misc_feature: MA Experiment ID: 108462 Result: Down-regulated in Transcription
  misc_feature: MA Experiment 108462 PARAMETER Experiment Name: At_Germinating_Seeds_cDNA_P Parameter: Age (day) Value: 2 vs. 0
  misc_feature: MA Experiment 108462 PARAMETER Experiment Name: At_Germinating_Seeds_cDNA_P Parameter: Tissue Value: Germinating Seeds
  misc_feature: MA Experiment ID: 108463 Result: Down-regulated in Transcription
  misc_feature: MA Experiment 108463 PARAMETER Experiment Name: At_Germinating_Seeds_cDNA_P Parameter: Age (day) Value: 3 vs. 0
  misc_feature: MA Experiment 108463 PARAMETER Experiment Name: At_Germinating_Seeds_cDNA_P Parameter: Tissue Value: Germinating Seeds
  misc_feature: MA Experiment ID: 108464 Result: Down-regulated in Transcription
  misc_feature: MA Experiment 108464 PARAMETER Experiment Name: At_Germinating_Seeds_cDNA_P Parameter: Age (day) Value: 4 vs. 0
  misc_feature: MA Experiment 108464 PARAMETER Experiment Name: At_Germinating_Seeds_cDNA_P Parameter: Tissue Value: Germinating Seeds
  misc_feature: MA Experiment ID: 108569 Result: Down-regulated in Transcription
  misc_feature: MA Experiment 108569 PARAMETER Experiment Name: At_0.001%_MeJA__cDNA_P Parameter: Timepoint (hr) Value: 6
  misc_feature: MA Experiment 108569 PARAMETER Experiment Name: At_0.001%_MeJA__cDNA_P Parameter: Tissue Value: Aerial
  misc_feature: MA Experiment 108569 PARAMETER Experiment Name: At_0.001%_MeJA__cDNA_P Parameter: Treatment Value: 0.001% MeJA vs. No Treatment
  misc_feature: MA Experiment ID: 108572 Result: Down-regulated in Transcription
  misc_feature: MA Experiment 108572 PARAMETER Experiment Name: At_Drought_cDNA_P Parameter: Timepoint (hr) Value: 1
  misc_feature: MA Experiment 108572 PARAMETER Experiment Name: At_Drought_cDNA_P Parameter: Tissue Value: Aerial
  misc_feature: MA Experiment 108572 PARAMETER Experiment Name: At_Drought_cDNA_P Parameter: Treatment Value: Drought vs. No Drought
  misc_feature: MA Experiment ID: 108573 Result: Down-regulated in Transcription
  misc_feature: MA Experiment 108573 PARAMETER Experiment Name: At_Drought_cDNA_P Parameter: Timepoint (hr) Value: 6
  misc_feature: MA Experiment 108573 PARAMETER Experiment Name: At_Drought_cDNA_P Parameter: Tissue Value: Aerial
  misc_feature: MA Experiment 108573 PARAMETER Experiment Name: At_Drought_cDNA_P Parameter: Treatment Value: Drought vs. No Drought
  misc_feature: MA Experiment ID: 20000090 Result: Up-regulated in Transcription
  misc_feature: MA Experiment ID: 20000180 Result: Down-regulated in Transcription
  misc_feature: MA Experiment 20000180 PARAMETER Experiment Name: At_Germinating_Seeds_P Parameter: Age (hr) Value: 24 vs. 0
  misc_feature: MA Experiment 20000180 PARAMETER Experiment Name: At_Germinating_Seeds_P Parameter: Tissue Value: Germinating Seeds
  misc_feature: MA Experiment ID: 20000184 Result: Down-regulated in Transcription
  misc_feature: MA Experiment 20000184 PARAMETER Experiment Name: At_Shoots__P Parameter: Age (day) Value: 7
  misc_feature: MA Experiment 20000184 PARAMETER Experiment Name: At_Shoots__P Parameter: Tissue Value: Shoots vs. Whole Plant
  misc_feature: MA Experiment ID: 20000224 Result: Up-regulated in Transcription
  misc_feature: MA Experiment ID: 20000227 Result: Up-regulated in Transcription
  misc_feature: MA Experiment 20000227 PARAMETER Experiment Name: At_Root-Tips-vs-Tops_P Parameter: Tissue Value: Root Tips vs. Root Tops
  misc_feature: MA Experiment ID: 20000438 Result: Down-regulated in Transcription
  misc_feature: MA Experiment 20000438 PARAMETER Experiment Name: At_Shoots__P Parameter: Age (day) Value: 14
  misc_feature: MA Experiment 20000438 PARAMETER Experiment Name: At_Shoots__P Parameter: Tissue Value: Shoots vs. Whole Plant
  misc_feature: MA Experiment ID: 20001247 Result: Down-regulated in Transcription
  misc_feature: MA Experiment 20001247 PARAMETER Experiment Name: At_Far-red-induction_P Parameter: Age (day) Value: 7
  misc_feature: MA Experiment 20001247 PARAMETER Experiment Name: At_Far-red-induction_P Parameter: Light Value: Far-red vs. White
  misc_feature: MA Experiment 20001247 PARAMETER Experiment Name: At_Far-red-induction_P Parameter: Organism Value: A. thaliana
  misc_feature: MA Experiment 20001247 PARAMETER Experiment Name: At_Far-red-induction_P Parameter: Plant Line Value: Columbia
  misc_feature: MA Experiment 20001247 PARAMETER Experiment Name: At_Far-red-induction_P Parameter: Timepoint (hr) Value: 1
  misc_feature: MA Experiment 20001247 PARAMETER Experiment Name: At_Far-red-induction_P Parameter: Tissue Value: Whole Plant
  misc_feature: MA Experiment ID: 20001451 Result: Down-regulated in Transcription
  misc_feature: MA Experiment 20001451 PARAMETER Experiment Name: At_Far-red-induction_P Parameter: Age (day) Value: 7
  misc_feature: MA Experiment 20001451 PARAMETER Experiment Name: At_Far-red-induction_P Parameter: Light Value: Far-red vs. White
  misc_feature: MA Experiment 20001451 PARAMETER Experiment Name: At_Far-red-induction_P Parameter: Organism Value: A. thaliana
  misc_feature: MA Experiment 20001451 PARAMETER Experiment Name: At_Far-red-induction_P Parameter: Plant Line Value: Columbia
  misc_feature: MA Experiment 20001451 PARAMETER Experiment Name: At_Far-red-induction_P Parameter: Timepoint (hr) Value: 24
  misc_feature: MA Experiment 20001451 PARAMETER Experiment Name: At_Far-red-induction_P Parameter: Tissue Value: Whole Plant
  misc_feature: MA Experiment ID: 20001557 Result: Up-regulated in Transcription
  misc_feature: MA Experiment 20001557 PARAMETER Experiment Name: At_Drought_Soil_Dry_P Parameter: Age (day) Value: 27
  misc_feature: MA Experiment 20001557 PARAMETER Experiment Name: At_Drought_Soil_Dry_P Parameter: Organism Value: A. thaliana
  misc_feature: MA Experiment 20001557 PARAMETER Experiment Name: At_Drought_Soil_Dry_P Parameter: Plant Line Value: WS
  misc_feature: MA Experiment 20001557 PARAMETER Experiment Name: At_Drought_Soil_Dry_P Parameter: Post Timepoint (hr) Value: 3
  misc_feature: MA Experiment 20001557 PARAMETER Experiment Name: At_Drought_Soil_Dry_P Parameter: Post-Treatment Value: Re-Water vs. No Drought
  misc_feature: MA Experiment 20001557 PARAMETER Experiment Name: At_Drought_Soil_Dry_P Parameter: Timepoint (day) Value: 13
  misc_feature: MA Experiment 20001557 PARAMETER Experiment Name: At_Drought_Soil_Dry_P Parameter: Treatment Value: Drought vs. No Drought
  misc_feature: MA Experiment ID: 20001558 Result: Up-regulated in Transcription
  misc_feature: MA Experiment 20001558 PARAMETER Experiment Name: At_Drought_Soil_Dry_P Parameter: Age (day) Value: 27
  misc_feature: MA Experiment 20001558 PARAMETER Experiment Name: At_Drought_Soil_Dry_P Parameter: Organism Value: A. thaliana
  misc_feature: MA Experiment 20001558 PARAMETER Experiment Name: At_Drought_Soil_Dry_P Parameter: Plant Line Value: WS
  misc_feature: MA Experiment 20001558 PARAMETER Experiment Name: At_Drought_Soil_Dry_P Parameter: Post Timepoint (hr) Value: 6
  misc_feature: MA Experiment 20001558 PARAMETER Experiment Name: At_Drought_Soil_Dry_P Parameter: Post-Treatment Value: Re-Water vs. No Drought
  misc_feature: MA Experiment 20001558 PARAMETER Experiment Name: At_Drought_Soil_Dry_P Parameter: Timepoint (day) Value: 13
  misc_feature: MA Experiment 20001558 PARAMETER Experiment Name: At_Drought_Soil_Dry_P Parameter: Treatment Value: Drought vs. No Drought
aaaaaattttcattcttcctccactctctcaattccaaaacactgcgccgggaagacatggacaccgagatggagacagaacaaatataccaggtcgatgtcggaaatctcttggctttcaatcccaatcaccgcttcccatctgctccttcttcaaggggggagcttgtgaaggagatcctaacggagggaacaaaacttgttcaggaaatagccaataaacttttcaactttccttctactgaaacaaatgatggtcctattgtccaattgcctccgcctacaaccaaacttcctagagagaaacatattccaaggcctaagcctcctacgaagtgggaagagtttgcgcttaagaaaggtatacagaagcgcaagaaggaaaaagttgtatgggatgaacaaactaatcagtttaagcgtcgccatggttatgaccgtgttaacgatgataatgatgttcccatcattgaggcgaaagaatcagatgaaccaggagtagatccttttgccaagagactagatgataagaagaagagagttggaaagcaagaaaagaatagacttcagaatctgaaggctgctgaaaaagctggtgctttaccaagccatgtccaacttgctgcaacatcattgcccatatcaggaacgaaagctcaaccaaagaaaattggaaaggatgaacttggagatgtagcaggtttagccgctacttcaaccgctagtggtggaaaattcgataaaaagttgcctggagaaaaacctccaaagaagcagggcaaacatcacaagtatttaccggttgtatcagggcgtggggatgttaacgcagaaaaagaacagacaaataatgtactcagcaagatattctcaaagcattcgcatgagatcctcaatgttggcaaggcgataaacatgtacaacgtcaagaaggagaagaagaagtcaggaaggtcagacaagttgaaacctaagaaggacatcaccaagaagcctgccaacaaagccaagtgaagagactctcccatgtctaatttactcttctatctgtctccatcttctatcacaaaacaaattttgggttgctctgttaaagtaatactttatgagtacgtttattttaatcttattgacttcatattttgcaccataaaacaatttaaagctcgcaaggtctagaaatccagtttgattttc

SEQ ID NO: 102399 - protein, 337 aa, Arabidopsis thaliana
  peptide (1)..(337): Ceres Seq. ID no. 13610150
  misc_feature (20)..(196): Pfam Name: Ribosome biogenesis regulatory protein (RRS1) Pfam Description: Ribosome biogenesis regulatory protein (RRS1)
  misc_feature (20)..(337): Homolog of NCBI NO: 18404610 NR Description: expressed protein [Arabidopsis thaliana]
  misc_feature (20)..(337): Homolog of NCBI NO: 21593609 NR Description: unknown [Arabidopsis thaliana]
  misc_feature (164)..(337): Homolog of NCBI NO: 21362906 NR Description: Ribosome biogenesis regulatory protein homolog
  misc_feature (20)..(177): Homolog of NCBI NO: 21362906 NR Description: Ribosome biogenesis regulatory protein homolog
  misc_feature (31)..(337): Homolog of NCBI NO: 33585885 NR Description: Ribosome biogenesis regulatory protein homolog
  misc_feature (12)..(337): Homolog of NCBI NO: 27713790 NR Description: similar to regulator for ribosome resistance DNA segment, Chr 1, ERATO Doi 701, expressed [Mus musculus]
  misc_feature (12)..(337): Homolog of NCBI NO: 434779 NR Description: KIAA0112 [Homo sapiens]
  misc_feature (12)..(337): Homolog of NCBI NO: 14719402 NR Description: homolog of yeast ribosome biogenesis regulatory RRS1; homolog of yeast ribosome biogenesis regulator; ribosome
  misc_feature (12)..(337): Homolog of NCBI NO: 21362904 NR Description: Ribosome biogenesis regulatory protein homolog unnamed protein product [Mus musculus]
  misc_feature (12)..(337): Homolog of NCBI NO: 12860310 NR Description: unnamed protein product [Mus musculus]
KKFSFFLHSLNSKTLRREDMDTEMETEQIYQVDVGNLLAFNPNHRFPSAPSSRGELVKEILTEGTKLVQEIANKLFNFPSTETNDGPIVQLPPPTTKLPREKHIPRPKPPTKWEEFALKKGIQKRKKEKVVWDEQTNQFKRRHGYDRVNDDNDVPIIEAKESDEPGVDPFAKRLDDKKKRVGKQEKNRLQNLKAAEKAGALPSHVQLAATSLPISGTKAQPKKIGKDELGDVAGLAATSTASGGKFDKKLPGEKPPKKQGKHHKYLPVVSGRGDVNAEKEQTNNVLSKIFSKHSHEILNVGKAINMYNVKKEKKKSGRSDKLKPKKDITKKPANKAK

SEQ ID NO: 102400 - protein, 318 aa, Arabidopsis thaliana
  peptide (1)..(318): Ceres Seq. ID no. 13610151
  misc_feature (1)..(177): Pfam Name: Ribosome biogenesis regulatory protein (RRS1) Pfam Description: Ribosome biogenesis regulatory protein (RRS1)
  misc_feature (1)..(318): Homolog of NCBI NO: 18404610 NR Description: expressed protein [Arabidopsis thaliana]
  misc_feature (1)..(318): Homolog of NCBI NO: 21593609 NR Description: unknown [Arabidopsis thaliana]
  misc_feature (145)..(318): Homolog of NCBI NO: 21362906 NR Description: Ribosome biogenesis regulatory protein homolog
  misc_feature (1)..(158): Homolog of NCBI NO: 21362906 NR Description: Ribosome biogenesis regulatory protein homolog
  misc_feature (12)..(318): Homolog of NCBI NO: 33585885 NR Description: Ribosome biogenesis regulatory protein homolog
  misc_feature (1)..(318): Homolog of NCBI NO: 27713790 NR Description: similar to regulator for ribosome resistance DNA segment, Chr 1, ERATO Doi 701, expressed [Mus musculus]
  misc_feature (1)..(318): Homolog of NCBI NO: 434779 NR Description: KIAA0112 [Homo sapiens]
  misc_feature (1)..(318): Homolog of NCBI NO: 14719402 NR Description: homolog of yeast ribosome biogenesis regulatory RRS1; homolog of yeast ribosome biogenesis regulator; ribosome
  misc_feature (1)..(318): Homolog of NCBI NO: 21362904 NR Description: Ribosome biogenesis regulatory protein homolog unnamed protein product [Mus musculus]
  misc_feature (1)..(318): Homolog of NCBI NO: 12860310 NR Description: unnamed protein product [Mus musculus]
MDTEMETEQIYQVDVGNLLAFNPNHRFPSAPSSRGELVKEILTEGTKLVQEIANKLFNFPSTETNDGPIVQLPPPTTKLPREKHIPRPKPPTKWEEFALKKGIQKRKKEKVVWDEQTNQFKRRHGYDRVNDDNDVPIIEAKESDEPGVDPFAKRLDDKKKRVGKQEKNRLQNLKAAEKAGALPSHVQLAATSLPISGTKAQPKKIGKDELGDVAGLAATSTASGGKFDKKLPGEKPPKKQGKHHKYLPVVSGRGDVNAEKEQTNNVLSKIFSKHSHEILNVGKAINMYNVKKEKKKSGRSDKLKPKKDITKKPANKAK

SEQ ID NO: 102401 - protein, 314 aa, Arabidopsis thaliana
  peptide (1)..(314): Ceres Seq. ID no. 13610152
  misc_feature (1)..(173): Pfam Name: Ribosome biogenesis regulatory protein (RRS1) Pfam Description: Ribosome biogenesis regulatory protein (RRS1)
  misc_feature (1)..(314): Homolog of NCBI NO: 18404610 NR Description: expressed protein [Arabidopsis thaliana]
  misc_feature (1)..(314): Homolog of NCBI NO: 21593609 NR Description: unknown [Arabidopsis thaliana]
  misc_feature (141)..(314): Homolog of NCBI NO: 21362906 NR Description: Ribosome biogenesis regulatory protein homolog
  misc_feature (1)..(154): Homolog of NCBI NO: 21362906 NR Description: Ribosome biogenesis regulatory protein homolog
  misc_feature (8)..(314): Homolog of NCBI NO: 33585885 NR Description: Ribosome biogenesis regulatory protein homolog
  misc_feature (1)..(314): Homolog of NCBI NO: 27713790 NR Description: similar to regulator for ribosome resistance DNA segment, Chr 1, ERATO Doi 701, expressed [Mus musculus]
  misc_feature (1)..(314): Homolog of NCBI NO: 434779 NR Description: KIAA0112 [Homo sapiens]
  misc_feature (1)..(314): Homolog of NCBI NO: 14719402 NR Description: homolog of yeast ribosome biogenesis regulatory RRS1; homolog of yeast ribosome biogenesis regulator; ribosome
  misc_feature (1)..(314): Homolog of NCBI NO: 21362904 NR Description: Ribosome biogenesis regulatory protein homolog unnamed protein product [Mus musculus]
  misc_feature (1)..(314): Homolog of NCBI NO: 12860310 NR Description: unnamed protein product [Mus musculus]
METEQIYQVDVGNLLAFNPNHRFPSAPSSRGELVKEILTEGTKLVQEIANKLFNFPSTETNDGPIVQLPPPTTKLPREKHIPRPKPPTKWEEFALKKGIQKRKKEKVVWDEQTNQFKRRHGYDRVNDDNDVPIIEAKESDEPGVDPFAKRLDDKKKRVGKQEKNRLQNLKAAEKAGALPSHVQLAATSLPISGTKAQPKKIGKDELGDVAGLAATSTASGGKFDKKLPGEKPPKKQGKHHKYLPVVSGRGDVNAEKEQTNNVLSKIFSKHSHEILNVGKAINMYNVKKEKKKSGRSDKLKPKKDITKKPANKAK

SEQ ID NO: 102402 - DNA, 1645 bp, Arabidopsis thaliana
  misc_feature (1)..(1645): Ceres Seq. ID no. 13610153
  misc_feature: MA Experiment ID: 20000180 Result: Up-regulated in Transcription
  misc_feature: MA Experiment 20000180 PARAMETER Experiment Name: At_Germinating_Seeds_P Parameter: Age (hr) Value: 24 vs. 0
  misc_feature: MA Experiment 20000180 PARAMETER Experiment Name: At_Germinating_Seeds_P Parameter: Tissue Value: Germinating Seeds
  misc_feature: MA Experiment ID: 20000184 Result: Down-regulated in Transcription
  misc_feature: MA Experiment 20000184 PARAMETER Experiment Name: At_Shoots__P Parameter: Age (day) Value: 7
  misc_feature: MA Experiment 20000184 PARAMETER Experiment Name: At_Shoots__P Parameter: Tissue Value: Shoots vs. Whole Plant
  misc_feature: MA Experiment ID: 20000227 Result: Up-regulated in Transcription
  misc_feature: MA Experiment 20000227 PARAMETER Experiment Name: At_Root-Tips-vs-Tops_P Parameter: Tissue Value: Root Tips vs. Root Tops
  misc_feature: MA Experiment ID: 20000234 Result: Up-regulated in Transcription
  misc_feature: MA Experiment 20000234 PARAMETER Experiment Name: At_Siliques_P Parameter: Age (day) Value: 21
  misc_feature: MA Experiment 20000234 PARAMETER Experiment Name: At_Siliques_P Parameter: Organism Value: A. thaliana
  misc_feature: MA Experiment 20000234 PARAMETER Experiment Name: At_Siliques_P Parameter: Plant Line Value: WS
  misc_feature: MA Experiment 20000234 PARAMETER Experiment Name: At_Siliques_P Parameter: Tissue Value: Less Than 5mm Siliques vs. Whole Plant
  misc_feature: MA Experiment ID: 20000235 Result: Up-regulated in Transcription
  misc_feature: MA Experiment 20000235 PARAMETER Experiment Name: At_Siliques_P Parameter: Age (day) Value: 21
  misc_feature: MA Experiment 20000235 PARAMETER Experiment Name: At_Siliques_P Parameter: Organism Value: A. thaliana
  misc_feature: MA Experiment 20000235 PARAMETER Experiment Name: At_Siliques_P Parameter: Plant Line Value: WS
  misc_feature: MA Experiment 20000235 PARAMETER Experiment Name: At_Siliques_P Parameter: Tissue Value: 5-10mm Siliques vs. Whole Plant
  misc_feature: MA Experiment ID: 20000286 Result: Up-regulated in Transcription
  misc_feature: MA Experiment 20000286 PARAMETER Experiment Name: At_Open_Flower_P Parameter: Age (day) Value: 21
  misc_feature: MA Experiment 20000286 PARAMETER Experiment Name: At_Open_Flower_P Parameter: Plant Line Value: WS
  misc_feature: MA Experiment 20000286 PARAMETER Experiment Name: At_Open_Flower_P Parameter: Tissue Value: Half Open vs. Whole Plant
  misc_feature: MA Experiment ID: 20000438 Result: Down-regulated in Transcription
  misc_feature: MA Experiment 20000438 PARAMETER Experiment Name: At_Shoots__P Parameter: Age (day) Value: 14
  misc_feature: MA Experiment 20000438 PARAMETER Experiment Name: At_Shoots__P Parameter: Tissue Value: Shoots vs. Whole Plant
  misc_feature: MA Experiment ID: 20000794 Result: Up-regulated in Transcription
  misc_feature: MA Experiment 20000794 PARAMETER Experiment Name: At_Petals_P Parameter: Age (day) Value: 23-25 days
  misc_feature: MA Experiment 20000794 PARAMETER Experiment Name: At_Petals_P Parameter: Plant Line Value: WS
  misc_feature: MA Experiment 20000794 PARAMETER Experiment Name: At_Petals_P Parameter: Tissue Value: Petals vs. Whole plant
  misc_feature: MA Experiment ID: 20001248 Result: Up-regulated in Transcription
  misc_feature: MA Experiment 20001248 PARAMETER Experiment Name: At_Far-red-induction_P Parameter: Age (day) Value: 7
  misc_feature: MA Experiment 20001248 PARAMETER Experiment Name: At_Far-red-induction_P Parameter: Light Value: Far-red vs. White
  misc_feature: MA Experiment 20001248 PARAMETER Experiment Name: At_Far-red-induction_P Parameter: Organism Value: A. thaliana
  misc_feature: MA Experiment 20001248 PARAMETER Experiment Name: At_Far-red-induction_P Parameter: Plant Line Value: Columbia
  misc_feature: MA Experiment 20001248 PARAMETER Experiment Name: At_Far-red-induction_P Parameter: Timepoint (hr) Value: 4
  misc_feature: MA Experiment 20001248 PARAMETER Experiment Name: At_Far-red-induction_P Parameter: Tissue Value: Whole Plant
  misc_feature: MA Experiment ID: 20001757 Result: Down-regulated in Transcription
  misc_feature: MA Experiment 20001757 PARAMETER Experiment Name: At_50mM_NH4NO3_L-to-H_P Parameter: Timepoint (hr) Value: 6
  misc_feature: MA Experiment 20001757 PARAMETER Experiment Name: At_50mM_NH4NO3_L-to-H_P Parameter: Tissue Value: Leaf
  misc_feature: MA Experiment 20001757 PARAMETER Experiment Name: At_50mM_NH4NO3_L-to-H_P Parameter: Treatment Value: 50mM NH4NO3 vs 100mM Mannitol
  misc_feature: MA Experiment ID: 20001906 Result: Down-regulated in Transcription
  misc_feature: MA Experiment 20001906 PARAMETER Experiment Name: At_Drought_Reproduction_P Parameter: Age (day) Value: 35
  misc_feature: MA Experiment 20001906 PARAMETER Experiment Name: At_Drought_Reproduction_P Parameter: Organism Value: A. thaliana
  misc_feature: MA Experiment 20001906 PARAMETER Experiment Name: At_Drought_Reproduction_P Parameter: Plant Line Value: WS
  misc_feature: MA Experiment 20001906 PARAMETER Experiment Name: At_Drought_Reproduction_P Parameter: Timepoint (day) Value: 5
  misc_feature: MA Experiment 20001906 PARAMETER Experiment Name: At_Drought_Reproduction_P Parameter: Tissue Value: Siliques
  misc_feature: MA Experiment 20001906 PARAMETER Experiment Name: At_Drought_Reproduction_P Parameter: Treatment Value: Drought vs. No Drought
  misc_feature: MA Experiment ID: 20001911 Result: Down-regulated in Transcription
  misc_feature: MA Experiment 20001911 PARAMETER Experiment Name: At_Drought_Reproduction_P Parameter: Age (day) Value: 40
  misc_feature: MA Experiment 20001911 PARAMETER Experiment Name: At_Drought_Reproduction_P Parameter: Organism Value: A. thaliana
  misc_feature: MA Experiment 20001911 PARAMETER Experiment Name: At_Drought_Reproduction_P Parameter: Plant Line Value: WS
  misc_feature: MA Experiment 20001911 PARAMETER Experiment Name: At_Drought_Reproduction_P Parameter: Timepoint (day) Value: 10
  misc_feature: MA Experiment 20001911 PARAMETER Experiment Name: At_Drought_Reproduction_P Parameter: Tissue Value: Flowers
  misc_feature: MA Experiment 20001911 PARAMETER Experiment Name: At_Drought_Reproduction_P Parameter: Treatment Value: Drought vs. No Drought
ctgtttcatattcatctctctcccctctctccctctatatctctctctcccttttcgacttgagagtttgggtcctttgggagaaagaagaagaagaagaaaaagattggattttgttcactttaacatcttcaatctctaaacccacctgagttttctccatttctctgtttggtttcttgtcagttttcaagaaagcgtccaaatcatagatcctctgttttctcttctctgtttgctttcattttctctggattcggatctgaccactaaagagaggtttatcgtttcagacaacaaaactcaaagatcgaatctatcttttgtccttagagtctggaaaaagcagctctcttttgatctcctctttagattcttcaaagctttagatgcttatctctctttctctctcagattccatttgaataaatgccattttgacagatcaaatatctcccacttttctctctctctctctctctctctctctctctgtttgagctccaccattatcgaaaactctgtttttttctttctttcttgattcgatcaacaatcgttgaaaacatgaacagaggaatcgaagttatgtcaccagcaacatatctagagacatcaaactggttgtttcaagaaaacagaggaaccaaatggacagctgaagaaaacaagaaattcgaaaacgctttagccttttacgacaaagatactcccgacagatggtccagagtcgctgccatgcttcccggtaaaacagtcggagatgtgatcaaacaatacagagagcttgaggaagacgttagcgacatcgaagctggtcttataccaatccctggttacgcctctgattcattcacacttgattggggtggctacgacggagcaagcggtaacaatgggtttaacatgaacggttactacttttccgccgccggaggaaagagaggatccgccgcacgaacggcggagcatgagaggaagaaaggtgttccatggacagaagaagaacacagacaatttctgatgggtttgaagaaatatggaaaaggagattggagaaacatagctcgtaactttgtgaccacaagaacgccaacgcaagtcgcaagtcacgctcaaaagtatttcatacggcaagtcaatggtggcaaagacaaacgccgttcaagcatccatgatatcacaaccgtcaacatccccgactctcctgacgctgcagccgcggataacgcaaccgcaaacgcaccttgctcgccaccttccgtaggaggaaaccagcgggagacatcggagtgggaaggtcaaacactatacgatgaaacagcagctgcgttttataatcaaaacgcgttttcagaaacgctacttggaatgtcttcgacgccctacatggcaaaacttcaggagcagagttttctgaacgcatcgcaattcgaatcgtacaatgcgtatctccaaatgtagctcacaaggtgaagatctcggagaagttacgagttatataatcattaataatttttgttttttctcttaatcggcgtgcatatacaaaaaacaaaattagctgctatttttttattacgagatacttatttgttgttttgtttaccatctttttccgtggttgattcaacgagttttcagc

SEQ ID NO: 102403 - protein, 298 aa, Arabidopsis thaliana
  peptide (1)..(298): Ceres Seq. ID no. 13610154
  misc_feature (26)..(75): Pfam Name: Myb-like DNA-binding domain Pfam Description: Myb-like DNA-binding domain
  misc_feature (1)..(298): Homolog of NCBI NO: 30687381 NR Description: MYB family transcription factor -related thaliana] >gi|26451319|dbj|BAC42760.1| putative MYB family factor [Arabidopsis thaliana] >gi|29824293|gb|AAP04107.1|
  misc_feature (8)..(298): Homolog of NCBI NO: 7446171 NR Description: probable MYB family transcription factor - Arabidopsis thaliana >gi|3335378|gb|AAC27179.1| putative MYB
  misc_feature (1)..(298): Homolog of NCBI NO: 12005328 NR Description: unknown [Hevea brasiliensis]
  misc_feature (5)..(292): Homolog of NCBI NO: 18874263 NR Description: MYB-like transcription factor DIVARICATA
  misc_feature (5)..(262): Homolog of NCBI NO: 18874265 NR Description: MYB-like transcription factor DVL1 [Antirrhinum
  misc_feature (5)..(212): Homolog of NCBI NO: 15237776 NR Description: I-box binding factor - like protein [Arabidopsis
  misc_feature (1)..(230): Homolog of NCBI NO: 15240915 NR Description: myb family transcription factor [Arabidopsis
  misc_feature (19)..(233): Homolog of NCBI NO: 34908386 NR Description: P0529E05.19 [Oryza sativa (japonica
  misc_feature (5)..(291): Homolog of NCBI NO: 34895714 NR Description: putative myb-related transcription activator
  misc_feature (102)..(278): Homolog of NCBI NO: 21618234 NR Description: MYB-family transcription factor, putative
MNRGIEVMSPATYLETSNWLFQENRGTKWTAEENKKFENALAFYDKDTPDRWSRVAAMLPGKTVGDVIKQYRELEEDVSDIEAGLIPIPGYASDSFTLDWGGYDGASGNNGFNMNGYYFSAAGGKRGSAARTAEHERKKGVPWTEEEHRQFLMGLKKYGKGDWRNIARNFVTTRTPTQVASHAQKYFIRQVNGGKDKRRSSIHDITTVNIPDSPDAAAADNATANAPCSPPSVGGNQRETSEWEGQTLYDETAAAFYNQNAFSETLLGMSSTPYMAKLQEQSFLNASQFESYNAYLQM

SEQ ID NO: 102404 - protein, 291 aa, Arabidopsis thaliana; identical to SEQ ID NO: 72250
  peptide (1)..(291): Ceres Seq. ID no. 13610155
  misc_feature (19)..(68): Pfam Name: Myb-like DNA-binding domain Pfam Description: Myb-like DNA-binding domain
  misc_feature (1)..(291): Homolog of NCBI NO: 30687381 NR Description: MYB family transcription factor -related thaliana] >gi|26451319|dbj|BAC42760.1| putative MYB family factor [Arabidopsis thaliana] >gi|29824293|gb|AAP04107.1|
  misc_feature (1)..(291): Homolog of NCBI NO: 7446171 NR Description: probable MYB family transcription factor - Arabidopsis thaliana >gi|3335378|gb|AAC27179.1| putative MYB
  misc_feature (1)..(291): Homolog of NCBI NO: 12005328 NR Description: unknown [Hevea brasiliensis]
  misc_feature (1)..(285): Homolog of NCBI NO: 18874263 NR Description: MYB-like transcription factor DIVARICATA
  misc_feature (1)..(255): Homolog of NCBI NO: 18874265 NR Description: MYB-like transcription factor DVL1 [Antirrhinum
  misc_feature (1)..(205): Homolog of NCBI NO: 15237776 NR Description: I-box binding factor - like protein [Arabidopsis
  misc_feature (1)..(223): Homolog of NCBI NO: 15240915 NR Description: myb family transcription factor [Arabidopsis
  misc_feature (12)..(226): Homolog of NCBI NO: 34908386 NR Description: P0529E05.19 [Oryza sativa (japonica
  misc_feature (1)..(284): Homolog of NCBI NO: 34895714 NR Description: putative myb-related transcription activator
  misc_feature (95)..(271): Homolog of NCBI NO: 21618234 NR Description: MYB-family transcription factor, putative

SEQ ID NO: 102405 - protein, 241 aa, Arabidopsis thaliana; identical to SEQ ID NO: 72251
  peptide (1)..(241): Ceres Seq. ID no. 13610156
  misc_feature (1)..(241): Homolog of NCBI NO: 30687381 NR Description: MYB family transcription factor -related thaliana] >gi|26451319|dbj|BAC42760.1| putative MYB family factor [Arabidopsis thaliana] >gi|29824293|gb|AAP04107.1|
  misc_feature (1)..(241): Homolog of NCBI NO: 7446171 NR Description: probable MYB family transcription factor - Arabidopsis thaliana >gi|3335378|gb|AAC27179.1| putative MYB
  misc_feature (1)..(241): Homolog of NCBI NO: 12005328 NR Description: unknown [Hevea brasiliensis]
  misc_feature (1)..(235): Homolog of NCBI NO: 18874263 NR Description: MYB-like transcription factor DIVARICATA
  misc_feature (1)..(205): Homolog of NCBI NO: 18874265 NR Description: MYB-like transcription factor DVL1 [Antirrhinum
  misc_feature (1)..(155): Homolog of NCBI NO: 15237776 NR Description: I-box binding factor - like protein [Arabidopsis
  misc_feature (1)..(173): Homolog of NCBI NO: 15240915 NR Description: myb family transcription factor [Arabidopsis
  misc_feature (1)..(176): Homolog of NCBI NO: 34908386 NR Description: P0529E05.19 [Oryza sativa (japonica
  misc_feature (1)..(234): Homolog of NCBI NO: 34895714 NR Description: putative myb-related transcription activator
  misc_feature (45)..(221): Homolog of NCBI NO: 21618234 NR Description: MYB-family transcription factor, putative

SEQ ID NO: 102406 - DNA, 2171 bp, Arabidopsis thaliana
  misc_feature (1)..(2171): Ceres Seq. ID no. 13610157
  misc_feature: MA Experiment ID: 20000355 Result: Up-regulated in Transcription
  misc_feature: MA Experiment 20000355 PARAMETER Experiment Name: At_Siliques_Sub_P Parameter: Age (day) Value: 21
  misc_feature: MA Experiment 20000355 PARAMETER Experiment Name: At_Siliques_Sub_P Parameter: Organism Value: A. thaliana
  misc_feature: MA Experiment 20000355 PARAMETER Experiment Name: At_Siliques_Sub_P Parameter: Plant Line Value: WS
  misc_feature: MA Experiment 20000355 PARAMETER Experiment Name: At_Siliques_Sub_P Parameter: Tissue Value: Less Than 5mm Siliques vs. Whole Plant
atgtcaaggctttctcaattcataggacatcaaggcgttcctcagtcggttttgaacgaccctgcatatcgttacaatgtttggtcgtggaatctaattgaagctaacttgaagagcaaggacgtagaggtggaactgaatattgatgtgaaggctgtcttgtatgatactaaacaatcattctacaactgtaacttcagcaatggcgagtgcacattcaatgcaatgtcccttgttggaaattctgttgtcgtaacttcaccagcagcgagtcagggagtatccattgaagatgaatggtatatcaggttctcatatcaacctagagaaattgcatatgtaatcggcacaggtgtggtgatttgcttcatgttggtagctatacagttctgcaacaggtttcagtgcagtggtggagagggacatctaaccgaggatgattcagcgagaacacgtctacttgcagacaaagatgacgatggttcaagcatgggttcgtgtgacgattcttatgcaaacgatgatgctgacttagaagagtttatgggaaatgatggtgaagcaagtaaccgaagtagacgtctctgtgccatttgttttgatgttccaagagattgctttttcctcccttgtggtcattccgtctcctgttatgaatgcggaacaacgatgcaagaagctgatgggagttgtccaatatgtcgaaggaaaatgaagaaagtgaagcgaatctatacagtgcaaaggagcttgatttttcaaagcctggacttcagctatatggattcaatggtcaatctactcctagtggttattttgtaaactggactgaatctcgagtgttatctgtctcacagaattcttacaagggatggccatactacttaaatagaggaacgcatatgaatatatcttataacattttacctaaaggttctgcagttcggcttgtgatcactgaaggaatgccattcttctatcggtcgtcgctgaaggatattgcatttcgtgacaccgcttggtcatggaatctaattcaggggggtggtatgattcaattggatataagtaagtctaaaggttattatcttactgtggctaacttgaagaggaaggacatagaggtaattataatcaagttatgactttggattaagttttggtttctgttgtgtttctgcacagtccacagtacactgttttacttgacataatgtttgttcaggtggaactggatattgatgtgaaggctgtctngtatgatactaaacaatcatcctacaattgttccttcagcaatggcgagtgctcattcaaaatgaatgaaaggtcccctgttgaaaattatgctgtcgtaacttcaccagcactgggtcagggagtatccatcgatgatgaatggtanatcgagttgtcatatcaacctanattgattgcatatggaagcttcacaggtgtgttgctttccttcatgctggtagctatacacttctgcaacaagttaaagtgttgtggtggagagggatttttatccnaagatgattcagtgagaacatgtctacttgcagacaaaggtgacaatgattgttgtaatgatgtcgaagcaagtaacaaaagtctctgtgccatttgttttgatgctccaagagattgttgtttcctcccgtgtggccattgcgtctcctgttaccaatgcggaacaaagataaaaagaaccaaggggaggtgtccaatatgtcgaaagaaaataatgcatgtgaagcgaatctatacagcttaagatgtattattatctgtccaatgtgatgttgaatcgttagagcattaataaaaatcatataatttgatattgacaaggctcaggtctttctttgcattaattcgtttcatctcttaaccatctttgtgacaacaccattggttaactaccatagggtaggcaatatagtgaaccattgtttgttgactcacatcacaaaatggttcgaaacccgaatcgataattaaggatttcataaattaattgttaatttctgaataaattcggattttgtatatttcctccgtttcgtaatataagtagttttggaccaatttttttgtttcacaacgtaaattgtttttaactttctatgtaaataatatattattttaatattttttgattattt

SEQ ID NO: 102407 - protein, 273 aa, Arabidopsis thaliana
  peptide (1)..(273): Ceres Seq. ID no. 13610158
  misc_feature (196)..(234): Pfam Name: Zinc finger, C3HC4 type (RING finger) Pfam Description: Zinc finger, C3HC4 type (RING finger)
  misc_feature (124)..(247): Homolog of NCBI NO: 15224462 NR Description: zinc finger (C3HC4-type RING finger) protein [Arabidopsis thaliana] >gi|7485584|pir||T01251 hypothetical
  misc_feature (42)..(174): Homolog of NCBI NO: 29648940 NR Description: hypothetical protein [Arabidopsis thaliana]
  misc_feature (184)..(246): Homolog of NCBI NO: 29648940 NR Description: hypothetical protein [Arabidopsis thaliana]
  misc_feature (32)..(154): Homolog of NCBI NO: 15224464 NR Description: hypothetical protein [Arabidopsis thaliana]
  misc_feature (29)..(247): Homolog of NCBI NO: 11357966 NR Description: hypothetical protein T10O8.160 - Arabidopsis >gi|7320723|emb|CAB81928.1| putative protein [Arabidopsis
  misc_feature (29)..(247): Homolog of NCBI NO: 30679266 NR Description: expressed protein [Arabidopsis thaliana]
  misc_feature (32)..(118): Homolog of NCBI NO: 15224468 NR Description: hypothetical protein [Arabidopsis thaliana]
MSRLSQFIGHQGVPQSVLNDPAYRYNVWSWNLIEANLKSKDVEVELNIDVKAVLYDTKQSFYNCNFSNGECTFNAMSLVGNSVVVTSPAASQGVSIEDEWYIRFSYQPREIAYVIGTGVVICFMLVAIQFCNRFQCSGGEGHLTEDDSARTRLLADKDDDGSSMGSCDDSYANDDADLEEFMGNDGEASNRSRRLCAICFDVPRDCFFLPCGHSVSCYECGTTMQEADGSCPICRRKMKKVKRIYTVQRSLIFQSLDFSYMDSMVNLLLVVIL

SEQ ID NO: 102408 - protein, 198 aa, Arabidopsis thaliana
  peptide (1)..(198): Ceres Seq. ID no. 13610159
  misc_feature (121)..(159): Pfam Name: Zinc finger, C3HC4 type (RING finger) Pfam Description: Zinc finger, C3HC4 type (RING finger)
  misc_feature (49)..(172): Homolog of NCBI NO: 15224462 NR Description: zinc finger (C3HC4-type RING finger) protein [Arabidopsis thaliana] >gi|7485584|pir||T01251 hypothetical
  misc_feature (1)..(99): Homolog of NCBI NO: 29648940 NR Description: hypothetical protein [Arabidopsis thaliana]
  misc_feature (109)..(171): Homolog of NCBI NO: 29648940 NR Description: hypothetical protein [Arabidopsis thaliana]
  misc_feature (1)..(79): Homolog of NCBI NO: 15224464 NR Description: hypothetical protein [Arabidopsis thaliana]
  misc_feature (1)..(172): Homolog of NCBI NO: 11357966 NR Description: hypothetical protein T10O8.160 - Arabidopsis >gi|7320723|emb|CAB81928.1| putative protein [Arabidopsis
  misc_feature (1)..(172): Homolog of NCBI NO: 30679266 NR Description: expressed protein [Arabidopsis thaliana]
  misc_feature (1)..(43): Homolog of NCBI NO: 15224468 NR Description: hypothetical protein [Arabidopsis thaliana]
MSLVGNSVVVTSPAASQGVSIEDEWYIRFSYQPREIAYVIGTGVVICFMLVAIQFCNRFQCSGGEGHLTEDDSARTRLLADKDDDGSSMGSCDDSYANDDADLEEFMGNDGEASNRSRRLCAICFDVPRDCFFLPCGHSVSCYECGTTMQEADGSCPICRRKMKKVKRIYTVQRSLIFQSLDFSYMDSMVNLLLVVIL

SEQ ID NO: 102409 - protein, 188 aa, Arabidopsis thaliana
  peptide (1)..(188): Ceres Seq. ID no. 13610160
  misc_feature (137)..(175): Pfam Name: Zinc finger, C3HC4 type (RING finger) Pfam Description: Zinc finger, C3HC4 type (RING finger)
  misc_feature (1)..(188): Homolog of NCBI NO: 29648940 NR Description: hypothetical protein [Arabidopsis thaliana]
  misc_feature (3)..(117): Homolog of NCBI NO: 15224464 NR Description: hypothetical protein [Arabidopsis thaliana]
  misc_feature (3)..(89): Homolog of NCBI NO: 15224468 NR Description: hypothetical protein [Arabidopsis thaliana]
  misc_feature (3)..(186): Homolog of NCBI NO: 11357966 NR Description: hypothetical protein T10O8.160 - Arabidopsis >gi|7320723|emb|CAB81928.1| putative protein [Arabidopsis
  misc_feature (3)..(186): Homolog of NCBI NO: 30679266 NR Description: expressed protein [Arabidopsis thaliana]
  misc_feature (127)..(187): Homolog of NCBI NO: 15224462 NR Description: zinc finger (C3HC4-type RING finger) protein [Arabidopsis thaliana] >gi|7485584|pir||T01251 hypothetical
  misc_feature (87)..(133): Homolog of NCBI NO: 15224462 NR Description: zinc finger (C3HC4-type RING finger) protein [Arabidopsis thaliana] >gi|7485584|pir||T01251 hypothetical
  misc_feature (94)..(186): Homolog of NCBI NO: 28569275 NR Description: putative inhibitor of apoptosis [Choristoneura
  misc_feature (94)..(186): Homolog of NCBI NO: 33622218 NR Description: iap-3 [Cryptophlebia leucotreta granulovirus]
  misc_feature (119)..(186): Homolog of NCBI NO: 15617532 NR Description: apoptosis inhibitor [Spodoptera litura >gi|15553268|gb|AAL01746.1|AF325155_58 apoptosis inhibitor
  misc_feature (15)..(15): Xaa is any aa, unknown or other
  misc_feature (64)..(64): Xaa is any aa, unknown or other
  misc_feature (72)..(72): Xaa is any aa, unknown or other
  misc_feature (108)..(108): Xaa is any aa, unknown or other
MFVQVELDIDVKAVXYDTKQSSYNCSFSNGECSFKMNERSPVENYAVVTSPALGQGVSIDDEWXIELSYQPXLIAYGSFTGVLLSFMLVAIHFCNKLKCCGGEGFLSXDDSVRTCLLADKGDNDCCNDVEASNKSLCAICFDAPRDCCFLPCGHCVSCYQCGTKIKRTKGRCPICRKKIMHVKRIYTA

SEQ ID NO: 102410 - DNA, 2005 bp, Arabidopsis thaliana
  misc_feature (1)..(2005): Ceres Seq. ID no. 13610179
  misc_feature: MA Experiment ID: 20000184 Result: Down-regulated in Transcription
  misc_feature: MA Experiment 20000184 PARAMETER Experiment Name: At_Shoots__P Parameter: Age (day) Value: 7
  misc_feature: MA Experiment 20000184 PARAMETER Experiment Name: At_Shoots__P Parameter: Tissue Value: Shoots vs. Whole Plant
  misc_feature: MA Experiment ID: 20000185 Result: Up-regulated in Transcription
  misc_feature: MA Experiment 20000185 PARAMETER Experiment Name: At_Roots__P Parameter: Age (day) Value: 7 vs. 21
  misc_feature: MA Experiment 20000185 PARAMETER Experiment Name: At_Roots__P Parameter: Organism Value: A. thaliana
  misc_feature: MA Experiment 20000185 PARAMETER Experiment Name: At_Roots__P Parameter: Tissue Value: Roots vs. Whole Plant
  misc_feature: MA Experiment ID: 20000264 Result: Up-regulated in Transcription
  misc_feature: MA Experiment 20000264 PARAMETER Experiment Name: At_Open_Flower_P Parameter: Age (day) Value: 21
  misc_feature: MA Experiment 20000264 PARAMETER Experiment Name: At_Open_Flower_P Parameter: Plant Line Value: WS
  misc_feature: MA Experiment 20000264 PARAMETER Experiment Name: At_Open_Flower_P Parameter: Tissue Value: Open Flower vs. Whole Plant
  misc_feature: MA Experiment ID: 20000439 Result: Up-regulated in Transcription
  misc_feature: MA Experiment 20000439 PARAMETER Experiment Name: At_Roots__P Parameter: Age (day) Value: 14 vs. 21
  misc_feature: MA Experiment 20000439 PARAMETER Experiment Name: At_Roots__P Parameter: Organism Value: A. thaliana
  misc_feature: MA Experiment 20000439 PARAMETER Experiment Name: At_Roots__P Parameter: Tissue Value: Roots vs. Whole Plant
  misc_feature: MA Experiment ID: 20000794 Result: Up-regulated in Transcription
  misc_feature: MA Experiment 20000794 PARAMETER Experiment Name: At_Petals_P Parameter: Age (day) Value: 23-25 days
  misc_feature: MA Experiment 20000794 PARAMETER Experiment Name: At_Petals_P Parameter: Plant Line Value: WS
  misc_feature: MA Experiment 20000794 PARAMETER Experiment Name: At_Petals_P Parameter: Tissue Value: Petals vs. Whole plant
  misc_feature: MA Experiment ID: 20001451 Result: Down-regulated in Transcription
  misc_feature: MA Experiment 20001451 PARAMETER Experiment Name: At_Far-red-induction_P Parameter: Age (day) Value: 7
  misc_feature: MA Experiment 20001451 PARAMETER Experiment Name: At_Far-red-induction_P Parameter: Light Value: Far-red vs. White
  misc_feature: MA Experiment 20001451 PARAMETER Experiment Name: At_Far-red-induction_P Parameter: Organism Value: A. thaliana
  misc_feature: MA Experiment 20001451 PARAMETER Experiment Name: At_Far-red-induction_P Parameter: Plant Line Value: Columbia
  misc_feature: MA Experiment 20001451 PARAMETER Experiment Name: At_Far-red-induction_P Parameter: Timepoint (hr) Value: 24
  misc_feature: MA Experiment 20001451 PARAMETER Experiment Name: At_Far-red-induction_P Parameter: Tissue Value: Whole Plant
  misc_feature: MA Experiment ID: 20001910 Result: Up-regulated in Transcription
  misc_feature: MA Experiment 20001910 PARAMETER Experiment Name: At_Drought_Reproduction_P Parameter: Age (day) Value: 37
  misc_feature: MA Experiment 20001910 PARAMETER Experiment Name: At_Drought_Reproduction_P Parameter: Organism Value: A. thaliana
  misc_feature: MA Experiment 20001910 PARAMETER Experiment Name: At_Drought_Reproduction_P Parameter: Plant Line Value: WS
  misc_feature: MA Experiment 20001910 PARAMETER Experiment Name: At_Drought_Reproduction_P Parameter: Timepoint (day) Value: 7
  misc_feature: MA Experiment 20001910 PARAMETER Experiment Name: At_Drought_Reproduction_P Parameter: Tissue Value: Flowers
  misc_feature: MA Experiment 20001910 PARAMETER Experiment Name: At_Drought_Reproduction_P Parameter: Treatment Value: Drought vs. No Drought
ccaaacaatcttctttgctaccaaatttctggaatctagggttcgattatatctcttttagattatccattatttttgtaattcgttttagtttcgtttttatttccttttttagattaagaagagttcatattttagaataattaaaaaaaatggattctgcaagaagttggtttcacaagtttcaaccacgagataagcctcggaaaaaggatatgttctccggaagcacttacggcggtggcgtgacagaaaccaccgtccccgacggaggaaatgatacagaaacggcaacgaaacttccaccactaggcggtgacggagaagcactctcaaattcaacaaaacagaaagttgctgcagccaaacagtacattgagaatcattataaggaacagatgaagaacctcaacgagaggaaagagagacgaacaacgttagagaagaagctagcggatgcagatgtatgtgaagaagaccaaaccaatcttatgaagtttcttgagaagaaagaaacagagtacatgagactccaaaggcataaaatgggtgctgatgacttcgaactcttaactatgatcggtaaaggtgcttttggagaggttcgagttgttagagagatcaacacaggtcatgtttttgctatgaagaaactcaagaaatcagaaatgcttcgcagaggccaggtggagcatgtaagagcagagaggaatctattggcagaagtagatagtaactgtatagtgaagctttactgttcttttcaagacaatgagtatctttatctgataatggagtatttgcccggtggcgatatgatgactcttctgatgaggaaagacactttaagtgaagatgaagctaagttctatatcgccgaatctgttctcgctatagaatctatccataaccgcaactatatccacagagacataaagccggataacttgttgcttgatagatatggacatttaaggttatctgattttggactatgtaagccattggattgtagtgttattgacggagaagatttcacggtaggaaatgcgggtagcggaggaggttcagagagcgtatcaaccactcctaaacgctcgcagcaagaacagttggaacattggcagaagaatcgaagaatgcttgcttactcaaccgttggtacaccagactacattgcacctgaagtcttgttaaagaaaggatacggcatggaatgtgactggtggtcactaggagctataatgtacgaaatgctggttgggtatccacccttttacgccgacgacccaatgtctacttgtagaaagatagtgaattggaaaacacatttgaagttccctgaagaatcaaggctatcacgaggggcaagagatcttattggtaagctcttgtgtagcgttaaccaacgactaggctctactggtgcctcccaaattaaggcacatccttggttcgaaggtgtacaatgggaaaagatttaccaaatggaagctgcgttcattcctgaggtcaacgacgatttggatactcaaaactttgagaagttcgatgaggaagataatcaaactcaagcaccttctagaacagggccatggagaaaaatgttatcttcaaaagacataaattttgtcggctacacatacaaaaactttgaaatcgtcaacgattatcaagtccccggtatagccgaactaaaaaagaaagagtcaaaatcaaagagaccatcggttaagtcactattcgagagcgaatcagactcgtcatcttctggttcggagcaacagaccattaaccggagctattctaatccgacgcctcgtggaatggaacccaacctgagacgtctagattctgagtagatatatatctgttatgcctatgtatatgtaaaccaaattaaaccggaaaataatgagcttaaatgtactaaaaacgtaagtaaactgaagataactaactacactcttctttctttaatacaaagaaaaatagattgcaagtc

SEQ ID NO: 102411 - protein, 569 aa, Arabidopsis thaliana
  peptide (1)..(569): Ceres Seq. ID no. 13610180
  misc_feature (137)..(435): Pfam Name: Protein kinase domain Pfam Description: Protein kinase domain
  misc_feature (1)..(569): Homolog of NCBI NO: 15219591 NR Description: protein kinase, putative [Arabidopsis thaliana]
  misc_feature (1)..(569): Homolog of NCBI NO: 25287691 NR Description: hypothetical protein [imported] - Arabidopsis >gi|4204296|gb|AAD10677.1| putative protien kinase [Arabidopsis
  misc_feature (40)..(560): Homolog of NCBI NO: 7339534 NR Description: protein kinase MK6 [Mesembryanthemum crystallinum]
  misc_feature (1)..(49): Homolog of NCBI NO: 7339534 NR Description: protein kinase MK6 [Mesembryanthemum crystallinum]
  misc_feature (1)..(538): Homolog of NCBI NO: 1076632 NR Description: protein kinase PKTL7 (EC 2.7.1.-) - common
  misc_feature (1)..(512): Homolog of NCBI NO: 15225358 NR Description: protein kinase, putative [Arabidopsis thaliana]
  misc_feature (98)..(560): Homolog of NCBI NO: 541816 NR Description: protein kinase (EC 2.7.1.-) - common ice plant
  misc_feature (44)..(548): Homolog of NCBI NO: 30682806 NR Description: protein kinase [Arabidopsis thaliana] protein kinase [Arabidopsis thaliana] >gi|22135803|gb|AAM91088.1| [Arabidopsis thaliana] >gi|23308449|gb|AAN18194.1|
  misc_feature (54)..(543): Homolog of NCBI NO: 22331282 NR Description: protein kinase, putative [Arabidopsis thaliana] protein kinase [Arabidopsis thaliana] >gi|17381026|gb|AAL36325.1| protein kinase [Arabidopsis thaliana] >gi|20465361|gb|AAM20084.1|
  misc_feature (96)..(548): Homolog of NCBI NO: 25287694 NR Description: protein kinase [imported] - Arabidopsis thaliana protein kinase [Arabidopsis thaliana] >gi|7268140|emb|CAB78477.1|
MDSARSWFHKFQPRDKPRKKDMFSGSTYGGGVTETTVPDGGNDTETATKLPPLGGDGEALSNSTKQKVAAAKQYIENHYKEQMKNLNERKERRTTLEKKLADADVCEEDQTNLMKFLEKKETEYMRLQRHKMGADDFELLTMIGKGAFGEVRVVREINTGHVFAMKKLKKSEMLRRGQVEHVRAERNLLAEVDSNCIVKLYCSFQDNEYLYLIMEYLPGGDMMTLLMRKDTLSEDEAKFYIAESVLAIESIHNRNYIHRDIKPDNLLLDRYGHLRLSDFGLCKPLDCSVIDGEDFTVGNAGSGGGSESVSTTPKRSQQEQLEHWQKNRRMLAYSTVGTPDYIAPEVLLKKGYGMECDWWSLGAIMYEMLVGYPPFYADDPMSTCRKIVNWKTHLKFPEESRLSRGARDLIGKLLCSVNQRLGSTGASQIKAHPWFEGVQWEKIYQMEAAFIPEVNDDLDTQNFEKFDEEDNQTQAPSRTGPWRKMLSSKDINFVGYTYKNFEIVNDYQVPGIAELKKKESKSKRPSVKSLFESESDSSSSGSEQQTINRSYSNPTPRGMEPNLRRLDSE

SEQ ID NO: 102412 - protein, 548 aa, Arabidopsis thaliana
  peptide (1)..(548): Ceres Seq. ID no. 13610181
  misc_feature (116)..(414): Pfam Name: Protein kinase domain Pfam Description: Protein kinase domain
  misc_feature (1)..(548): Homolog of NCBI NO: 15219591 NR Description: protein kinase, putative [Arabidopsis thaliana]
  misc_feature (1)..(548): Homolog of NCBI NO: 25287691 NR Description: hypothetical protein [imported] - Arabidopsis >gi|4204296|gb|AAD10677.1| putative protien kinase [Arabidopsis
  misc_feature (19)..(539): Homolog of NCBI NO: 7339534 NR Description: protein kinase MK6 [Mesembryanthemum crystallinum]
  misc_feature (1)..(28): Homolog of NCBI NO: 7339534 NR Description: protein kinase MK6 [Mesembryanthemum crystallinum]
  misc_feature (1)..(517): Homolog of NCBI NO: 1076632 NR Description: protein kinase PKTL7 (EC 2.7.1.-) - common
  misc_feature (1)..(491): Homolog of NCBI NO: 15225358 NR Description: protein kinase, putative [Arabidopsis thaliana]
  misc_feature (77)..(539): Homolog of NCBI NO: 541816 NR Description: protein kinase (EC 2.7.1.-) - common ice plant
  misc_feature (23)..(527): Homolog of NCBI NO: 30682806 NR Description: protein kinase [Arabidopsis thaliana] protein kinase [Arabidopsis thaliana] >gi|22135803|gb|AAM91088.1| [Arabidopsis thaliana] >gi|23308449|gb|AAN18194.1|
  misc_feature (33)..(522): Homolog of NCBI NO: 22331282 NR Description: protein kinase, putative [Arabidopsis thaliana] protein kinase [Arabidopsis thaliana] >gi|17381026|gb|AAL36325.1| protein kinase [Arabidopsis thaliana] >gi|20465361|gb|AAM20084.1|
  misc_feature (75)..(527): Homolog of NCBI NO: 25287694 NR Description: protein kinase [imported] - Arabidopsis thaliana protein kinase [Arabidopsis thaliana] >gi|7268140|emb|CAB78477.1|
MFSGSTYGGGVTETTVPDGGNDTETATKLPPLGGDGEALSNSTKQKVAAAKQYIENHYKEQMKNLNERKERRTTLEKKLADADVCEEDQTNLMKFLEKKETEYMRLQRHKMGADDFELLTMIGKGAFGEVRVVREINTGHVFAMKKLKKSEMLRRGQVEHVRAERNLLAEVDSNCIVKLYCSFQDNEYLYLIMEYLPGGDMMTLLMRKDTLSEDEAKFYIAESVLAIESIHNRNYIHRDIKPDNLLLDRYGHLRLSDFGLCKPLDCSVIDGEDFTVGNAGSGGGSESVSTTPKRSQQEQLEHWQKNRRMLAYSTVGTPDYIAPEVLLKKGYGMECDWWSLGAIMYEMLVGYPPFYADDPMSTCRKIVNWKTHLKFPEESRLSRGARDLIGKLLCSVNQRLGSTGASQIKAHPWFEGVQWEKIYQMEAAFIPEVNDDLDTQNFEKFDEEDNQTQAPSRTGPWRKMLSSKDINFVGYTYKNFEIVNDYQVPGIAELKKKESKSKRPSVKSLFESESDSSSSGSEQQTINRSYSNPTPRGMEPNLRRLDSE

SEQ ID NO: 102413 - protein, 487 aa, Arabidopsis thaliana
  peptide (1)..(487): Ceres Seq. ID no. 13610182
  misc_feature (55)..(353): Pfam Name: Protein kinase domain Pfam Description: Protein kinase domain
  misc_feature (1)..(487): Homolog of NCBI NO: 15219591 NR Description: protein kinase, putative [Arabidopsis thaliana]
  misc_feature (1)..(487): Homolog of NCBI NO: 25287691 NR Description: hypothetical protein [imported] - Arabidopsis >gi|4204296|gb|AAD10677.1| putative protien kinase [Arabidopsis
  misc_feature (1)..(478): Homolog of NCBI NO: 7339534 NR Description: protein kinase MK6 [Mesembryanthemum crystallinum]
  misc_feature (1)..(456): Homolog of NCBI NO: 1076632 NR Description: protein kinase PKTL7 (EC 2.7.1.-) - common
  misc_feature (1)..(430): Homolog of NCBI NO: 15225358 NR Description: protein kinase, putative [Arabidopsis thaliana]
  misc_feature (16)..(478): Homolog of NCBI NO: 541816 NR Description: protein kinase (EC 2.7.1.-) - common ice plant
  misc_feature (1)..(466): Homolog of NCBI NO: 30682806 NR Description: protein kinase [Arabidopsis thaliana] protein kinase [Arabidopsis thaliana] >gi|22135803|gb|AAM91088.1| [Arabidopsis thaliana] >gi|23308449|gb|AAN18194.1|
  misc_feature (1)..(461): Homolog of NCBI NO: 22331282 NR Description: protein kinase, putative [Arabidopsis thaliana] protein kinase [Arabidopsis thaliana] >gi|17381026|gb|AAL36325.1| protein kinase [Arabidopsis thaliana] >gi|20465361|gb|AAM20084.1|
  misc_feature (14)..(466): Homolog of NCBI NO: 25287694 NR Description: protein kinase [imported] - Arabidopsis thaliana protein kinase [Arabidopsis thaliana] >gi|7268140|emb|CAB78477.1|
  misc_feature (1)..(422): Homolog of NCBI NO: 31088228 NR Description: protein kinase [Raphanus sativus]
MKNLNERKERRTTLEKKLADADVCEEDQTNLMKFLEKKETEYMRLQRHKMGADDFELLTMIGKGAFGEVRVVREINTGHVFAMKKLKKSEMLRRGQVEHVRAERNLLAEVDSNCIVKLYCSFQDNEYLYLIMEYLPGGDMMTLLMRKDTLSEDEAKFYIAESVLAIESIHNRNYIHRDIKPDNLLLDRYGHLRLSDFGLCKPLDCSVIDGEDFTVGNAGSGGGSESVSTTPKRSQQEQLEHWQKNRRMLAYSTVGTPDYIAPEVLLKKGYGMECDWWSLGAIMYEMLVGYPPFYADDPMSTCRKIVNWKTHLKFPEESRLSRGARDLIGKLLCSVNQRLGSTGASQIKAHPWFEGVQWEKIYQMEAAFIPEVNDDLDTQNFEKFDEEDNQTQAPSRTGPWRKMLSSKDINFVGYTYKNFEIVNDYQVPGIAELKKKESKSKRPSVKSLFESESDSSSSGSEQQTINRSYSNPTPRGMEPNLRRLDSE

SEQ ID NO: 102414 - DNA, 2304 bp, Arabidopsis thaliana
  misc_feature (1)..(2304): Ceres Seq. ID no. 13610183
  misc_feature: MA Experiment ID: 20000315 Result: Down-regulated in Transcription
  misc_feature: MA Experiment 20000315 PARAMETER Experiment Name: At_14day_Shoots-Roots_Sub_P Parameter: Age (day) Value: 14
  misc_feature: MA Experiment 20000315 PARAMETER Experiment Name: At_14day_Shoots-Roots_Sub_P Parameter: Organism Value: A. thaliana
  misc_feature: MA Experiment 20000315 PARAMETER Experiment Name: At_14day_Shoots-Roots_Sub_P Parameter: Plant Line Value: WS
  misc_feature: MA Experiment 20000315 PARAMETER Experiment Name: At_14day_Shoots-Roots_Sub_P Parameter: Tissue Value: Shoots vs. Whole Plant
  misc_feature: MA Experiment ID: 20000347 Result: Up-regulated in Transcription
  misc_feature: MA Experiment 20000347 PARAMETER Experiment Name: At_2mM_SA_Sub_P Parameter: Age (day) Value: 14
  misc_feature: MA Experiment 20000347 PARAMETER Experiment Name: At_2mM_SA_Sub_P Parameter: Organism Value: A. thaliana
  misc_feature: MA Experiment 20000347 PARAMETER Experiment Name: At_2mM_SA_Sub_P Parameter: Plant Line Value: WS
  misc_feature: MA Experiment 20000347 PARAMETER Experiment Name: At_2mM_SA_Sub_P Parameter: Timepoint (hr) Value: 6
  misc_feature: MA Experiment 20000347 PARAMETER Experiment Name: At_2mM_SA_Sub_P Parameter: Tissue Value: Aerial
  misc_feature: MA Experiment 20000347 PARAMETER Experiment Name: At_2mM_SA_Sub_P Parameter: Treatment Value: 2mM SA vs. No Treatment
cctttgataactttccggcaaaatctcagaacctccccatttttctttgccgattattgatcggaattgctttgttcgctcatctgccaacttccttcctactcggtgtaggaatcttacgtgtccaatcatctgtctatttttggaaacaaatcctcagtgattttgtactttacttatatcaaattcgataactagggtttatcgaatcggattgttgtttctccaattataataattcaagttggttcacacagtagcgtcgacttttcatagccgctgttgtcgaattttgaatttctcgattttcccggcgcttttgttacgattcaaggagtttgaacaagtagggcttctcgttgcggagatcatggatattgacggagtagacgacgatcttcatattttagatcctgagctcttgcagctccccggtttgtctccttctcccctcaaaccaacctctcttattgctgatgacctcttctctcagtggctctcactccctgaaactgccacattggtcaagtctttgattgatgatgctaaatctggaacaccaactaataaatccaagaatttgccttctgtgtttctgagcagcagcactcccccactatctccacgaagctcctctggttcccctcgtttctccaggcaaaggactagccctccttctctccactctcctcttagatcactcaaggagccaaagcgccaactcattcctcagttctactaccaacacgggcgtccaccagcaaaagaactaaaggagcaatgtctatccatggttgatcaagtttttagtaactatattgatggactacatgtagatgaattcaaatccattacgaaacaagtctgcaagctgccttcttttctttctcctgcacttttcagaaagatcgatcccaattgcactgatatagttacaagggatgcatttatcaagtattggattgatggcaatatgttaactatggacacagcctcccagatatataatatactaaggcagcagggctgcagctatctcagacaggcagacttcaaaccagttcttgatgagcttctggcaacacatcctggattagaatttttgaggacgataagcgagtttcaagaaagatatgctgaaacggtcatctacagaatattttactacattaacagatccggaactggctgccttactcttagagagctgagacgtggaaatttaattgctgctatgcaacaacttgatgaagaggacgacattaataaaattattaggtacttctcctatgagcacttctacgtgatatactgcaaattttgggaacttgatggtgaccatgattgttttattgataaggacaatctcatcaaatatggtaataatgcccttacctacaggattgttgatagaatattttcacagattccaaggaagtttacgagtaaagttgaagggaagatgagttatgaagattttgtgtacttcattctcgctgaggaagacaagtcttccgagcctagtcttgagtattggttcaaatgcgtagacttggatggaaatggggtaatcacttcaaacgaaatgcagtttttcttcgaagagcagctgcatcgcatggaatgcataacccaggaagctgttcttttcagtgatatcctatgtcaaataattgacatgattggacccgagaaggagaactgtatcaccctccaggatctgaaaggatcgaaactttcagcaaacgttttcaatatactcttcaaccttaataagttcatggcatttgaaacacgtgacccatttctcattcgccaggaacgggaagatccaaatttgacagagtgggatcgatttgctcagagagagtatgcgagattgtcaatggaggaagatgtagatgaagtctcaaatgggagtgcagatgtctgggatgaaccactcgaacctccattttagtccatagtgaaaccaaccaaataaggagacttatgatttgaggttttccctggagagagatccatgatcagagattggaggtcactgttggttgttaccagacgctttcatcatcatttccaaaagagtctcagccaaattcatgaaatttttgcaattttgttttggtttcattataaagattatatcaagttgggccctctctccctctacatcatctagtgtccatataaccagttggattgtccaactcagaatgtactcataaatctgaattgttaaactcttttagtctttactgtcacacgaatatattttcagaaagaaatctgaattgtaaatct

SEQ ID NO: 102415 - protein, 529 aa, Arabidopsis thaliana
  peptide (1)..(529): Ceres Seq. ID no. 13610184
  misc_feature (385)..(413): Pfam Name: EF hand Pfam Description: EF hand
  misc_feature (1)..(529): Homolog of NCBI NO: 28393301 NR Description: putative protein phosphatase 2A [Arabidopsis >gi|28827268|gb|AAO50478.1| putative protein phosphatase 2A
  misc_feature (1)..(529): Homolog of NCBI NO: 15219596 NR Description: protein phosphatase 2A -related [Arabidopsis
  misc_feature (1)..(529): Homolog of NCBI NO: 15240089 NR Description: protein phosphatase 2A 62 kDa B regulatory (gb|AAD45158.1) [Arabidopsis thaliana] protein phosphatase 2A 62 kDa B'' regulatory subunit [Arabidopsis
  misc_feature (171)..(529): Homolog of NCBI NO: 37535364 NR Description: putative protein phosphatase 2A regulatory
  misc_feature (1)..(190): Homolog of NCBI NO: 37535364 NR Description: putative protein phosphatase 2A regulatory
  misc_feature (6)..(529): Homolog of NCBI NO: 15241978 NR Description: protein phosphatase 2A regulatory subunit protein [Arabidopsis thaliana] >gi|17380962|gb|AAL36293.1| protein phosphatase 2A regulatory subunit B [Arabidopsis
  misc_feature (6)..(529): Homolog of NCBI NO: 18421273 NR Description: protein phosphatase 2A regulatory subunit
  misc_feature (13)..(529): Homolog of NCBI NO: 15221817 NR Description: protein phosphatase 2A 72 kDa regulatory subunit [Arabidopsis thaliana] >gi|25405733|pir||D96586 hypothetical
  misc_feature (171)..(483): Homolog of NCBI NO: 16905168 NR Description: putative phosphatase subunit, 3'-partial [Oryza
  misc_feature (1)..(190): Homolog of NCBI NO: 16905168 NR Description: putative phosphatase subunit, 3'-partial [Oryza
MDIDGVDDDLHILDPELLQLPGLSPSPLKPTSLIADDLFSQWLSLPETATLVKSLIDDAKSGTPTNKSKNLPSVFLSSSTPPLSPRSSSGSPRFSRQRTSPPSLHSPLRSLKEPKRQLIPQFYYQHGRPPAKELKEQCLSMVDQVFSNYIDGLHVDEFKSITKQVCKLPSFLSPALFRKIDPNCTDIVTRDAFIKYWIDGNMLTMDTASQIYNILRQQGCSYLRQADFKPVLDELLATHPGLEFLRTISEFQERYAETVIYRIFYYINRSGTGCLTLRELRRGNLIAAMQQLDEEDDINKIIRYFSYEHFYVIYCKFWELDGDHDCFIDKDNLIKYGNNALTYRIVDRIFSQIPRKFTSKVEGKMSYEDFVYFILAEEDKSSEPSLEYWFKCVDLDGNGVITSNEMQFFFEEQLHRMECITQEAVLFSDILCQIIDMIGPEKENCITLQDLKGSKLSANVFNILFNLNKFMAFETRDPFLIRQEREDPNLTEWDRFAQREYARLSMEEDVDEVSNGSADVWDEPLEPPF

SEQ ID NO: 102416 - protein, 389 aa, Arabidopsis thaliana
  peptide (1)..(389): Ceres Seq. ID no. 13610185
  misc_feature (245)..(273): Pfam Name: EF hand Pfam Description: EF hand
  misc_feature (1)..(389): Homolog of NCBI NO: 28393301 NR Description: putative protein phosphatase 2A [Arabidopsis >gi|28827268|gb|AAO50478.1| putative protein phosphatase 2A
  misc_feature (1)..(389): Homolog of NCBI NO: 15219596 NR Description: protein phosphatase 2A -related [Arabidopsis
  misc_feature (1)..(389): Homolog of NCBI NO: 15240089 NR Description: protein phosphatase 2A 62 kDa B regulatory (gb|AAD45158.1) [Arabidopsis thaliana] protein phosphatase 2A 62 kDa B'' regulatory subunit [Arabidopsis
  misc_feature (31)..(389): Homolog of NCBI NO: 37535364 NR Description: putative protein phosphatase 2A regulatory
  misc_feature (1)..(50): Homolog of NCBI NO: 37535364 NR Description: putative protein phosphatase 2A regulatory
  misc_feature (1)..(389): Homolog of NCBI NO: 15241978 NR Description: protein phosphatase 2A regulatory subunit protein [Arabidopsis thaliana] >gi|17380962|gb|AAL36293.1| protein phosphatase 2A regulatory subunit B [Arabidopsis
  misc_feature (1)..(389): Homolog of NCBI NO: 18421273 NR Description: protein phosphatase 2A regulatory subunit
  misc_feature (1)..(389): Homolog of NCBI NO: 15221817 NR Description: protein phosphatase 2A 72 kDa regulatory subunit [Arabidopsis thaliana] >gi|25405733|pir||D96586 hypothetical
  misc_feature (31)..(343): Homolog of NCBI NO: 16905168 NR Description: putative phosphatase subunit, 3'-partial [Oryza
  misc_feature (1)..(50): Homolog of NCBI NO: 16905168 NR Description: putative phosphatase subunit, 3'-partial [Oryza
MVDQVFSNYIDGLHVDEFKSITKQVCKLPSFLSPALFRKIDPNCTDIVTRDAFIKYWIDGNMLTMDTASQIYNILRQQGCSYLRQADFKPVLDELLATHPGLEFLRTISEFQERYAETVIYRIFYYINRSGTGCLTLRELRRGNLIAAMQQLDEEDDINKIIRYFSYEHFYVIYCKFWELDGDHDCFIDKDNLIKYGNNALTYRIVDRIFSQIPRKFTSKVEGKMSYEDFVYFILAEEDKSSEPSLEYWFKCVDLDGNGVITSNEMQFFFEEQLHRMECITQEAVLFSDILCQIIDMIGPEKENCITLQDLKGSKLSANVFNILFNLNKFMAFETRDPFLIRQEREDPNLTEWDRFAQREYARLSMEEDVDEVSNGSADVWDEPLEPPF

SEQ ID NO: 102417 - protein, 328 aa, Arabidopsis thaliana; identical to SEQ ID NO: 42411
  peptide (1)..(328): Ceres Seq. ID no. 13610186
  misc_feature (184)..(212): Pfam Name: EF hand Pfam Description: EF hand
  misc_feature (1)..(328): Homolog of NCBI NO: 28393301 NR Description: putative protein phosphatase 2A [Arabidopsis >gi|28827268|gb|AAO50478.1| putative protein phosphatase 2A
  misc_feature (1)..(328): Homolog of NCBI NO: 15219596 NR Description: protein phosphatase 2A -related [Arabidopsis
  misc_feature (1)..(328): Homolog of NCBI NO: 15240089 NR Description: protein phosphatase 2A 62 kDa B regulatory (gb|AAD45158.1) [Arabidopsis thaliana] protein phosphatase 2A 62 kDa B'' regulatory subunit [Arabidopsis
  misc_feature (1)..(328): Homolog of NCBI NO: 37535364 NR Description: putative protein phosphatase 2A regulatory
  misc_feature (1)..(328): Homolog of NCBI NO: 15241978 NR Description: protein phosphatase 2A regulatory subunit protein [Arabidopsis thaliana] >gi|17380962|gb|AAL36293.1| protein phosphatase 2A regulatory subunit B [Arabidopsis
  misc_feature (1)..(328): Homolog of NCBI NO: 18421273 NR Description: protein phosphatase 2A regulatory subunit
  misc_feature (1)..(328): Homolog of NCBI NO: 15221817 NR Description: protein phosphatase 2A 72 kDa regulatory subunit [Arabidopsis thaliana] >gi|25405733|pir||D96586 hypothetical
  misc_feature (1)..(282): Homolog of NCBI NO: 16905168 NR Description: putative phosphatase subunit, 3'-partial [Oryza
  misc_feature (24)..(328): Homolog of NCBI NO: 30692025 NR Description: protein phosphatase 2A regulatory subunit protein [Arabidopsis thaliana] >gi|15810192|gb|AAL06997.1| [Arabidopsis thaliana] >gi|27777712|gb|AAO23892.1|
  misc_feature (1)..(326): Homolog of NCBI NO: 19923229 NR Description: protein phosphatase 2 (formerly 2A), regulatory B'', alpha; protein phosphatase 2 (formerly 2A), regulatory B'' (PR 72), alpha isoform and (PR 130), beta isoform [Homo

SEQ ID NO: 102418 - DNA, 730 bp, Arabidopsis thaliana
  misc_feature (1)..(730): Ceres Seq. ID no. 13610191
  misc_feature: MA Experiment ID: 108461 Result: Down-regulated in Transcription
  misc_feature: MA Experiment 108461 PARAMETER Experiment Name: At_Germinating_Seeds_cDNA_P Parameter: Age (day) Value: 1 vs. 0
  misc_feature: MA Experiment 108461 PARAMETER Experiment Name: At_Germinating_Seeds_cDNA_P Parameter: Tissue Value: Germinating Seeds
  misc_feature: MA Experiment ID: 108573 Result: Up-regulated in Transcription
  misc_feature: MA Experiment 108573 PARAMETER Experiment Name: At_Drought_cDNA_P Parameter: Timepoint (hr) Value: 6
  misc_feature: MA Experiment 108573 PARAMETER Experiment Name: At_Drought_cDNA_P Parameter: Tissue Value: Aerial
  misc_feature: MA Experiment 108573 PARAMETER Experiment Name: At_Drought_cDNA_P Parameter: Treatment Value: Drought vs. No Drought
  misc_feature: MA Experiment ID: 20000224 Result: Down-regulated in Transcription
aactttaacaaaagattgttcctgagaaattctagggtttctgaaatcgaggagagatccaatcggcaatggcgaatcaagtgatcaccggaatcaaagaaacagctcagtcaattactggagcggctcgtccatggggcgatttcctcgatctttccgccttcagcttcccttcctccatcgccgatgcaacaactcgcgtaactcagaacctgactcacttccgcatcaactacagtatcattctctctatcctcctaggtctaaccctaatcacacgtccaatcgccatcctcgcgtttatagccgttggcttagcttggttcttcctctacttcgctcgcgaggagccactcacgatcttcggattcactattgatgacggcatcgtcgctgtgcttctcattggtctttcgattgggtcgctagttaccaccggagtttggctcagagctctcaccaccgttggatttggtgttctggttttgatcttacacgctgcgttaagaggaacggatgatcttgtgagtgacgatctggaatcaccttatggaccgatgctctctacctctggcggtggtaacgacggtgctcgtggtgattacagtggaatctgatcaacacgatttgataatgagtttggggatttagggttttgttgttttgtaaattgtcattgtttgttttgtgtcccattaaacattgttaatgacaaaatatgttttaagac

SEQ ID NO: 102419 - protein, 182 aa, Arabidopsis thaliana; identical to SEQ ID NO: 21101
  peptide (1)..(182): Ceres Seq. ID no. 13610192
  misc_feature (1)..(182): Homolog of NCBI NO: 18379300 NR Description: expressed protein [Arabidopsis thaliana]
  misc_feature (1)..(182): Homolog of NCBI NO: 21555645 NR Description: unknown [Arabidopsis thaliana]
  misc_feature (1)..(172): Homolog of NCBI NO: 18390939 NR Description: expressed protein [Arabidopsis thaliana]
  misc_feature (1)..(172): Homolog of NCBI NO: 21594668 NR Description: unknown [Arabidopsis thaliana]
  misc_feature (1)..(169): Homolog of NCBI NO: 40539036 NR Description: putative prenylated rab acceptor protein [Oryza
  misc_feature (5)..(159): Homolog of NCBI NO: 15220814 NR Description: expressed protein [Arabidopsis thaliana]
  misc_feature (13)..(157): Homolog of NCBI NO: 34903576 NR Description: P0419B01.1 [Oryza sativa (japonica
  misc_feature (14)..(175): Homolog of NCBI NO: 15239101 NR Description: expressed protein [Arabidopsis thaliana] emb|CAB87410.1~gene_id:K18I23.19~similar to unknown protein
  misc_feature (14)..(175): Homolog of NCBI NO: 18072825 NR Description: prenylated Rab receptor 2 [Arabidopsis thaliana]
  misc_feature (5)..(159): Homolog of NCBI NO: 15240698 NR Description: expressed protein [Arabidopsis thaliana]

SEQ ID NO: 102420 - DNA, 2222 bp, Arabidopsis thaliana
  misc_feature (1)..(2222): Ceres Seq. ID no. 13610196
  misc_feature: MA Experiment ID: 108434 Result: Up-regulated in Transcription
  misc_feature: MA Experiment 108434 PARAMETER Experiment Name: At_Root_Tips_cDNA_P Parameter: Tissue Value: Root Tips
  misc_feature: MA Experiment ID: 108461 Result: Up-regulated in Transcription
  misc_feature: MA Experiment 108461 PARAMETER Experiment Name: At_Germinating_Seeds_cDNA_P Parameter: Age (day) Value: 1 vs. 0
  misc_feature: MA Experiment 108461 PARAMETER Experiment Name: At_Germinating_Seeds_cDNA_P Parameter: Tissue Value: Germinating Seeds
  misc_feature: MA Experiment ID: 108462 Result: Up-regulated in Transcription
  misc_feature: MA Experiment 108462 PARAMETER Experiment Name: At_Germinating_Seeds_cDNA_P Parameter: Age (day) Value: 2 vs. 0
  misc_feature: MA Experiment 108462 PARAMETER Experiment Name: At_Germinating_Seeds_cDNA_P Parameter: Tissue Value: Germinating Seeds
  misc_feature: MA Experiment ID: 108463 Result: Up-regulated in Transcription
  misc_feature: MA Experiment 108463 PARAMETER Experiment Name: At_Germinating_Seeds_cDNA_P Parameter: Age (day) Value: 3 vs. 0
  misc_feature: MA Experiment 108463 PARAMETER Experiment Name: At_Germinating_Seeds_cDNA_P Parameter: Tissue Value: Germinating Seeds
  misc_feature: MA Experiment ID: 108464 Result: Up-regulated in Transcription
  misc_feature: MA Experiment 108464 PARAMETER Experiment Name: At_Germinating_Seeds_cDNA_P Parameter: Age (day) Value: 4 vs. 0
  misc_feature: MA Experiment 108464 PARAMETER Experiment Name: At_Germinating_Seeds_cDNA_P Parameter: Tissue Value: Germinating Seeds
  misc_feature: MA Experiment ID: 108488 Result: Up-regulated in Transcription
  misc_feature: MA Experiment ID: 108576 Result: Down-regulated in Transcription
  misc_feature: MA Experiment 108576 PARAMETER Experiment Name: At_42deg_Heat_cDNA_P Parameter: Temperature (deg C) Value: 42 vs. 22
  misc_feature: MA Experiment 108576 PARAMETER Experiment Name: At_42deg_Heat_cDNA_P Parameter: Timepoint (hr) Value: 1
  misc_feature: MA Experiment 108576 PARAMETER Experiment Name: At_42deg_Heat_cDNA_P Parameter: Tissue Value: Aerial
  misc_feature: MA Experiment ID: 108577 Result: Down-regulated in Transcription
  misc_feature: MA Experiment 108577 PARAMETER Experiment Name: At_42deg_Heat_cDNA_P Parameter: Temperature (deg C) Value: 42 vs. 22
  misc_feature: MA Experiment 108577 PARAMETER Experiment Name: At_42deg_Heat_cDNA_P Parameter: Timepoint (hr) Value: 6
  misc_feature: MA Experiment 108577 PARAMETER Experiment Name: At_42deg_Heat_cDNA_P Parameter: Tissue Value: Aerial
  misc_feature: MA Experiment ID: 108579 Result: Up-regulated in Transcription
  misc_feature: MA Experiment 108579 PARAMETER Experiment Name: At_4deg_Cold_cDNA_P Parameter: Temperature (deg C) Value: 4 vs. 22
  misc_feature: MA Experiment 108579 PARAMETER Experiment Name: At_4deg_Cold_cDNA_P Parameter: Timepoint (hr) Value: 6
  misc_feature: MA Experiment 108579 PARAMETER Experiment Name: At_4deg_Cold_cDNA_P Parameter: Tissue Value: Aerial
  misc_feature: MA Experiment ID: 108595 Result: Down-regulated in Transcription
  misc_feature: MA Experiment 108595 PARAMETER Experiment Name: At_Ler-pi_Ovule_cDNA_P Parameter: Plant Line Value: null
  misc_feature: MA Experiment ID: 108607 Result: Down-regulated in Transcription
  misc_feature: MA Experiment 108607 PARAMETER Experiment Name: At_100uM_ABA_cDNA_P Parameter: Timepoint (hr) Value: 4
  misc_feature: MA Experiment 108607 PARAMETER Experiment Name: At_100uM_ABA_cDNA_P Parameter: Tissue Value: Aerial
  misc_feature: MA Experiment 108607 PARAMETER Experiment Name: At_100uM_ABA_cDNA_P Parameter: Treatment Value: 100uM ABA vs. No Treatment
  misc_feature: MA Experiment ID: 108668 Result: Down-regulated in Transcription
  misc_feature: MA Experiment 108668 PARAMETER Experiment Name: At_2mM_SA_cDNA_P Parameter: Plant Line Value: WS
  misc_feature: MA Experiment 108668 PARAMETER Experiment Name: At_2mM_SA_cDNA_P Parameter: Timepoint (hr) Value: 6
  misc_feature: MA Experiment 108668 PARAMETER Experiment Name: At_2mM_SA_cDNA_P Parameter: Treatment Value: 2mM SA vs. No Treatment
  misc_feature: MA Experiment ID: 20000070 Result: Down-regulated in Transcription
  misc_feature: MA Experiment 20000070 PARAMETER Experiment Name: At_100uM_ABA_Mutants_cDNA_P Parameter: Plant Line Value: CS24
  misc_feature: MA Experiment 20000070 PARAMETER Experiment Name: At_100uM_ABA_Mutants_cDNA_P Parameter: Timepoint (hr) Value: 6
  misc_feature: MA Experiment 20000070 PARAMETER Experiment Name: At_100uM_ABA_Mutants_cDNA_P Parameter: Tissue Value: Aerial
  misc_feature: MA Experiment 20000070 PARAMETER Experiment Name: At_100uM_ABA_Mutants_cDNA_P Parameter: Treatment Value: 100uM ABA vs. No Treatment
  misc_feature: MA Experiment ID: 20000087 Result: Down-regulated in Transcription
  misc_feature: MA Experiment 20000087 PARAMETER Experiment Name: At_100uM_ABA_Mutants_cDNA_P Parameter: Plant Line Value: WS
  misc_feature: MA Experiment 20000087 PARAMETER Experiment Name: At_100uM_ABA_Mutants_cDNA_P Parameter: Timepoint (hr) Value: 6
  misc_feature: MA Experiment 20000087 PARAMETER Experiment Name: At_100uM_ABA_Mutants_cDNA_P Parameter: Tissue Value: Aerial
  misc_feature: MA Experiment 20000087 PARAMETER Experiment Name: At_100uM_ABA_Mutants_cDNA_P Parameter: Treatment Value: 100uM ABA vs. No Treatment
  misc_feature: MA Experiment ID: 20000117 Result: Down-regulated in Transcription
  misc_feature: MA Experiment 20000117 PARAMETER Experiment Name: At_100uM_ABA_Mutants_cDNA_P Parameter: Plant Line Value: Columbia
  misc_feature: MA Experiment 20000117 PARAMETER Experiment Name: At_100uM_ABA_Mutants_cDNA_P Parameter: Timepoint (hr) Value: 6
  misc_feature: MA Experiment 20000117 PARAMETER Experiment Name: At_100uM_ABA_Mutants_cDNA_P Parameter: Tissue Value: Aerial
  misc_feature: MA Experiment 20000117 PARAMETER Experiment Name: At_100uM_ABA_Mutants_cDNA_P Parameter: Treatment Value: 100uM ABA vs. No Treatment
  misc_feature: MA Experiment ID: 20000179 Result: Up-regulated in Transcription
  misc_feature: MA Experiment 20000179 PARAMETER Experiment Name: At_Germinating_Seeds_P Parameter: Age (hr) Value: 6 vs. 0
  misc_feature: MA Experiment 20000179 PARAMETER Experiment Name: At_Germinating_Seeds_P Parameter: Tissue Value: Germinating Seeds
  misc_feature: MA Experiment ID: 20000180 Result: Up-regulated in Transcription
  misc_feature: MA Experiment 20000180 PARAMETER Experiment Name: At_Germinating_Seeds_P Parameter: Age (hr) Value: 24 vs. 0
  misc_feature: MA Experiment 20000180 PARAMETER Experiment Name: At_Germinating_Seeds_P Parameter: Tissue Value: Germinating Seeds
  misc_feature: MA Experiment ID: 20000182 Result: Down-regulated in Transcription
  misc_feature: MA Experiment 20000182 PARAMETER Experiment Name: At_2mM_SA_P Parameter: Age (day) Value: 14
  misc_feature: MA Experiment 20000182 PARAMETER Experiment Name: At_2mM_SA_P Parameter: Organism Value: A. thaliana
  misc_feature: MA Experiment 20000182 PARAMETER Experiment Name: At_2mM_SA_P Parameter: Plant Line Value: WS
  misc_feature: MA Experiment 20000182 PARAMETER Experiment Name: At_2mM_SA_P Parameter: Timepoint (hr) Value: 6
  misc_feature: MA Experiment 20000182 PARAMETER Experiment Name: At_2mM_SA_P Parameter: Tissue Value: Aerial
  misc_feature: MA Experiment 20000182 PARAMETER Experiment Name: At_2mM_SA_P Parameter: Treatment Value: 2mM SA vs. No Treatment
  misc_feature: MA Experiment ID: 20000227 Result: Up-regulated in Transcription
  misc_feature: MA Experiment 20000227 PARAMETER Experiment Name: At_Root-Tips-vs-Tops_P Parameter: Tissue Value: Root Tips vs. Root Tops
  misc_feature: MA Experiment ID: 20000437 Result: Down-regulated in Transcription
  misc_feature: MA Experiment 20000437 PARAMETER Experiment Name: At_Drought_P Parameter: Age (day) Value: 8
  misc_feature: MA Experiment 20000437 PARAMETER Experiment Name: At_Drought_P Parameter: Organism Value: A. thaliana
  misc_feature: MA Experiment 20000437 PARAMETER Experiment Name: At_Drought_P Parameter: Plant Line Value: WS
  misc_feature: MA Experiment 20000437 PARAMETER Experiment Name: At_Drought_P Parameter: Timepoint (hr) Value: 24
  misc_feature: MA Experiment 20000437 PARAMETER Experiment Name: At_Drought_P Parameter: Tissue Value: Whole Plant
  misc_feature: MA Experiment 20000437 PARAMETER Experiment Name: At_Drought_P Parameter: Treatment Value: Drought vs. No Drought
  misc_feature: MA Experiment ID: 20000496 Result: Up-regulated in Transcription
  misc_feature: MA Experiment 20000496 PARAMETER Experiment Name: At_Guard_Cells_P Parameter: Harvest Date Value: 7/19/2002
  misc_feature: MA Experiment 20000496 PARAMETER Experiment Name: At_Guard_Cells_P Parameter: Organism Value: Canola
  misc_feature: MA Experiment 20000496 PARAMETER Experiment Name: At_Guard_Cells_P Parameter: Tissue Value: Guard Cells vs. Leaves
  misc_feature: MA Experiment ID: 20000794 Result: Down-regulated in Transcription
  misc_feature: MA Experiment 20000794 PARAMETER Experiment Name: At_Petals_P Parameter: Age (day) Value: 23-25 days
  misc_feature: MA Experiment 20000794 PARAMETER Experiment Name: At_Petals_P Parameter: Plant Line Value: WS
  misc_feature: MA Experiment 20000794 PARAMETER Experiment Name: At_Petals_P Parameter: Tissue Value: Petals vs. Whole plant
  misc_feature: MA Experiment ID: 20001247 Result: Up-regulated in Transcription
  misc_feature: MA Experiment 20001247 PARAMETER Experiment Name: At_Far-red-induction_P Parameter: Age (day) Value: 7
  misc_feature: MA Experiment 20001247 PARAMETER Experiment Name: At_Far-red-induction_P Parameter: Light Value: Far-red vs. White
  misc_feature: MA Experiment 20001247 PARAMETER Experiment Name: At_Far-red-induction_P Parameter: Organism Value: A. thaliana
  misc_feature: MA Experiment 20001247 PARAMETER Experiment Name: At_Far-red-induction_P Parameter: Plant Line Value: Columbia
  misc_feature: MA Experiment 20001247 PARAMETER Experiment Name: At_Far-red-induction_P Parameter: Timepoint (hr) Value: 1
  misc_feature: MA Experiment 20001247 PARAMETER Experiment Name: At_Far-red-induction_P Parameter: Tissue Value: Whole Plant
  misc_feature: MA Experiment ID: 20001248 Result: Up-regulated in Transcription
  misc_feature: MA Experiment 20001248 PARAMETER Experiment Name: At_Far-red-induction_P Parameter: Age (day) Value: 7
  misc_feature: MA Experiment 20001248 PARAMETER Experiment Name: At_Far-red-induction_P Parameter: Light Value: Far-red vs. White
  misc_feature: MA Experiment 20001248 PARAMETER Experiment Name: At_Far-red-induction_P Parameter: Organism Value: A. thaliana
  misc_feature: MA Experiment 20001248 PARAMETER Experiment Name: At_Far-red-induction_P Parameter: Plant Line Value: Columbia
  misc_feature: MA Experiment 20001248 PARAMETER Experiment Name: At_Far-red-induction_P Parameter: Timepoint (hr) Value: 4
  misc_feature: MA Experiment 20001248 PARAMETER Experiment Name: At_Far-red-induction_P Parameter: Tissue Value: Whole Plant
  misc_feature: MA Experiment ID: 20001557 Result: Up-regulated in Transcription
  misc_feature: MA Experiment 20001557 PARAMETER Experiment Name: At_Drought_Soil_Dry_P Parameter: Age (day) Value: 27
  misc_feature: MA Experiment 20001557 PARAMETER Experiment Name: At_Drought_Soil_Dry_P Parameter: Organism Value: A. thaliana
  misc_feature: MA Experiment 20001557 PARAMETER Experiment Name: At_Drought_Soil_Dry_P Parameter: Plant Line Value: WS
  misc_feature: MA Experiment 20001557 PARAMETER Experiment Name: At_Drought_Soil_Dry_P Parameter: Post Timepoint (hr) Value: 3
  misc_feature: MA Experiment 20001557 PARAMETER Experiment Name: At_Drought_Soil_Dry_P Parameter: Post-Treatment Value: Re-Water vs. No Drought
  misc_feature: MA Experiment 20001557 PARAMETER Experiment Name: At_Drought_Soil_Dry_P Parameter: Timepoint (day) Value: 13
  misc_feature: MA Experiment 20001557 PARAMETER Experiment Name: At_Drought_Soil_Dry_P Parameter: Treatment Value: Drought vs. No Drought
  misc_feature: MA Experiment ID: 20001558 Result: Up-regulated in Transcription
  misc_feature: MA Experiment 20001558 PARAMETER Experiment Name: At_Drought_Soil_Dry_P Parameter: Age (day) Value: 27
  misc_feature: MA Experiment 20001558 PARAMETER Experiment Name: At_Drought_Soil_Dry_P Parameter: Organism Value: A. thaliana
  misc_feature: MA Experiment 20001558 PARAMETER Experiment Name: At_Drought_Soil_Dry_P Parameter: Plant Line Value: WS
  misc_feature: MA Experiment 20001558 PARAMETER Experiment Name: At_Drought_Soil_Dry_P Parameter: Post Timepoint (hr) Value: 6
  misc_feature: MA Experiment 20001558 PARAMETER Experiment Name: At_Drought_Soil_Dry_P Parameter: Post-Treatment Value: Re-Water vs. No Drought
  misc_feature: MA Experiment 20001558 PARAMETER Experiment Name: At_Drought_Soil_Dry_P Parameter: Timepoint (day) Value: 13
  misc_feature: MA Experiment 20001558 PARAMETER Experiment Name: At_Drought_Soil_Dry_P Parameter: Treatment Value: Drought vs. No Drought
  misc_feature: MA Experiment ID: 20001560 Result: Up-regulated in Transcription
  misc_feature: MA Experiment 20001560 PARAMETER Experiment Name: At_Drought_Soil_Dry_P Parameter: Age (day) Value: 28
  misc_feature: MA Experiment 20001560 PARAMETER Experiment Name: At_Drought_Soil_Dry_P Parameter: Organism Value: A. thaliana
  misc_feature: MA Experiment 20001560 PARAMETER Experiment Name: At_Drought_Soil_Dry_P Parameter: Plant Line Value: WS
  misc_feature: MA Experiment 20001560 PARAMETER Experiment Name: At_Drought_Soil_Dry_P Parameter: Post Timepoint (hr) Value: None
  misc_feature: MA Experiment 20001560 PARAMETER Experiment Name: At_Drought_Soil_Dry_P Parameter: Post-Treatment Value: None
  misc_feature: MA Experiment 20001560 PARAMETER Experiment Name: At_Drought_Soil_Dry_P Parameter: Timepoint (day) Value: 14
  misc_feature: MA Experiment 20001560 PARAMETER Experiment Name: At_Drought_Soil_Dry_P Parameter: Treatment Value: Drought vs. No Drought
  misc_feature: MA Experiment ID: 20001904 Result: Down-regulated in Transcription
  misc_feature: MA Experiment 20001904 PARAMETER Experiment Name: At_Drought_Reproduction_P Parameter: Age (day) Value: 37
  misc_feature: MA Experiment 20001904 PARAMETER Experiment Name: At_Drought_Reproduction_P Parameter: Organism Value: A. thaliana
  misc_feature: MA Experiment 20001904 PARAMETER Experiment Name: At_Drought_Reproduction_P Parameter: Plant Line Value: WS
  misc_feature: MA Experiment 20001904 PARAMETER Experiment Name: At_Drought_Reproduction_P Parameter: Timepoint (day) Value: 7
  misc_feature: MA Experiment 20001904 PARAMETER Experiment Name: At_Drought_Reproduction_P Parameter: Tissue Value: Rosettes
  misc_feature: MA Experiment 20001904 PARAMETER Experiment Name: At_Drought_Reproduction_P Parameter: Treatment Value: Drought vs. No Drought
  misc_feature: MA Experiment ID: 20001905 Result: Down-regulated in Transcription
  misc_feature: MA Experiment 20001905 PARAMETER Experiment Name: At_Drought_Reproduction_P Parameter: Age (day) Value: 40
  misc_feature: MA Experiment 20001905 PARAMETER Experiment Name: At_Drought_Reproduction_P Parameter: Organism Value: A. thaliana
  misc_feature: MA Experiment 20001905 PARAMETER Experiment Name: At_Drought_Reproduction_P Parameter: Plant Line Value: WS
  misc_feature: MA Experiment 20001905 PARAMETER Experiment Name: At_Drought_Reproduction_P Parameter: Timepoint (day) Value: 10
  misc_feature: MA Experiment 20001905 PARAMETER Experiment Name: At_Drought_Reproduction_P Parameter: Tissue Value: Rosettes
  misc_feature: MA Experiment 20001905 PARAMETER Experiment Name: At_Drought_Reproduction_P Parameter: Treatment Value: Drought vs. No Drought
  misc_feature: MA Experiment ID: 20001906 Result: Down-regulated in Transcription
  misc_feature: MA Experiment 20001906 PARAMETER Experiment Name: At_Drought_Reproduction_P Parameter: Age (day) Value: 35
  misc_feature: MA Experiment 20001906 PARAMETER Experiment Name: At_Drought_Reproduction_P Parameter: Organism Value: A. thaliana
  misc_feature: MA Experiment 20001906 PARAMETER Experiment Name: At_Drought_Reproduction_P Parameter: Plant Line Value: WS
  misc_feature: MA Experiment 20001906 PARAMETER Experiment Name: At_Drought_Reproduction_P Parameter: Timepoint (day) Value: 5
  misc_feature: MA Experiment 20001906 PARAMETER Experiment Name: At_Drought_Reproduction_P Parameter: Tissue Value: Siliques
  misc_feature: MA Experiment 20001906 PARAMETER Experiment Name: At_Drought_Reproduction_P Parameter: Treatment Value: Drought vs. No Drought
  misc_feature: MA Experiment ID: 20001911 Result: Down-regulated in Transcription
  misc_feature: MA Experiment 20001911 PARAMETER Experiment Name: At_Drought_Reproduction_P Parameter: Age (day) Value: 40
  misc_feature: MA Experiment 20001911 PARAMETER Experiment Name: At_Drought_Reproduction_P Parameter: Organism Value: A. thaliana
  misc_feature: MA Experiment 20001911 PARAMETER Experiment Name: At_Drought_Reproduction_P Parameter: Plant Line Value: WS
  misc_feature: MA Experiment 20001911 PARAMETER Experiment Name: At_Drought_Reproduction_P Parameter: Timepoint (day) Value: 10
  misc_feature: MA Experiment 20001911 PARAMETER Experiment Name: At_Drought_Reproduction_P Parameter: Tissue Value: Flowers
  misc_feature: MA Experiment 20001911 PARAMETER Experiment Name: At_Drought_Reproduction_P Parameter: Treatment Value: Drought vs. No Drought
aaaaagaaaaatcgttactttaaagccaaaaagaagaatacacaaacttcattcactctctcccattctcggatctctctcagtgcacagtggttgtcactcttctcctttggtcgaaactctttcttggaaagagcattttgttatcaagactctgaagagctcttttgggaggatagtaaggttggatgatgagagggagatctgatggaggcctaaagaagcggcttattgcttcggtctgtgtcgtggctctattcgtctgtttcttgtttatgtactatggttcctctagccaaggtgcatcagcattggaatatggaagatctttgagaaaactcggatcgtcttatttgagtggagatgatgataatggtgataccaaacaggatgattctgtggctaatgcagaagacagtcttgttgtcgccaaaagttttcctgtttgtgatgaccggcactcggaaatcatcccttgcttagataggaatttcatctaccaaatgaggttgaagcttgatctctctttaatggaacattatgaacggcattgtcctcctcccgaaagacggtttaattgtttgattcctccaccatctggatacaaggttcctattaagtggcctaagagtagagatgaagtgtggaaagcaaacatacctcacactcaccttgcaaaagagaagtctgatcagaactggatggttgagaaaggcgagaaaatttcttttcccggtggaggcactcatttccattacggtgctgataaatacattgcatcgatcgcaaatatgcttaacttttcgaacgatgtattgaatgacgaagggagattaagaacggttcttgatgtcggatgcggagttgcgagttttggagcttaccttctcgcgtctgatataatgacaatgtcactagcccctaatgatgttcatcagaaccaaatccagtttgcgttagaaagaggaatccctgcttatcttggtgttttaggtaccaaaaggcttccttacccgagcagatcattcgagtttgctcattgttctcgatgtaggattgattggcttcaaagagacggacttcttcttcttgagctcgatcgggtactaagaccgggaggttatttcgcgtattcgtctcctgaagcttacgcacaagatgaagagaatttgaaaatctggaaggagatgagtgctcttgttgaaagaatgtgttggagaattgccgttaaaagaaaccaaactgtggtttggcagaaaccgttgagtaatgactgttacttggagagagagcccgggacacagcctcctctctgtcgctcagatgctgatcctgatgcggttgcgggtgtttcaatggaagcttgcatcactccttactccaagcatgaccataaaaccaagggaagtgggttagctccttggccagctaggttgacttcttctcctccccgtcttgcggatttcggttattcaaccgacatgtttgagaaggacacggaactttggaaacaacaagtggacagttactggaatctgatgtcatcgaaagtcaaatcaaacactgtgaggaacataatggacatgaaagctcacatgggttctttcgcagctgctcttaaagacaaagatgtgtgggtgatgaacgttgtctctcccgacggtcccaacactctaaaactgatctacgaccgtggtttaatcggaacaaatcataactggtgtgaggctttctctacatatcctcgaacatacgatctgttgcacgcgtggtctatattttcagacattaaaagcaaaggatgcagtgcagaggatctactaatcgagatggatcggattcttagacctacgggattcgttatcatcagagataagcagagtgttgttgagtcaatcaagaagtatttgcaggctttgcattgggagactgtggcatcagagaaggtaaatacaagttcagaactcgaccaagacagtgaagatggtgagaacaatgtcgttttcattgtccagaagaaactttggctcaccagtgaaagccttagggacagcgagtaaaaaacatatcaaaagcaaagagagagaaattgttttatcccacaaagtttttatatagttttattttgatttttgtagttgatttgtacgacataaagcattattatataaaatactaaaattattcattgtttcttactttcttgaaatattctttaattt

SEQ ID NO: 102421 - protein, 623 aa, Arabidopsis thaliana
  peptide (1)..(623): Ceres Seq. ID no. 13610197
  misc_feature (93)..(399): Pfam Name: Putative methyltransferase Pfam Description: Putative methyltransferase
  misc_feature (59)..(399): Homolog of NCBI NO: 25406781 NR Description: hypothetical protein [imported] - Arabidopsis >gi|2341032|gb|AAB70432.1| EST gb|ATTS0956 comes from this gene.
  misc_feature (401)..(623): Homolog of NCBI NO: 25406781 NR Description: hypothetical protein [imported] - Arabidopsis >gi|2341032|gb|AAB70432.1| EST gb|ATTS0956 comes from this gene.
  misc_feature (2)..(623): Homolog of NCBI NO: 18414198 NR Description: dehydration-induced protein-related [Arabidopsis >gi|16604605|gb|AAL24095.1| putative ankyrin protein [Arabidopsis >gi|20259233|gb|AAM14332.1| putative ankyrin protein [Arabidopsis
  misc_feature (2)..(623): Homolog of NCBI NO: 22331280 NR Description: dehydration-induced protein-related [Arabidopsis
  misc_feature (21)..(623): Homolog of NCBI NO: 7488052 NR Description: probable ankyrin - Arabidopsis thaliana ankyrin like protein [Arabidopsis thaliana]
  misc_feature (14)..(613): Homolog of NCBI NO: 22326809 NR Description: dehydration-induced protein-related [Arabidopsis >gi|17380666|gb|AAL36163.1| unknown protein [Arabidopsis >gi|21280807|gb|AAM45045.1| unknown protein [Arabidopsis
  misc_feature (86)..(613): Homolog of NCBI NO: 11357548 NR Description: hypothetical protein F18O22.220 - Arabidopsis >gi|7573468|emb|CAB87782.1| putative protein [Arabidopsis
  misc_feature (2)..(141): Homolog of NCBI NO: 25406781 NR Description: hypothetical protein [imported] - Arabidopsis >gi|2341032|gb|AAB70432.1| EST gb|ATTS0956 comes from this gene.
  misc_feature (82)..(581): Homolog of NCBI NO: 18405149 NR Description: dehydration-induced protein family [Arabidopsis
  misc_feature (58)..(585): Homolog of NCBI NO: 15239326 NR Description: dehydration-induced protein-related [Arabidopsis
MMRGRSDGGLKKRLIASVCVVALFVCFLFMYYGSSSQGASALEYGRSLRKLGSSYLSGDDDNGDTKQDDSVANAEDSLVVAKSFPVCDDRHSEIIPCLDRNFIYQMRLKLDLSLMEHYERHCPPPERRFNCLIPPPSGYKVPIKWPKSRDEVWKANIPHTHLAKEKSDQNWMVEKGEKISFPGGGTHFHYGADKYIASIANMLNFSNDVLNDEGRLRTVLDVGCGVASFGAYLLASDIMTMSLAPNDVHQNQIQFALERGIPAYLGVLGTKRLPYPSRSFEFAHCSRCRIDWLQRDGLLLLELDRVLRPGGYFAYSSPEAYAQDEENLKIWKEMSALVERMCWRIAVKRNQTVVWQKPLSNDCYLEREPGTQPPLCRSDADPDAVAGVSMEACITPYSKHDHKTKGSGLAPWPARLTSSPPRLADFGYSTDMFEKDTELWKQQVDSYWNLMSSKVKSNTVRNIMDMKAHMGSFAAALKDKDVWVMNVVSPDGPNTLKLIYDRGLIGTNHNWCEAFSTYPRTYDLLHAWSIFSDIKSKGCSAEDLLIEMDRILRPTGFVIIRDKQSVVESIKKYLQALHWETVASEKVNTSSELDQDSEDGENNVVFIVQKKLWLTSESLRDSE

SEQ ID NO: 102422 - protein, 622 aa, Arabidopsis thaliana
  peptide (1)..(622): Ceres Seq. ID no. 13610198
  misc_feature (92)..(398): Pfam Name: Putative methyltransferase Pfam Description: Putative methyltransferase
  misc_feature (58)..(398): Homolog of NCBI NO: 25406781 NR Description: hypothetical protein [imported] - Arabidopsis >gi|2341032|gb|AAB70432.1| EST gb|ATTS0956 comes from this gene.
  misc_feature (400)..(622): Homolog of NCBI NO: 25406781 NR Description: hypothetical protein [imported] - Arabidopsis >gi|2341032|gb|AAB70432.1| EST gb|ATTS0956 comes from this gene.
  misc_feature (1)..(622): Homolog of NCBI NO: 18414198 NR Description: dehydration-induced protein-related [Arabidopsis >gi|16604605|gb|AAL24095.1| putative ankyrin protein [Arabidopsis >gi|20259233|gb|AAM14332.1| putative ankyrin protein [Arabidopsis
  misc_feature (1)..(622): Homolog of NCBI NO: 22331280 NR Description: dehydration-induced protein-related [Arabidopsis
  misc_feature (20)..(622): Homolog of NCBI NO: 7488052 NR Description: probable ankyrin - Arabidopsis thaliana ankyrin like protein [Arabidopsis thaliana]
  misc_feature (13)..(612): Homolog of NCBI NO: 22326809 NR Description: dehydration-induced protein-related [Arabidopsis >gi|17380666|gb|AAL36163.1| unknown protein [Arabidopsis >gi|21280807|gb|AAM45045.1| unknown protein [Arabidopsis
  misc_feature (85)..(612): Homolog of NCBI NO: 11357548 NR Description: hypothetical protein F18O22.220 - Arabidopsis >gi|7573468|emb|CAB87782.1| putative protein [Arabidopsis
  misc_feature (1)..(140): Homolog of NCBI NO: 25406781 NR Description: hypothetical protein [imported] - Arabidopsis >gi|2341032|gb|AAB70432.1| EST gb|ATTS0956 comes from this gene.
  misc_feature (81)..(580): Homolog of NCBI NO: 18405149 NR Description: dehydration-induced protein family [Arabidopsis
  misc_feature (57)..(584): Homolog of NCBI NO: 15239326 NR Description: dehydration-induced protein-related [Arabidopsis
MRGRSDGGLKKRLIASVCVVALFVCFLFMYYGSSSQGASALEYGRSLRKLGSSYLSGDDDNGDTKQDDSVANAEDSLVVAKSFPVCDDRHSEIIPCLDRNFIYQMRLKLDLSLMEHYERHCPPPERRFNCLIPPPSGYKVPIKWPKSRDEVWKANIPHTHLAKEKSDQNWMVEKGEKISFPGGGTHFHYGADKYIASIANMLNFSNDVLNDEGRLRTVLDVGCGVASFGAYLLASDIMTMSLAPNDVHQNQIQFALERGIPAYLGVLGTKRLPYPSRSFEFAHCSRCRIDWLQRDGLLLLELDRVLRPGGYFAYSSPEAYAQDEENLKIWKEMSALVERMCWRIAVKRNQTVVWQKPLSNDCYLEREPGTQPPLCRSDADPDAVAGVSMEACITPYSKHDHKTKGSGLAPWPARLTSSPPRLADFGYSTDMFEKDTELWKQQVDSYWNLMSSKVKSNTVRNIMDMKAHMGSFAAALKDKDVWVMNVVSPDGPNTLKLIYDRGLIGTNHNWCEAFSTYPRTYDLLHAWSIFSDIKSKGCSAEDLLIEMDRILRPTGFVIIRDKQSVVESIKKYLQALHWETVASEKVNTSSELDQDSEDGENNVVFIVQKKLWLTSESLRDSE

SEQ ID NO: 102423 - protein, 594 aa, Arabidopsis thaliana
  peptide (1)..(594): Ceres Seq. ID no. 13610199
  misc_feature (64)..(370): Pfam Name: Putative methyltransferase Pfam Description: Putative methyltransferase
  misc_feature (30)..(370): Homolog of NCBI NO: 25406781 NR Description: hypothetical protein [imported] - Arabidopsis >gi|2341032|gb|AAB70432.1| EST gb|ATTS0956 comes from this gene.
  misc_feature (372)..(594): Homolog of NCBI NO: 25406781 NR Description: hypothetical protein [imported] - Arabidopsis >gi|2341032|gb|AAB70432.1| EST gb|ATTS0956 comes from this gene.
  misc_feature (1)..(594): Homolog of NCBI NO: 18414198 NR Description: dehydration-induced protein-related [Arabidopsis >gi|16604605|gb|AAL24095.1| putative ankyrin protein [Arabidopsis >gi|20259233|gb|AAM14332.1| putative ankyrin protein [Arabidopsis
  misc_feature (1)..(594): Homolog of NCBI NO: 22331280 NR Description: dehydration-induced protein-related [Arabidopsis
  misc_feature (1)..(594): Homolog of NCBI NO: 7488052 NR Description: probable ankyrin - Arabidopsis thaliana ankyrin like protein [Arabidopsis thaliana]
  misc_feature (1)..(584): Homolog of NCBI NO: 22326809 NR Description: dehydration-induced protein-related [Arabidopsis >gi|17380666|gb|AAL36163.1| unknown protein [Arabidopsis >gi|21280807|gb|AAM45045.1| unknown protein [Arabidopsis
  misc_feature (57)..(584): Homolog of NCBI NO: 11357548 NR Description: hypothetical protein F18O22.220 - Arabidopsis >gi|7573468|emb|CAB87782.1| putative protein [Arabidopsis
  misc_feature (1)..(112): Homolog of NCBI NO: 25406781 NR Description: hypothetical protein [imported] - Arabidopsis >gi|2341032|gb|AAB70432.1| EST gb|ATTS0956 comes from this gene.
  misc_feature (53)..(552): Homolog of NCBI NO: 18405149 NR Description: dehydration-induced protein family [Arabidopsis
  misc_feature (29)..(556): Homolog of NCBI NO: 15239326 NR Description: dehydration-induced protein-related [Arabidopsis
MYYGSSSQGASALEYGRSLRKLGSSYLSGDDDNGDTKQDDSVANAEDSLVVAKSFPVCDDRHSEIIPCLDRNFIYQMRLKLDLSLMEHYERHCPPPERRFNCLIPPPSGYKVPIKWPKSRDEVWKANIPHTHLAKEKSDQNWMVEKGEKISFPGGGTHFHYGADKYIASIANMLNFSNDVLNDEGRLRTVLDVGCGVASFGAYLLASDIMTMSLAPNDVHQNQIQFALERGIPAYLGVLGTKRLPYPSRSFEFAHCSRCRIDWLQRDGLLLLELDRVLRPGGYFAYSSPEAYAQDEENLKIWKEMSALVERMCWRIAVKRNQTVVWQKPLSNDCYLEREPGTQPPLCRSDADPDAVAGVSMEACITPYSKHDHKTKGSGLAPWPARLTSSPPRLADFGYSTDMFEKDTELWKQQVDSYWNLMSSKVKSNTVRNIMDMKAHMGSFAAALKDKDVWVMNVVSPDGPNTLKLIYDRGLIGTNHNWCEAFSTYPRTYDLLHAWSIFSDIKSKGCSAEDLLIEMDRILRPTGFVIIRDKQSVVESIKKYLQALHWETVASEKVNTSSELDQDSEDGENNVVFIVQKKLWLTSESLRDSE

SEQ ID NO: 102424 - DNA, 1394 bp, Arabidopsis thaliana
  misc_feature (1)..(1394): Ceres Seq. ID no. 13610217
  misc_feature: MA Experiment ID: 108433 Result: Down-regulated in Transcription
  misc_feature: MA Experiment 108433 PARAMETER Experiment Name: At_rhl_Mutant2_cDNA_P Parameter: Age (day) Value: 7
  misc_feature: MA Experiment 108433 PARAMETER Experiment Name: At_rhl_Mutant2_cDNA_P Parameter: Organism Value: A. thaliana
  misc_feature: MA Experiment 108433 PARAMETER Experiment Name: At_rhl_Mutant2_cDNA_P Parameter: Plant Line Value: rhl Mutant vs. wt landsburg
  misc_feature: MA Experiment 108433 PARAMETER Experiment Name: At_rhl_Mutant2_cDNA_P Parameter: Tissue Value: Roots
  misc_feature: MA Experiment ID: 108434 Result: Up-regulated in Transcription
  misc_feature: MA Experiment 108434 PARAMETER Experiment Name: At_Root_Tips_cDNA_P Parameter: Tissue Value: Root Tips
  misc_feature: MA Experiment ID: 108573 Result: Up-regulated in Transcription
  misc_feature: MA Experiment 108573 PARAMETER Experiment Name: At_Drought_cDNA_P Parameter: Timepoint (hr) Value: 6
  misc_feature: MA Experiment 108573 PARAMETER Experiment Name: At_Drought_cDNA_P Parameter: Tissue Value: Aerial
  misc_feature: MA Experiment 108573 PARAMETER Experiment Name: At_Drought_cDNA_P Parameter: Treatment Value: Drought vs. No Drought
  misc_feature: MA Experiment ID: 108577 Result: Down-regulated in Transcription
  misc_feature: MA Experiment 108577 PARAMETER Experiment Name: At_42deg_Heat_cDNA_P Parameter: Temperature (deg C) Value: 42 vs. 22
  misc_feature: MA Experiment 108577 PARAMETER Experiment Name: At_42deg_Heat_cDNA_P Parameter: Timepoint (hr) Value: 6
  misc_feature: MA Experiment 108577 PARAMETER Experiment Name: At_42deg_Heat_cDNA_P Parameter: Tissue Value: Aerial
  misc_feature: MA Experiment ID: 108595 Result: Down-regulated in Transcription
  misc_feature: MA Experiment 108595 PARAMETER Experiment Name: At_Ler-pi_Ovule_cDNA_P Parameter: Plant Line Value: null
  misc_feature: MA Experiment ID: 20000086 Result: Up-regulated in Transcription
  misc_feature: MA Experiment 20000086 PARAMETER Experiment Name: At_100uM_ABA_Mutants_cDNA_P Parameter: Plant Line Value: CS22
  misc_feature: MA Experiment 20000086 PARAMETER Experiment Name: At_100uM_ABA_Mutants_cDNA_P Parameter: Timepoint (hr) Value: 6
  misc_feature: MA Experiment 20000086 PARAMETER Experiment Name: At_100uM_ABA_Mutants_cDNA_P Parameter: Tissue Value: Aerial
  misc_feature: MA Experiment 20000086 PARAMETER Experiment Name: At_100uM_ABA_Mutants_cDNA_P Parameter: Treatment Value: 100uM ABA vs. No Treatment
  misc_feature: MA Experiment ID: 20000112 Result: Down-regulated in Transcription
  misc_feature: MA Experiment 20000112 PARAMETER Experiment Name: At_42deg_Heat_cDNA_P Parameter: Temperature (deg C) Value: 42 vs. 22
  misc_feature: MA Experiment 20000112 PARAMETER Experiment Name: At_42deg_Heat_cDNA_P Parameter: Timepoint (hr) Value: 2
  misc_feature: MA Experiment 20000112 PARAMETER Experiment Name: At_42deg_Heat_cDNA_P Parameter: Tissue Value: Aerial
  misc_feature: MA Experiment ID: 20000113 Result: Down-regulated in Transcription
  misc_feature: MA Experiment 20000113 PARAMETER Experiment Name: At_42deg_Heat_cDNA_P Parameter: Temperature (deg C) Value: 42 vs. 22
  misc_feature: MA Experiment 20000113 PARAMETER Experiment Name: At_42deg_Heat_cDNA_P Parameter: Timepoint (hr) Value: 8
  misc_feature: MA Experiment 20000113 PARAMETER Experiment Name: At_42deg_Heat_cDNA_P Parameter: Tissue Value: Aerial
  misc_feature: MA Experiment ID: 20000173 Result: Down-regulated in Transcription
  misc_feature: MA Experiment 20000173 PARAMETER Experiment Name: At_42deg_Heat_P Parameter: Age (day) Value: 14
  misc_feature: MA Experiment 20000173 PARAMETER Experiment Name: At_42deg_Heat_P Parameter: Organism Value: A. thaliana
  misc_feature: MA Experiment 20000173 PARAMETER Experiment Name: At_42deg_Heat_P Parameter: Plant Line Value: WS
  misc_feature: MA Experiment 20000173 PARAMETER Experiment Name: At_42deg_Heat_P Parameter: Temperature (deg C) Value: 42 vs. 22
  misc_feature: MA Experiment 20000173 PARAMETER Experiment Name: At_42deg_Heat_P Parameter: Timepoint (hr) Value: 6
  misc_feature: MA Experiment 20000173 PARAMETER Experiment Name: At_42deg_Heat_P Parameter: Tissue Value: Aerial
  misc_feature: MA Experiment ID: 20001451 Result: Down-regulated in Transcription
  misc_feature: MA Experiment 20001451 PARAMETER Experiment Name: At_Far-red-induction_P Parameter: Age (day) Value: 7
  misc_feature: MA Experiment 20001451 PARAMETER Experiment Name: At_Far-red-induction_P Parameter: Light Value: Far-red vs. White
  misc_feature: MA Experiment 20001451 PARAMETER Experiment Name: At_Far-red-induction_P Parameter: Organism Value: A. thaliana
  misc_feature: MA Experiment 20001451 PARAMETER Experiment Name: At_Far-red-induction_P Parameter: Plant Line Value: Columbia
  misc_feature: MA Experiment 20001451 PARAMETER Experiment Name: At_Far-red-induction_P Parameter: Timepoint (hr) Value: 24
  misc_feature: MA Experiment 20001451 PARAMETER Experiment Name: At_Far-red-induction_P Parameter: Tissue Value: Whole Plant
attacaacaaactctttgagacctaaagagagagagagcgatagtgagatttagatcaacagatttgaatcgatttctgaaaacatgcagtacaagaatctggggaaatcgggtttaaaagtgagcacgctctcgttcggagcgtgggttacgttcgggaaccagctcgatgtgaaagaagcgaaatcgattcttcagtgttgtcgtgatcatggagtcaatttcttcgataacgctgaggtttacgctaatggtcgcgctgaggagattatgggtcaagcgattcgtgaactgggttggcgtcgatccgatatcgtcatctctaccaagatcttctggggtggtcctggtcctaacgataagggtttatctaggaaacatatcgttgaaggcactaaagcttctctcaaacgacttgatatggattacgttgatgtgctctattgccacaggccggatgcttcaactcctatcgaagagactgtgagggcgatgaactacgtgattgataagggttgggccttctattggggaaccagtgaatggtcagctcaacaaattacggaggcatggggagctgctgaccggttggatttggttggtccaattgtcgaacagccagaatacaacatgttcgctaggcacaaagttgagacagagtttcttcctctgtacaccaaccatggtataggtctcactacctggagcccacttgcatctggtgtgctcactggtaaatacaacaagggagctattccctcagacagccgatttgcattggagaactacaaaaaccttgccaatagatcacttgtggatgacgtgctgaggaaagttagcggtctcaaacccattgcagatgagctaggtgtaaccttggctcagcttgcaatcgcatggtgtgcttcaaatcctaatgtgtcatctgttatcactggtgccacaagggagtcacagattcaagaaaatatgaaagctgttgatgtgatcccattgttgacccctattgttctggacaagattgagcaagtgatacagagcaaaccaaaacgtcctgaatcatataggtaaaaccaacatccaagatctctcttccctattcaatcgtttacaaaagagtgttgcaggaaaaagaaaacattagaagaagctctgtgatgtatgttgttggatgttgtctcgttttcgctttgtttgttctctttagcagcttatgcatttttaagactcagacagagagaaagagagactaatgtttttttttagtttttcttgtttcatcatttaaaaaacggtcttatttgttacttgttagtgcaacttaaagtttggttcttgtagtttgccatgtcatgacgtcaatatattgaatagctcatcaaacaattctggtt

SEQ ID NO: 102425 - protein, 328 aa, Arabidopsis thaliana; identical to SEQ ID NO: 35459
  peptide (1)..(328): Ceres Seq. ID no. 13610218
  misc_feature (1)..(328): Homolog of NCBI NO: 15219795 NR Description: potassium channel protein, putative [Arabidopsis
  misc_feature (1)..(328): Homolog of NCBI NO: 1063415 NR Description: K+ channel protein
  misc_feature (1)..(328): Homolog of NCBI NO: 7447934 NR Description: probable potassium channel beta chain KB1 - potato
  misc_feature (1)..(328): Homolog of NCBI NO: 2832783 NR Description: potassium channel beta subunit [Egeria densa]
  misc_feature (1)..(328): Homolog of NCBI NO: 7447935 NR Description: probable potassium channel beta chain - rice
  misc_feature (1)..(322): Homolog of NCBI NO: 23394348 NR Description: K+ channel protein [Phytophthora infestans]
  misc_feature (1)..(317): Homolog of NCBI NO: 22987410 NR Description: hypothetical protein [Burkholderia fungorum]
  misc_feature (1)..(317): Homolog of NCBI NO: 15643082 NR Description: K+ channel, beta subunit [Thermotoga maritima]
  misc_feature (1)..(328): Homolog of NCBI NO: 7914982 NR Description: potassium channel Kv beta 2.1 subunit
  misc_feature (1)..(328): Homolog of NCBI NO: 7914984 NR Description: potassium channel Kv beta 2.2 subunit

SEQ ID NO: 102426 - protein, 266 aa, Arabidopsis thaliana; identical to SEQ ID NO: 35460
  peptide (1)..(266): Ceres Seq. ID no. 13610219
  misc_feature (1)..(266): Homolog of NCBI NO: 15219795 NR Description: potassium channel protein, putative [Arabidopsis
  misc_feature (1)..(266): Homolog of NCBI NO: 1063415 NR Description: K+ channel protein
  misc_feature (1)..(266): Homolog of NCBI NO: 7447934 NR Description: probable potassium channel beta chain KB1 - potato
  misc_feature (1)..(266): Homolog of NCBI NO: 2832783 NR Description: potassium channel beta subunit [Egeria densa]
  misc_feature (1)..(266): Homolog of NCBI NO: 7447935 NR Description: probable potassium channel beta chain - rice
  misc_feature (1)..(260): Homolog of NCBI NO: 23394348 NR Description: K+ channel protein [Phytophthora infestans]
  misc_feature (1)..(255): Homolog of NCBI NO: 22987410 NR Description: hypothetical protein [Burkholderia fungorum]
  misc_feature (1)..(255): Homolog of NCBI NO: 15643082 NR Description: K+ channel, beta subunit [Thermotoga maritima]
  misc_feature (1)..(266): Homolog of NCBI NO: 7914982 NR Description: potassium channel Kv beta 2.1 subunit
  misc_feature (1)..(266): Homolog of NCBI NO: 7914984 NR Description: potassium channel Kv beta 2.2 subunit

SEQ ID NO: 102427 - protein, 216 aa, Arabidopsis thaliana; identical to SEQ ID NO: 35461
  peptide (1)..(216): Ceres Seq. ID no. 13610220
  misc_feature (1)..(216): Homolog of NCBI NO: 15219795 NR Description: potassium channel protein, putative [Arabidopsis
  misc_feature (1)..(216): Homolog of NCBI NO: 1063415 NR Description: K+ channel protein
  misc_feature (1)..(216): Homolog of NCBI NO: 7447934 NR Description: probable potassium channel beta chain KB1 - potato
  misc_feature (1)..(216): Homolog of NCBI NO: 2832783 NR Description: potassium channel beta subunit [Egeria densa]
  misc_feature (1)..(216): Homolog of NCBI NO: 7447935 NR Description: probable potassium channel beta chain - rice
  misc_feature (1)..(210): Homolog of NCBI NO: 23394348 NR Description: K+ channel protein [Phytophthora infestans]
  misc_feature (1)..(205): Homolog of NCBI NO: 22987410 NR Description: hypothetical protein [Burkholderia fungorum]
  misc_feature (1)..(205): Homolog of NCBI NO: 15643082 NR Description: K+ channel, beta subunit [Thermotoga maritima]
  misc_feature (1)..(216): Homolog of NCBI NO: 7914982 NR Description: potassium channel Kv beta 2.1 subunit
  misc_feature (1)..(216): Homolog of NCBI NO: 7914984 NR Description: potassium channel Kv beta 2.2 subunit

SEQ ID NO: 102428 - DNA, 1588 bp, Arabidopsis thaliana
  misc_feature (1)..(1588): Ceres Seq. ID no. 13610221
  misc_feature: MA Experiment ID: 108463 Result: Down-regulated in Transcription
  misc_feature: MA Experiment 108463 PARAMETER Experiment Name: At_Germinating_Seeds_cDNA_P Parameter: Age (day) Value: 3 vs. 0
  misc_feature: MA Experiment 108463 PARAMETER Experiment Name: At_Germinating_Seeds_cDNA_P Parameter: Tissue Value: Germinating Seeds
  misc_feature: MA Experiment ID: 108464 Result: Down-regulated in Transcription
  misc_feature: MA Experiment 108464 PARAMETER Experiment Name: At_Germinating_Seeds_cDNA_P Parameter: Age (day) Value: 4 vs. 0
  misc_feature: MA Experiment 108464 PARAMETER Experiment Name: At_Germinating_Seeds_cDNA_P Parameter: Tissue Value: Germinating Seeds
  misc_feature: MA Experiment ID: 108569 Result: Up-regulated in Transcription
  misc_feature: MA Experiment 108569 PARAMETER Experiment Name: At_0.001%_MeJA__cDNA_P Parameter: Timepoint (hr) Value: 6
  misc_feature: MA Experiment 108569 PARAMETER Experiment Name: At_0.001%_MeJA__cDNA_P Parameter: Tissue Value: Aerial
  misc_feature: MA Experiment 108569 PARAMETER Experiment Name: At_0.001%_MeJA__cDNA_P Parameter: Treatment Value: 0.001% MeJA vs. No Treatment
  misc_feature: MA Experiment ID: 108573 Result: Up-regulated in Transcription
  misc_feature: MA Experiment 108573 PARAMETER Experiment Name: At_Drought_cDNA_P Parameter: Timepoint (hr) Value: 6
  misc_feature: MA Experiment 108573 PARAMETER Experiment Name: At_Drought_cDNA_P Parameter: Tissue Value: Aerial
  misc_feature: MA Experiment 108573 PARAMETER Experiment Name: At_Drought_cDNA_P Parameter: Treatment Value: Drought vs. No Drought
  misc_feature: MA Experiment ID: 108595 Result: Down-regulated in Transcription
  misc_feature: MA Experiment 108595 PARAMETER Experiment Name: At_Ler-pi_Ovule_cDNA_P Parameter: Plant Line Value: null
  misc_feature: MA Experiment ID: 20000072 Result: Up-regulated in Transcription
  misc_feature: MA Experiment 20000072 PARAMETER Experiment Name: At_100uM_ABA_Mutants_cDNA_P Parameter: Plant Line Value: CS8105
  misc_feature: MA Experiment 20000072 PARAMETER Experiment Name: At_100uM_ABA_Mutants_cDNA_P Parameter: Timepoint (hr) Value: 6
  misc_feature: MA Experiment 20000072 PARAMETER Experiment Name: At_100uM_ABA_Mutants_cDNA_P Parameter: Tissue Value: Aerial
  misc_feature: MA Experiment 20000072 PARAMETER Experiment Name: At_100uM_ABA_Mutants_cDNA_P Parameter: Treatment Value: 100uM ABA vs. No Treatment
  misc_feature: MA Experiment ID: 20000086 Result: Up-regulated in Transcription
  misc_feature: MA Experiment 20000086 PARAMETER Experiment Name: At_100uM_ABA_Mutants_cDNA_P Parameter: Plant Line Value: CS22
  misc_feature: MA Experiment 20000086 PARAMETER Experiment Name: At_100uM_ABA_Mutants_cDNA_P Parameter: Timepoint (hr) Value: 6
  misc_feature: MA Experiment 20000086 PARAMETER Experiment Name: At_100uM_ABA_Mutants_cDNA_P Parameter: Tissue Value: Aerial
  misc_feature: MA Experiment 20000086 PARAMETER Experiment Name: At_100uM_ABA_Mutants_cDNA_P Parameter: Treatment Value: 100uM ABA vs. No Treatment
  misc_feature: MA Experiment ID: 20000088 Result: Up-regulated in Transcription
  misc_feature: MA Experiment 20000088 PARAMETER Experiment Name: At_100uM_ABA_Mutants_cDNA_P Parameter: Plant Line Value: Landsberg
  misc_feature: MA Experiment 20000088 PARAMETER Experiment Name: At_100uM_ABA_Mutants_cDNA_P Parameter: Timepoint (hr) Value: 6
  misc_feature: MA Experiment 20000088 PARAMETER Experiment Name: At_100uM_ABA_Mutants_cDNA_P Parameter: Tissue Value: Aerial
  misc_feature: MA Experiment 20000088 PARAMETER Experiment Name: At_100uM_ABA_Mutants_cDNA_P Parameter: Treatment Value: 100uM ABA vs. No Treatment
  misc_feature: MA Experiment ID: 20000794 Result: Up-regulated in Transcription
  misc_feature: MA Experiment 20000794 PARAMETER Experiment Name: At_Petals_P Parameter: Age (day) Value: 23-25 days
  misc_feature: MA Experiment 20000794 PARAMETER Experiment Name: At_Petals_P Parameter: Plant Line Value: WS
  misc_feature: MA Experiment 20000794 PARAMETER Experiment Name: At_Petals_P Parameter: Tissue Value: Petals vs. Whole plant
  misc_feature: MA Experiment ID: 20001248 Result: Down-regulated in Transcription
  misc_feature: MA Experiment 20001248 PARAMETER Experiment Name: At_Far-red-induction_P Parameter: Age (day) Value: 7
  misc_feature: MA Experiment 20001248 PARAMETER Experiment Name: At_Far-red-induction_P Parameter: Light Value: Far-red vs. White
  misc_feature: MA Experiment 20001248 PARAMETER Experiment Name: At_Far-red-induction_P Parameter: Organism Value: A. thaliana
  misc_feature: MA Experiment 20001248 PARAMETER Experiment Name: At_Far-red-induction_P Parameter: Plant Line Value: Columbia
  misc_feature: MA Experiment 20001248 PARAMETER Experiment Name: At_Far-red-induction_P Parameter: Timepoint (hr) Value: 4
  misc_feature: MA Experiment 20001248 PARAMETER Experiment Name: At_Far-red-induction_P Parameter: Tissue Value: Whole Plant
  misc_feature: MA Experiment ID: 20001450 Result: Down-regulated in Transcription
  misc_feature: MA Experiment 20001450 PARAMETER Experiment Name: At_Far-red-induction_P Parameter: Age (day) Value: 7
  misc_feature: MA Experiment 20001450 PARAMETER Experiment Name: At_Far-red-induction_P Parameter: Light Value: Far-red vs. White
  misc_feature: MA Experiment 20001450 PARAMETER Experiment Name: At_Far-red-induction_P Parameter: Organism Value: A. thaliana
  misc_feature: MA Experiment 20001450 PARAMETER Experiment Name: At_Far-red-induction_P Parameter: Plant Line Value: Columbia
  misc_feature: MA Experiment 20001450 PARAMETER Experiment Name: At_Far-red-induction_P Parameter: Timepoint (hr) Value: 8
  misc_feature: MA Experiment 20001450 PARAMETER Experiment Name: At_Far-red-induction_P Parameter: Tissue Value: Whole Plant
agtttgggcttcaaaataatcaaacgaaaacaatggaaaaagcaacggagagacaaaggatactgcttcgtcatcttcaaccttcgtcatcttccgacgcctctctctctgcctcagcttgcttgtccaaagacagtgctgcatatcaatatggagatgatgttgtcattgtcgcggcacaaaggactgcactttgcaaggcaaaacgtggcagcttcaaggatacatttccagacgagttgcttgcctctgtattgagagcattgatagagaaaactaatgtaaacccaagtgaagttggtgacattgtagtgggtactgttttgggaccaggatctcagagagccagtgaatgcaggatggctgcgttctatgctggtttccccgaaactgttcccatcagaaccgtgaacagacagtgttcatctgggcttcaggctgttgctgatgttgccgctgccataaaagctggtttttatgacattggtattggagctgggctggagtccatgacaactaatccaaggggatggaaaggatcagtcaacccaaatgtgaagaagtttgaacaagctcacaattgccttcttccaatgggtattacttcagaaaatgtagcacaccggtttaatgtttcaagggaggagcaggatcaagctgctgttgattctcacagaaaggctgcttctgctactgcttccggaaagtttaaggatgagataacccctgtaaaaaccaagattgttgacccaaagacaggtgatgagaaacccataacagtttctgtggatgatgggattcgacctaacacaaccctttccggacttgcaaagctgaagccagtgtttaaggaagacggaaccacaactgctgggaattctagccaattaagtgacggtgctggagctgttctccttatgaggagaaatgtcgcaatgcagaaaggccttcccattcttggtgtattcaggacattttctgcagttggtgtggacccagccatcatgggggttgggccagccgttgccattcctgctgcagtcaaggcagctggtttagaactcaatgacgtcgacttgtttgagattaacgaggcatttgcatctcagtttgtttattgtcggaacaagctcgggctagacgcggaaaagatcaatgtcaatggaggagccatagccattggacatcccttgggcgctacaggagccagatgcgttgcgacgctgctgcatgagatgaaacgacgtggtaaagactgtcgttttggcgtagtgtcaatgtgtataggttcgggaatgggagcagccgctgtgtttgagagaggaggcggtgtggatgagctctgtgatgtccggaaagtctaatgacaataaggccttttgaccaaggaccctagctaaggaccaaattagaacacagtactacaaataaacattatcacaaataaatgcgttctagatgaataaatcataacgatagtacaatacatgagggaaaacttcttgttattttttaactctcttttgttatatggttggaatatatacagatactctttgagaacatatcataatctatttggtttgtc

SEQ ID NO: 102429 - protein, 453 aa, Arabidopsis thaliana; identical to SEQ ID NO: 42024
  peptide (1)..(453): Ceres Seq. ID no. 13610222
  misc_feature (51)..(309): Pfam Name: Thiolase, N-terminal domain Pfam Description: Thiolase, N-terminal domain
  misc_feature (11)..(453): Homolog of NCBI NO: 15219797 NR Description: acetyl-CoA C-acyltransferase (3-ketoacyl-CoA
  misc_feature (11)..(453): Homolog of NCBI NO: 21537268 NR Description: putative acetyl-CoA acyltransferase [Arabidopsis
  misc_feature (11)..(453): Homolog of NCBI NO: 15225798 NR Description: acetyl-CoA C-acyltransferase (3-ketoacyl-CoA
  misc_feature (11)..(453): Homolog of NCBI NO: 7433644 NR Description: acetyl-CoA C-acyltransferase (EC 2.3.1.16)
  misc_feature (11)..(453): Homolog of NCBI NO: 393707 NR Description: 3-ketoacyl-CoA thiolase; acetyl-CoA
  misc_feature (11)..(453): Homolog of NCBI NO: 7433647 NR Description: acetyl-CoA C-acyltransferase (EC 2.3.1.16)
  misc_feature (11)..(453): Homolog of NCBI NO: 421810 NR Description: acetyl-CoA C-acyltransferase (EC 2.3.1.16)
  misc_feature (28)..(453): Homolog of NCBI NO: 25528365 NR Description: hypothetical protein [imported] - Arabidopsis
  misc_feature (11)..(428): Homolog of NCBI NO: 1129145 NR Description: 3-ketoacyl-CoA thiolase B; acetyl-CoA
  misc_feature (11)..(428): Homolog of NCBI NO: 7433645 NR Description: acetyl-CoA C-acyltransferase (EC 2.3.1.16) B

SEQ ID NO: 102430 - protein, 443 aa, Arabidopsis thaliana; identical to SEQ ID NO: 42025
  peptide (1)..(443): Ceres Seq. ID no. 13610223
  misc_feature (41)..(299): Pfam Name: Thiolase, N-terminal domain Pfam Description: Thiolase, N-terminal domain
  misc_feature (1)..(443): Homolog of NCBI NO: 15219797 NR Description: acetyl-CoA C-acyltransferase (3-ketoacyl-CoA
  misc_feature (1)..(443): Homolog of NCBI NO: 21537268 NR Description: putative acetyl-CoA acyltransferase [Arabidopsis
  misc_feature (1)..(443): Homolog of NCBI NO: 15225798 NR Description: acetyl-CoA C-acyltransferase (3-ketoacyl-CoA
  misc_feature (1)..(443): Homolog of NCBI NO: 7433644 NR Description: acetyl-CoA C-acyltransferase (EC 2.3.1.16)
  misc_feature (1)..(443): Homolog of NCBI NO: 393707 NR Description: 3-ketoacyl-CoA thiolase; acetyl-CoA
  misc_feature (1)..(443): Homolog of NCBI NO: 7433647 NR Description: acetyl-CoA C-acyltransferase (EC 2.3.1.16)
  misc_feature (1)..(443): Homolog of NCBI NO: 421810 NR Description: acetyl-CoA C-acyltransferase (EC 2.3.1.16)
  misc_feature (18)..(443): Homolog of NCBI NO: 25528365 NR Description: hypothetical protein [imported] - Arabidopsis
  misc_feature (1)..(418): Homolog of NCBI NO: 1129145 NR Description: 3-ketoacyl-CoA thiolase B; acetyl-CoA
  misc_feature (1)..(418): Homolog of NCBI NO: 7433645 NR Description: acetyl-CoA C-acyltransferase (EC 2.3.1.16) B

SEQ ID NO: 102431 - protein, 334 aa, Arabidopsis thaliana; identical to SEQ ID NO: 42026
  peptide (1)..(334): Ceres Seq. ID no. 13610224
  misc_feature (1)..(190): Pfam Name: Thiolase, N-terminal domain Pfam Description: Thiolase, N-terminal domain
  misc_feature (1)..(334): Homolog of NCBI NO: 15219797 NR Description: acetyl-CoA C-acyltransferase (3-ketoacyl-CoA
  misc_feature (1)..(334): Homolog of NCBI NO: 21537268 NR Description: putative acetyl-CoA acyltransferase [Arabidopsis
  misc_feature (1)..(334): Homolog of NCBI NO: 15225798 NR Description: acetyl-CoA C-acyltransferase (3-ketoacyl-CoA
  misc_feature (1)..(334): Homolog of NCBI NO: 7433644 NR Description: acetyl-CoA C-acyltransferase (EC 2.3.1.16)
  misc_feature (1)..(334): Homolog of NCBI NO: 393707 NR Description: 3-ketoacyl-CoA thiolase; acetyl-CoA
  misc_feature (1)..(334): Homolog of NCBI NO: 7433647 NR Description: acetyl-CoA C-acyltransferase (EC 2.3.1.16)
  misc_feature (1)..(334): Homolog of NCBI NO: 421810 NR Description: acetyl-CoA C-acyltransferase (EC 2.3.1.16)
  misc_feature (1)..(334): Homolog of NCBI NO: 25528365 NR Description: hypothetical protein [imported] - Arabidopsis
  misc_feature (1)..(309): Homolog of NCBI NO: 1129145 NR Description: 3-ketoacyl-CoA thiolase B; acetyl-CoA
  misc_feature (1)..(309): Homolog of NCBI NO: 7433645 NR Description: acetyl-CoA C-acyltransferase (EC 2.3.1.16) B

SEQ ID NO: 102432 - DNA, 1336 bp, Arabidopsis thaliana
  misc_feature (1)..(1336): Ceres Seq. ID no. 13610304
  misc_feature: MA Experiment ID: 108434 Result: Down-regulated in Transcription
  misc_feature: MA Experiment 108434 PARAMETER Experiment Name: At_Root_Tips_cDNA_P Parameter: Tissue Value: Root Tips
  misc_feature: MA Experiment ID: 108488 Result: Down-regulated in Transcription
  misc_feature: MA Experiment ID: 108561 Result: Up-regulated in Transcription
  misc_feature: MA Experiment 108561 PARAMETER Experiment Name: At_100uM_ABA_cDNA_P Parameter: Timepoint (hr) Value: 6
  misc_feature: MA Experiment 108561 PARAMETER Experiment Name: At_100uM_ABA_cDNA_P Parameter: Tissue Value: Aerial
  misc_feature: MA Experiment 108561 PARAMETER Experiment Name: At_100uM_ABA_cDNA_P Parameter: Treatment Value: 100uM ABA vs. No Treatment
  misc_feature: MA Experiment ID: 108569 Result: Up-regulated in Transcription
  misc_feature: MA Experiment 108569 PARAMETER Experiment Name: At_0.001%_MeJA__cDNA_P Parameter: Timepoint (hr) Value: 6
  misc_feature: MA Experiment 108569 PARAMETER Experiment Name: At_0.001%_MeJA__cDNA_P Parameter: Tissue Value: Aerial
  misc_feature: MA Experiment 108569 PARAMETER Experiment Name: At_0.001%_MeJA__cDNA_P Parameter: Treatment Value: 0.001% MeJA vs. No Treatment
  misc_feature: MA Experiment ID: 108576 Result: Up-regulated in Transcription
  misc_feature: MA Experiment 108576 PARAMETER Experiment Name: At_42deg_Heat_cDNA_P Parameter: Temperature (deg C) Value: 42 vs. 22
  misc_feature: MA Experiment 108576 PARAMETER Experiment Name: At_42deg_Heat_cDNA_P Parameter: Timepoint (hr) Value: 1
  misc_feature: MA Experiment 108576 PARAMETER Experiment Name: At_42deg_Heat_cDNA_P Parameter: Tissue Value: Aerial
  misc_feature: MA Experiment ID: 108585 Result: Up-regulated in Transcription
  misc_feature: MA Experiment 108585 PARAMETER Experiment Name: At_5mM_NaNP_cDNA_P Parameter: Timepoint (hr) Value: 6
  misc_feature: MA Experiment 108585 PARAMETER Experiment Name: At_5mM_NaNP_cDNA_P Parameter: Tissue Value: Aerial
  misc_feature: MA Experiment 108585 PARAMETER Experiment Name: At_5mM_NaNP_cDNA_P Parameter: Treatment Value: null
  misc_feature: MA Experiment ID: 108594 Result: Down-regulated in Transcription
  misc_feature: MA Experiment 108594 PARAMETER Experiment Name: At_Ler-rhl_Root_cDNA_P Parameter: Plant Line Value: null
  misc_feature: MA Experiment ID: 108609 Result: Up-regulated in Transcription
  misc_feature: MA Experiment 108609 PARAMETER Experiment Name: At_100uM_ABA_cDNA_P Parameter: Timepoint (hr) Value: 24
  misc_feature: MA Experiment 108609 PARAMETER Experiment Name: At_100uM_ABA_cDNA_P Parameter: Tissue Value: Aerial
  misc_feature: MA Experiment 108609 PARAMETER Experiment Name: At_100uM_ABA_cDNA_P Parameter: Treatment Value: 100uM ABA vs. No Treatment
  misc_feature: MA Experiment ID: 20000071 Result: Up-regulated in Transcription
  misc_feature: MA Experiment 20000071 PARAMETER Experiment Name: At_100uM_ABA_Mutants_cDNA_P Parameter: Plant Line Value: CS8104
  misc_feature: MA Experiment 20000071 PARAMETER Experiment Name: At_100uM_ABA_Mutants_cDNA_P Parameter: Timepoint (hr) Value: 6
  misc_feature: MA Experiment 20000071 PARAMETER Experiment Name: At_100uM_ABA_Mutants_cDNA_P Parameter: Tissue Value: Aerial
  misc_feature: MA Experiment 20000071 PARAMETER Experiment Name: At_100uM_ABA_Mutants_cDNA_P Parameter: Treatment Value: 100uM ABA vs. No Treatment
  misc_feature: MA Experiment ID: 20000086 Result: Up-regulated in Transcription
  misc_feature: MA Experiment 20000086 PARAMETER Experiment Name: At_100uM_ABA_Mutants_cDNA_P Parameter: Plant Line Value: CS22
  misc_feature: MA Experiment 20000086 PARAMETER Experiment Name: At_100uM_ABA_Mutants_cDNA_P Parameter: Timepoint (hr) Value: 6
  misc_feature: MA Experiment 20000086 PARAMETER Experiment Name: At_100uM_ABA_Mutants_cDNA_P Parameter: Tissue Value: Aerial
  misc_feature: MA Experiment 20000086 PARAMETER Experiment Name: At_100uM_ABA_Mutants_cDNA_P Parameter: Treatment Value: 100uM ABA vs. No Treatment
  misc_feature: MA Experiment ID: 20000087 Result: Up-regulated in Transcription
  misc_feature: MA Experiment 20000087 PARAMETER Experiment Name: At_100uM_ABA_Mutants_cDNA_P Parameter: Plant Line Value: WS
  misc_feature: MA Experiment 20000087 PARAMETER Experiment Name: At_100uM_ABA_Mutants_cDNA_P Parameter: Timepoint (hr) Value: 6
  misc_feature: MA Experiment 20000087 PARAMETER Experiment Name: At_100uM_ABA_Mutants_cDNA_P Parameter: Tissue Value: Aerial
  misc_feature: MA Experiment 20000087 PARAMETER Experiment Name: At_100uM_ABA_Mutants_cDNA_P Parameter: Treatment Value: 100uM ABA vs. No Treatment
  misc_feature: MA Experiment ID: 20000088 Result: Up-regulated in Transcription
  misc_feature: MA Experiment 20000088 PARAMETER Experiment Name: At_100uM_ABA_Mutants_cDNA_P Parameter: Plant Line Value: Landsberg
  misc_feature: MA Experiment 20000088 PARAMETER Experiment Name: At_100uM_ABA_Mutants_cDNA_P Parameter: Timepoint (hr) Value: 6
  misc_feature: MA Experiment 20000088 PARAMETER Experiment Name: At_100uM_ABA_Mutants_cDNA_P Parameter: Tissue Value: Aerial
  misc_feature: MA Experiment 20000088 PARAMETER Experiment Name: At_100uM_ABA_Mutants_cDNA_P Parameter: Treatment Value: 100uM ABA vs. No Treatment
  misc_feature: MA Experiment ID: 20000184 Result: Down-regulated in Transcription
  misc_feature: MA Experiment 20000184 PARAMETER Experiment Name: At_Shoots__P Parameter: Age (day) Value: 7
  misc_feature: MA Experiment 20000184 PARAMETER Experiment Name: At_Shoots__P Parameter: Tissue Value: Shoots vs. Whole Plant
  misc_feature: MA Experiment ID: 20000185 Result: Down-regulated in Transcription
  misc_feature: MA Experiment 20000185 PARAMETER Experiment Name: At_Roots__P Parameter: Age (day) Value: 7 vs. 21
  misc_feature: MA Experiment 20000185 PARAMETER Experiment Name: At_Roots__P Parameter: Organism Value: A. thaliana
  misc_feature: MA Experiment 20000185 PARAMETER Experiment Name: At_Roots__P Parameter: Tissue Value: Roots vs. Whole Plant
  misc_feature: MA Experiment ID: 20000234 Result: Down-regulated in Transcription
  misc_feature: MA Experiment 20000234 PARAMETER Experiment Name: At_Siliques_P Parameter: Age (day) Value: 21
  misc_feature: MA Experiment 20000234 PARAMETER Experiment Name: At_Siliques_P Parameter: Organism Value: A. thaliana
  misc_feature: MA Experiment 20000234 PARAMETER Experiment Name: At_Siliques_P Parameter: Plant Line Value: WS
  misc_feature: MA Experiment 20000234 PARAMETER Experiment Name: At_Siliques_P Parameter: Tissue Value: Less Than 5mm Siliques vs. Whole Plant
  misc_feature: MA Experiment ID: 20000235 Result: Down-regulated in Transcription
  misc_feature: MA Experiment 20000235 PARAMETER Experiment Name: At_Siliques_P Parameter: Age (day) Value: 21
  misc_feature: MA Experiment 20000235 PARAMETER Experiment Name: At_Siliques_P Parameter: Organism Value: A. thaliana
  misc_feature: MA Experiment 20000235 PARAMETER Experiment Name: At_Siliques_P Parameter: Plant Line Value: WS
  misc_feature: MA Experiment 20000235 PARAMETER Experiment Name: At_Siliques_P Parameter: Tissue Value: 5-10mm Siliques vs. Whole Plant
  misc_feature: MA Experiment ID: 20000265 Result: Down-regulated in Transcription
  misc_feature: MA Experiment 20000265 PARAMETER Experiment Name: At_Open_Flower_P Parameter: Age (day) Value: 21
  misc_feature: MA Experiment 20000265 PARAMETER Experiment Name: At_Open_Flower_P Parameter: Plant Line Value: WS
  misc_feature: MA Experiment 20000265 PARAMETER Experiment Name: At_Open_Flower_P Parameter: Tissue Value: Closed Flower vs. Whole Plant
  misc_feature: MA Experiment ID: 20000438 Result: Down-regulated in Transcription
  misc_feature: MA Experiment 20000438 PARAMETER Experiment Name: At_Shoots__P Parameter: Age (day) Value: 14
  misc_feature: MA Experiment 20000438 PARAMETER Experiment Name: At_Shoots__P Parameter: Tissue Value: Shoots vs. Whole Plant
  misc_feature: MA Experiment ID: 20000439 Result: Down-regulated in Transcription
  misc_feature: MA Experiment 20000439 PARAMETER Experiment Name: At_Roots__P Parameter: Age (day) Value: 14 vs. 21
  misc_feature: MA Experiment 20000439 PARAMETER Experiment Name: At_Roots__P Parameter: Organism Value: A. thaliana
  misc_feature: MA Experiment 20000439 PARAMETER Experiment Name: At_Roots__P Parameter: Tissue Value: Roots vs. Whole Plant
  misc_feature: MA Experiment ID: 20000445 Result: Up-regulated in Transcription
  misc_feature: MA Experiment 20000445 PARAMETER Experiment Name: At_100uM_NAA__P Parameter: Age (day) Value: 14
  misc_feature: MA Experiment 20000445 PARAMETER Experiment Name: At_100uM_NAA__P Parameter: Organism Value: A. thaliana
  misc_feature: MA Experiment 20000445 PARAMETER Experiment Name: At_100uM_NAA__P Parameter: Plant Line Value: WS
  misc_feature: MA Experiment 20000445 PARAMETER Experiment Name: At_100uM_NAA__P Parameter: Timepoint (hr) Value: 6
  misc_feature: MA Experiment 20000445 PARAMETER Experiment Name: At_100uM_NAA__P Parameter: Tissue Value: Aerial
  misc_feature: MA Experiment 20000445 PARAMETER Experiment Name: At_100uM_NAA__P Parameter: Treatment Value: 100uM NAA vs. No Treatment
  misc_feature: MA Experiment ID: 20000453 Result: Up-regulated in Transcription
  misc_feature: MA Experiment 20000453 PARAMETER Experiment Name: At_100uM_ABA_P Parameter: Age (day) Value: 15
  misc_feature: MA Experiment 20000453 PARAMETER Experiment Name: At_100uM_ABA_P Parameter: Organism Value: A. thaliana
  misc_feature: MA Experiment 20000453 PARAMETER Experiment Name: At_100uM_ABA_P Parameter: Plant Line Value: WS
  misc_feature: MA Experiment 20000453 PARAMETER Experiment Name: At_100uM_ABA_P Parameter: Timepoint (hr) Value: 24
  misc_feature: MA Experiment 20000453 PARAMETER Experiment Name: At_100uM_ABA_P Parameter: Tissue Value: Aerial
  misc_feature: MA Experiment 20000453 PARAMETER Experiment Name: At_100uM_ABA_P Parameter: Treatment Value: 100uM ABA vs. No Treatment
  misc_feature: MA Experiment ID: 20000456 Result: Up-regulated in Transcription
  misc_feature: MA Experiment 20000456 PARAMETER Experiment Name: At_100uM_BA_P Parameter: Age (day) Value: 14
  misc_feature: MA Experiment 20000456 PARAMETER Experiment Name: At_100uM_BA_P Parameter: Organism Value: A. thaliana
  misc_feature: MA Experiment 20000456 PARAMETER Experiment Name: At_100uM_BA_P Parameter: Plant Line Value: WS
  misc_feature: MA Experiment 20000456 PARAMETER Experiment Name: At_100uM_BA_P Parameter: Timepoint (hr) Value: 6
  misc_feature: MA Experiment 20000456 PARAMETER Experiment Name: At_100uM_BA_P Parameter: Tissue Value: Aerial
  misc_feature: MA Experiment 20000456 PARAMETER Experiment Name: At_100uM_BA_P Parameter: Treatment Value: 100uM BA vs. No Treatment
  misc_feature: MA Experiment ID: 20000527 Result: Down-regulated in Transcription
  misc_feature: MA Experiment 20000527 PARAMETER Experiment Name: At_10percent_PEG_P Parameter: Age (day) Value: 20
  misc_feature: MA Experiment 20000527 PARAMETER Experiment Name: At_10percent_PEG_P Parameter: Organism Value: A. thaliana
  misc_feature: MA Experiment 20000527 PARAMETER Experiment Name: At_10percent_PEG_P Parameter: Plant Line Value: WS
  misc_feature: MA Experiment 20000527 PARAMETER Experiment Name: At_10percent_PEG_P Parameter: Timepoint (day) Value: 20
  misc_feature: MA Experiment 20000527 PARAMETER Experiment Name: At_10percent_PEG_P Parameter: Tissue Value: Whole Plant
  misc_feature: MA Experiment 20000527 PARAMETER Experiment Name: At_10percent_PEG_P Parameter: Treatment Value: 10percent PEG vs. No Treatment
  misc_feature: MA Experiment ID: 20000709 Result: Up-regulated in Transcription
  misc_feature: MA Experiment 20000709 PARAMETER Experiment Name: At_15mM_NH4NO3_L-to-H_P Parameter: Age (hr) Value: 14
  misc_feature: MA Experiment 20000709 PARAMETER Experiment Name: At_15mM_NH4NO3_L-to-H_P Parameter: Organism Value: A. thaliana
  misc_feature: MA Experiment 20000709 PARAMETER Experiment Name: At_15mM_NH4NO3_L-to-H_P Parameter: Plant Line Value: WS
  misc_feature: MA Experiment 20000709 PARAMETER Experiment Name: At_15mM_NH4NO3_L-to-H_P Parameter: Timepoint (hr) Value: 4
  misc_feature: MA Experiment 20000709 PARAMETER Experiment Name: At_15mM_NH4NO3_L-to-H_P Parameter: Tissue Value: Aerial
  misc_feature: MA Experiment 20000709 PARAMETER Experiment Name: At_15mM_NH4NO3_L-to-H_P Parameter: Treatment Value: 15mM NH4NO3 vs. 30mM Mannitol
  misc_feature: MA Experiment ID: 20000794 Result: Down-regulated in Transcription
  misc_feature: MA Experiment 20000794 PARAMETER Experiment Name: At_Petals_P Parameter: Age (day) Value: 23-25 days
  misc_feature: MA Experiment 20000794 PARAMETER Experiment Name: At_Petals_P Parameter: Plant Line Value: WS
  misc_feature: MA Experiment 20000794 PARAMETER Experiment Name: At_Petals_P Parameter: Tissue Value: Petals vs. Whole plant
  misc_feature: MA Experiment ID: 20001557 Result: Up-regulated in Transcription
  misc_feature: MA Experiment 20001557 PARAMETER Experiment Name: At_Drought_Soil_Dry_P Parameter: Age (day) Value: 27
  misc_feature: MA Experiment 20001557 PARAMETER Experiment Name: At_Drought_Soil_Dry_P Parameter: Organism Value: A. thaliana
  misc_feature: MA Experiment 20001557 PARAMETER Experiment Name: At_Drought_Soil_Dry_P Parameter: Plant Line Value: WS
  misc_feature: MA Experiment 20001557 PARAMETER Experiment Name: At_Drought_Soil_Dry_P Parameter: Post Timepoint (hr) Value: 3
  misc_feature: MA Experiment 20001557 PARAMETER Experiment Name: At_Drought_Soil_Dry_P Parameter: Post-Treatment Value: Re-Water vs. No Drought
  misc_feature: MA Experiment 20001557 PARAMETER Experiment Name: At_Drought_Soil_Dry_P Parameter: Timepoint (day) Value: 13
  misc_feature: MA Experiment 20001557 PARAMETER Experiment Name: At_Drought_Soil_Dry_P Parameter: Treatment Value: Drought vs. No Drought
  misc_feature: MA Experiment ID: 20001757 Result: Down-regulated in Transcription
  misc_feature: MA Experiment 20001757 PARAMETER Experiment Name: At_50mM_NH4NO3_L-to-H_P Parameter: Timepoint (hr) Value: 6
  misc_feature: MA Experiment 20001757 PARAMETER Experiment Name: At_50mM_NH4NO3_L-to-H_P Parameter: Tissue Value: Leaf
  misc_feature: MA Experiment 20001757 PARAMETER Experiment Name: At_50mM_NH4NO3_L-to-H_P Parameter: Treatment Value: 50mM NH4NO3 vs 100mM Mannitol
  misc_feature: MA Experiment ID: 20001904 Result: Up-regulated in Transcription
  misc_feature: MA Experiment 20001904 PARAMETER Experiment Name: At_Drought_Reproduction_P Parameter: Age (day) Value: 37
  misc_feature: MA Experiment 20001904 PARAMETER Experiment Name: At_Drought_Reproduction_P Parameter: Organism Value: A. thaliana
  misc_feature: MA Experiment 20001904 PARAMETER Experiment Name: At_Drought_Reproduction_P Parameter: Plant Line Value: WS
  misc_feature: MA Experiment 20001904 PARAMETER Experiment Name: At_Drought_Reproduction_P Parameter: Timepoint (day) Value: 7
  misc_feature: MA Experiment 20001904 PARAMETER Experiment Name: At_Drought_Reproduction_P Parameter: Tissue Value: Rosettes
  misc_feature: MA Experiment 20001904 PARAMETER Experiment Name: At_Drought_Reproduction_P Parameter: Treatment Value: Drought vs. No Drought
  misc_feature: MA Experiment ID: 20001905 Result: Up-regulated in Transcription
  misc_feature: MA Experiment 20001905 PARAMETER Experiment Name: At_Drought_Reproduction_P Parameter: Age (day) Value: 40
  misc_feature: MA Experiment 20001905 PARAMETER Experiment Name: At_Drought_Reproduction_P Parameter: Organism Value: A. thaliana
  misc_feature: MA Experiment 20001905 PARAMETER Experiment Name: At_Drought_Reproduction_P Parameter: Plant Line Value: WS
  misc_feature: MA Experiment 20001905 PARAMETER Experiment Name: At_Drought_Reproduction_P Parameter: Timepoint (day) Value: 10
  misc_feature: MA Experiment 20001905 PARAMETER Experiment Name: At_Drought_Reproduction_P Parameter: Tissue Value: Rosettes
  misc_feature: MA Experiment 20001905 PARAMETER Experiment Name: At_Drought_Reproduction_P Parameter: Treatment Value: Drought vs. No Drought
atatgaacataacccaatctgaagatcaatcataaccttaaaccatctctcataattttagtatttctattctcaccaccaaaactcgttgatacatcacaccccaactgttgttactcatgtcctacagatcgatttaccgcactcttcgaccggtactatcatcttcggtacaatcctccggtttaggaattggaggattcaggggacatctcattagccacttgcccaatgttcggctattgagctctgacacgtcatctccggtaagtgggaataaccagccagaaaatcctatccgaacggccgatggtaaagttatatccacttattggggtatacctcctactaagatcactaaaccggacggttcagcttggaagtggaattgttttcagccatgggattcatacaaaccggatgtgtccattgatgtaactaaacatcataaaccctccaatttcactgacaaattcgcatattggaccgttcaaactctgaaaataccggttcaactattttttcagaggaagcacatgtgccatgcgatgttgctagagacggtggctgcggtgccgggaatggtcggggggatgcttttgcacttgaaatctctccggaggttcgaacatagcgggggatggatcaaagctttgctcgaagaggctgagaacgagcgtatgcatctcatgactttcatcgaactttcacaacccaaatggtacgaacgagcgattgtgttcacggtccaaggcgttttcttcaacgcatatttcctggcttatgtaatttcacccaaacttgctcatcgtatcactggatacttagaagaagaggctgtaaattcttacactgaatttctcaaagacattgatgccggaaaattcgaaaactcgccagctccagccatcgcaatcgattactggcggttgcctaaagatgcaacgcttagggatgtggtttatgttatacgagctgacgaagctcaccaccgtgatattaaccactatgcttcggatatacaattcaaaggacatgaactcaaggaagctccggctcctattggatatcattaaagattatgtgacaaagtcacaaagctgtgtatacatctatgaacatatgttgttgtggatctccatgatatttttattttatgttttcgatttatttaaaactgttattcgtttttattagctcaatatggatatttaaaccatattattttgttacgatttatgaacatagtactactcatgtgtgtgtaaaagatcatactgcctggacacgaagcggatatccggaaaaattataatatttgttttttgattcgttt

SEQ ID NO: 102433 - protein, 318 aa, Arabidopsis thaliana; identical to SEQ ID NO: 84402
  peptide (1)..(318): Ceres Seq. ID no. 13610305
  misc_feature (34)..(316): Pfam Name: Alternative oxidase Pfam Description: Alternative oxidase
  misc_feature (1)..(318): Homolog of NCBI NO: 18398395 NR Description: alternative oxidase, putative [Arabidopsis
  misc_feature (1)..(318): Homolog of NCBI NO: 21553592 NR Description: oxidase, putative [Arabidopsis thaliana]
  misc_feature (1)..(318): Homolog of NCBI NO: 18176467 NR Description: At1g32350/F5D14.4 [Arabidopsis thaliana]
  misc_feature (58)..(318): Homolog of NCBI NO: 6967043 NR Description: alternative oxidase [Populus tremula x Populus
  misc_feature (33)..(318): Homolog of NCBI NO: 29465624 NR Description: alternative oxidase 1b [Lycopersicon esculentum]
  misc_feature (65)..(318): Homolog of NCBI NO: 29465622 NR Description: alternative oxidase 1a [Lycopersicon esculentum]
  misc_feature (64)..(318): Homolog of NCBI NO: 3913066 NR Description: Alternative oxidase 2, mitochondrial precursor
  misc_feature (2)..(318): Homolog of NCBI NO: 11278947 NR Description: alternative respiratory pathway oxidase (EC
  misc_feature (66)..(318): Homolog of NCBI NO: 421824 NR Description: alternative respiratory pathway oxidase (EC
  misc_feature (66)..(318): Homolog of NCBI NO: 1872517 NR Description: alternative oxidase [Arabidopsis thaliana]

SEQ ID NO: 102434 - protein, 179 aa, Arabidopsis thaliana; identical to SEQ ID NO: 84403
  peptide (1)..(179): Ceres Seq. ID no. 13610306
  misc_feature (1)..(177): Pfam Name: Alternative oxidase Pfam Description: Alternative oxidase
  misc_feature (1)..(179): Homolog of NCBI NO: 18398395 NR Description: alternative oxidase, putative [Arabidopsis
  misc_feature (1)..(179): Homolog of NCBI NO: 21553592 NR Description: oxidase, putative [Arabidopsis thaliana]
  misc_feature (1)..(179): Homolog of NCBI NO: 18176467 NR Description: At1g32350/F5D14.4 [Arabidopsis thaliana]
  misc_feature (1)..(179): Homolog of NCBI NO: 6967043 NR Description: alternative oxidase [Populus tremula x Populus
  misc_feature (1)..(179): Homolog of NCBI NO: 29465624 NR Description: alternative oxidase 1b [Lycopersicon esculentum]
  misc_feature (1)..(179): Homolog of NCBI NO: 29465622 NR Description: alternative oxidase 1a [Lycopersicon esculentum]
  misc_feature (1)..(179): Homolog of NCBI NO: 3913066 NR Description: Alternative oxidase 2, mitochondrial precursor
  misc_feature (1)..(179): Homolog of NCBI NO: 11278947 NR Description: alternative respiratory pathway oxidase (EC
  misc_feature (1)..(179): Homolog of NCBI NO: 421824 NR Description: alternative respiratory pathway oxidase (EC
  misc_feature (1)..(179): Homolog of NCBI NO: 1872517 NR Description: alternative oxidase [Arabidopsis thaliana]

SEQ ID NO: 102435 - protein, 175 aa, Arabidopsis thaliana; identical to SEQ ID NO: 84404
  peptide (1)..(175): Ceres Seq. ID no. 13610307
  misc_feature (1)..(173): Pfam Name: Alternative oxidase Pfam Description: Alternative oxidase
  misc_feature (1)..(175): Homolog of NCBI NO: 18398395 NR Description: alternative oxidase, putative [Arabidopsis
  misc_feature (1)..(175): Homolog of NCBI NO: 21553592 NR Description: oxidase, putative [Arabidopsis thaliana]
  misc_feature (1)..(175): Homolog of NCBI NO: 18176467 NR Description: At1g32350/F5D14.4 [Arabidopsis thaliana]
  misc_feature (1)..(175): Homolog of NCBI NO: 6967043 NR Description: alternative oxidase [Populus tremula x Populus
  misc_feature (1)..(175): Homolog of NCBI NO: 29465624 NR Description: alternative oxidase 1b [Lycopersicon esculentum]
  misc_feature (1)..(175): Homolog of NCBI NO: 29465622 NR Description: alternative oxidase 1a [Lycopersicon esculentum]
  misc_feature (1)..(175): Homolog of NCBI NO: 3913066 NR Description: Alternative oxidase 2, mitochondrial precursor
  misc_feature (1)..(175): Homolog of NCBI NO: 11278947 NR Description: alternative respiratory pathway oxidase (EC
  misc_feature (1)..(175): Homolog of NCBI NO: 421824 NR Description: alternative respiratory pathway oxidase (EC
  misc_feature (1)..(175): Homolog of NCBI NO: 1872517 NR Description: alternative oxidase [Arabidopsis thaliana]

SEQ ID NO: 102436 - DNA, 795 bp, Arabidopsis thaliana
  misc_feature (1)..(795): Ceres Seq. ID no. 13610308
  misc_feature: MA Experiment ID: 108434 Result: Down-regulated in Transcription
  misc_feature: MA Experiment 108434 PARAMETER Experiment Name: At_Root_Tips_cDNA_P Parameter: Tissue Value: Root Tips
  misc_feature: MA Experiment ID: 108573 Result: Up-regulated in Transcription
  misc_feature: MA Experiment 108573 PARAMETER Experiment Name: At_Drought_cDNA_P Parameter: Timepoint (hr) Value: 6
  misc_feature: MA Experiment 108573 PARAMETER Experiment Name: At_Drought_cDNA_P Parameter: Tissue Value: Aerial
  misc_feature: MA Experiment 108573 PARAMETER Experiment Name: At_Drought_cDNA_P Parameter: Treatment Value: Drought vs. No Drought
  misc_feature: MA Experiment ID: 108595 Result: Down-regulated in Transcription
  misc_feature: MA Experiment 108595 PARAMETER Experiment Name: At_Ler-pi_Ovule_cDNA_P Parameter: Plant Line Value: null
  misc_feature: MA Experiment ID: 20000112 Result: Down-regulated in Transcription
  misc_feature: MA Experiment 20000112 PARAMETER Experiment Name: At_42deg_Heat_cDNA_P Parameter: Temperature (deg C) Value: 42 vs. 22
  misc_feature: MA Experiment 20000112 PARAMETER Experiment Name: At_42deg_Heat_cDNA_P Parameter: Timepoint (hr) Value: 2
  misc_feature: MA Experiment 20000112 PARAMETER Experiment Name: At_42deg_Heat_cDNA_P Parameter: Tissue Value: Aerial
  misc_feature: MA Experiment ID: 20000113 Result: Down-regulated in Transcription
  misc_feature: MA Experiment 20000113 PARAMETER Experiment Name: At_42deg_Heat_cDNA_P Parameter: Temperature (deg C) Value: 42 vs. 22
  misc_feature: MA Experiment 20000113 PARAMETER Experiment Name: At_42deg_Heat_cDNA_P Parameter: Timepoint (hr) Value: 8
  misc_feature: MA Experiment 20000113 PARAMETER Experiment Name: At_42deg_Heat_cDNA_P Parameter: Tissue Value: Aerial
  misc_feature: MA Experiment ID: 20000227 Result: Down-regulated in Transcription
  misc_feature: MA Experiment 20000227 PARAMETER Experiment Name: At_Root-Tips-vs-Tops_P Parameter: Tissue Value: Root Tips vs. Root Tops
atgattaatgtctgaaaaatttgatatttgaagcgaatcaacaacaacagtcgggttcgtgaaaaaaaaagatttgatcggctaaacttggtcggacttgtcaatggcagacgtacctggatacctgcgcacttgtttggatatggggaagatagctttcttagcaatccttgtatctacagggattgtgttgcagattctggcttgtgctctgttcaataactggtggccaatgctaagtgttataatgtatgtgctcctcccaatgcctttgctcttctttggtggatcagacagtacatctctattcaacgagtcagataatagttggatcaatgcagccaagttcttgactggtgcatcagcagttggaagcgtcgcgataccatcgattctaaaacacgccggactcatcggttggggcgcattagcccttgatctctcatcctacgttgtcttcctcgtggctattttgggttacatttgcataggagatgccagtgacaactattacagctacatttaaaaagacacacacaaattcatcatcatttgtttaaacctcaacaaagtctcagccttttatcacttccccgttcgattgatgcttcgaaacgaaaacatcttgtttctatggaatgactcactgattggattttcacaagtttaagagtttgtgtgtcaagtgtatgtatgaatgattttttttttgggtggttttgttacgttttgatgtatagaacatatttattatttggtggaatatatataaattttctttacaaaagcatattg

SEQ ID NO: 102437 - protein, 140 aa, Arabidopsis thaliana; identical to SEQ ID NO: 27802
  peptide (1)..(140): Ceres Seq. ID no. 13610309
  misc_feature (1)..(140): Homolog of NCBI NO: 18398420 NR Description: expressed protein [Arabidopsis thaliana] expressed protein [Arabidopsis thaliana] At1g32410/F5D14_6 [Arabidopsis thaliana]
  misc_feature (1)..(140): Homolog of NCBI NO: 21554354 NR Description: unknown [Arabidopsis thaliana]
  misc_feature (1)..(139): Homolog of NCBI NO: 25518386 NR Description: hypothetical protein F5D14.18 - Arabidopsis >gi|8920616|gb|AAF81338.1|AC007767_18 Contains similarity to a protein F19I3.26 gi|7485810 from Arabidopsis thaliana ESTs
  misc_feature (17)..(124): Homolog of NCBI NO: 12322900 NR Description: unknown protein; 72859-71336 [Arabidopsis
  misc_feature (17)..(124): Homolog of NCBI NO: 16648828 NR Description: AT3g11530/F24K9_21 [Arabidopsis thaliana] AT3g11530/F24K9_21 [Arabidopsis thaliana]
  misc_feature (23)..(124): Homolog of NCBI NO: 18399269 NR Description: expressed protein [Arabidopsis thaliana]
  misc_feature (55)..(124): Homolog of NCBI NO: 34905898 NR Description: P0458E05.25 [Oryza sativa (japonica
  misc_feature (16)..(105): Homolog of NCBI NO: 6322504 NR Description: Vacuolar Protein Sorting; Vps55p [Saccharomyces
  misc_feature (13)..(124): Homolog of NCBI NO: 19113819 NR Description: Protein with similarity to Drosophila yakuba NADH
  misc_feature (27)..(136): Homolog of NCBI NO: 13386094 NR Description: RIKEN cDNA 1520402O14 [Mus musculus] unnamed protein product [Mus musculus] unnamed protein product [Mus musculus]

SEQ ID NO: 102438 - protein, 127 aa, Arabidopsis thaliana; identical to SEQ ID NO: 27803
  peptide (1)..(127): Ceres Seq. ID no. 13610310
  misc_feature (1)..(127): Homolog of NCBI NO: 18398420 NR Description: expressed protein [Arabidopsis thaliana] expressed protein [Arabidopsis thaliana] At1g32410/F5D14_6 [Arabidopsis thaliana]
  misc_feature (1)..(127): Homolog of NCBI NO: 21554354 NR Description: unknown [Arabidopsis thaliana]
  misc_feature (1)..(126): Homolog of NCBI NO: 25518386 NR Description: hypothetical protein F5D14.18 - Arabidopsis >gi|8920616|gb|AAF81338.1|AC007767_18 Contains similarity to a protein F19I3.26 gi|7485810 from Arabidopsis thaliana ESTs
  misc_feature (4)..(111): Homolog of NCBI NO: 12322900 NR Description: unknown protein; 72859-71336 [Arabidopsis
  misc_feature (4)..(111): Homolog of NCBI NO: 16648828 NR Description: AT3g11530/F24K9_21 [Arabidopsis thaliana] AT3g11530/F24K9_21 [Arabidopsis thaliana]
  misc_feature (10)..(111): Homolog of NCBI NO: 18399269 NR Description: expressed protein [Arabidopsis thaliana]
  misc_feature (42)..(111): Homolog of NCBI NO: 34905898 NR Description: P0458E05.25 [Oryza sativa (japonica
  misc_feature (3)..(92): Homolog of NCBI NO: 6322504 NR Description: Vacuolar Protein Sorting; Vps55p [Saccharomyces
  misc_feature (1)..(111): Homolog of NCBI NO: 19113819 NR Description: Protein with similarity to Drosophila yakuba NADH
  misc_feature (14)..(123): Homolog of NCBI NO: 13386094 NR Description: RIKEN cDNA 1520402O14 [Mus musculus] unnamed protein product [Mus musculus] unnamed protein product [Mus musculus]

SEQ ID NO: 102439 - protein, 97 aa, Arabidopsis thaliana; identical to SEQ ID NO: 27804
  peptide (1)..(97): Ceres Seq. ID no. 13610311
  misc_feature (1)..(97): Homolog of NCBI NO: 18398420 NR Description: expressed protein [Arabidopsis thaliana] expressed protein [Arabidopsis thaliana] At1g32410/F5D14_6 [Arabidopsis thaliana]
  misc_feature (1)..(97): Homolog of NCBI NO: 21554354 NR Description: unknown [Arabidopsis thaliana]
  misc_feature (1)..(96): Homolog of NCBI NO: 25518386 NR Description: hypothetical protein F5D14.18 - Arabidopsis >gi|8920616|gb|AAF81338.1|AC007767_18 Contains similarity to a protein F19I3.26 gi|7485810 from Arabidopsis thaliana ESTs
  misc_feature (1)..(81): Homolog of NCBI NO: 12322900 NR Description: unknown protein; 72859-71336 [Arabidopsis
  misc_feature (1)..(81): Homolog of NCBI NO: 16648828 NR Description: AT3g11530/F24K9_21 [Arabidopsis thaliana] AT3g11530/F24K9_21 [Arabidopsis thaliana]
  misc_feature (1)..(81): Homolog of NCBI NO: 18399269 NR Description: expressed protein [Arabidopsis thaliana]
  misc_feature (12)..(81): Homolog of NCBI NO: 34905898 NR Description: P0458E05.25 [Oryza sativa (japonica
  misc_feature (1)..(62): Homolog of NCBI NO: 6322504 NR Description: Vacuolar Protein Sorting; Vps55p [Saccharomyces
  misc_feature (1)..(81): Homolog of NCBI NO: 19113819 NR Description: Protein with similarity to Drosophila yakuba NADH
  misc_feature (1)..(93): Homolog of NCBI NO: 13386094 NR Description: RIKEN cDNA 1520402O14 [Mus musculus] unnamed protein product [Mus musculus] unnamed protein product [Mus musculus]

SEQ ID NO: 102440 - DNA, 740 bp, Arabidopsis thaliana
  misc_feature (1)..(740): Ceres Seq. ID no. 13610312
  misc_feature: MA Experiment ID: 108434 Result: Down-regulated in Transcription
  misc_feature: MA Experiment 108434 PARAMETER Experiment Name: At_Root_Tips_cDNA_P Parameter: Tissue Value: Root Tips
  misc_feature: MA Experiment ID: 108435 Result: Down-regulated in Transcription
  misc_feature: MA Experiment 108435 PARAMETER Experiment Name: At_stm_Mutants_cDNA_P Parameter: Plant Line Value: wt Landsburg vs stm
  misc_feature: MA Experiment 108435 PARAMETER Experiment Name: At_stm_Mutants_cDNA_P Parameter: Tissue Value: Shoot Apical Meristem Region
  misc_feature: MA Experiment ID: 108461 Result: Up-regulated in Transcription
  misc_feature: MA Experiment 108461 PARAMETER Experiment Name: At_Germinating_Seeds_cDNA_P Parameter: Age (day) Value: 1 vs. 0
  misc_feature: MA Experiment 108461 PARAMETER Experiment Name: At_Germinating_Seeds_cDNA_P Parameter: Tissue Value: Germinating Seeds
  misc_feature: MA Experiment ID: 108462 Result: Up-regulated in Transcription
  misc_feature: MA Experiment 108462 PARAMETER Experiment Name: At_Germinating_Seeds_cDNA_P Parameter: Age (day) Value: 2 vs. 0
  misc_feature: MA Experiment 108462 PARAMETER Experiment Name: At_Germinating_Seeds_cDNA_P Parameter: Tissue Value: Germinating Seeds
  misc_feature: MA Experiment ID: 108463 Result: Up-regulated in Transcription
  misc_feature: MA Experiment 108463 PARAMETER Experiment Name: At_Germinating_Seeds_cDNA_P Parameter: Age (day) Value: 3 vs. 0
  misc_feature: MA Experiment 108463 PARAMETER Experiment Name: At_Germinating_Seeds_cDNA_P Parameter: Tissue Value: Germinating Seeds
  misc_feature: MA Experiment ID: 108464 Result: Up-regulated in Transcription
  misc_feature: MA Experiment 108464 PARAMETER Experiment Name: At_Germinating_Seeds_cDNA_P Parameter: Age (day) Value: 4 vs. 0
  misc_feature: MA Experiment 108464 PARAMETER Experiment Name: At_Germinating_Seeds_cDNA_P Parameter: Tissue Value: Germinating Seeds
  misc_feature: MA Experiment ID: 108573 Result: Down-regulated in Transcription
  misc_feature: MA Experiment 108573 PARAMETER Experiment Name: At_Drought_cDNA_P Parameter: Timepoint (hr) Value: 6
  misc_feature: MA Experiment 108573 PARAMETER Experiment Name: At_Drought_cDNA_P Parameter: Tissue Value: Aerial
  misc_feature: MA Experiment 108573 PARAMETER Experiment Name: At_Drought_cDNA_P Parameter: Treatment Value: Drought vs. No Drought
  misc_feature: MA Experiment ID: 108595 Result: Down-regulated in Transcription
  misc_feature: MA Experiment 108595 PARAMETER Experiment Name: At_Ler-pi_Ovule_cDNA_P Parameter: Plant Line Value: null
  misc_feature: MA Experiment ID: 20000069 Result: Down-regulated in Transcription
  misc_feature: MA Experiment 20000069 PARAMETER Experiment Name: At_100uM_ABA_Mutants_cDNA_P Parameter: Plant Line Value: CS23
  misc_feature: MA Experiment 20000069 PARAMETER Experiment Name: At_100uM_ABA_Mutants_cDNA_P Parameter: Timepoint (hr) Value: 6
  misc_feature: MA Experiment 20000069 PARAMETER Experiment Name: At_100uM_ABA_Mutants_cDNA_P Parameter: Tissue Value: Aerial
  misc_feature: MA Experiment 20000069 PARAMETER Experiment Name: At_100uM_ABA_Mutants_cDNA_P Parameter: Treatment Value: 100uM ABA vs. No Treatment
  misc_feature: MA Experiment ID: 20000070 Result: Down-regulated in Transcription
  misc_feature: MA Experiment 20000070 PARAMETER Experiment Name: At_100uM_ABA_Mutants_cDNA_P Parameter: Plant Line Value: CS24
  misc_feature: MA Experiment 20000070 PARAMETER Experiment Name: At_100uM_ABA_Mutants_cDNA_P Parameter: Timepoint (hr) Value: 6
  misc_feature: MA Experiment 20000070 PARAMETER Experiment Name: At_100uM_ABA_Mutants_cDNA_P Parameter: Tissue Value: Aerial
  misc_feature: MA Experiment 20000070 PARAMETER Experiment Name: At_100uM_ABA_Mutants_cDNA_P Parameter: Treatment Value: 100uM ABA vs. No Treatment
  misc_feature: MA Experiment ID: 20000071 Result: Down-regulated in Transcription
  misc_feature: MA Experiment 20000071 PARAMETER Experiment Name: At_100uM_ABA_Mutants_cDNA_P Parameter: Plant Line Value: CS8104
  misc_feature: MA Experiment 20000071 PARAMETER Experiment Name: At_100uM_ABA_Mutants_cDNA_P Parameter: Timepoint (hr) Value: 6
  misc_feature: MA Experiment 20000071 PARAMETER Experiment Name: At_100uM_ABA_Mutants_cDNA_P Parameter: Tissue Value: Aerial
  misc_feature: MA Experiment 20000071 PARAMETER Experiment Name: At_100uM_ABA_Mutants_cDNA_P Parameter: Treatment Value: 100uM ABA vs. No Treatment
  misc_feature: MA Experiment ID: 20000072 Result: Down-regulated in Transcription
  misc_feature: MA Experiment 20000072 PARAMETER Experiment Name: At_100uM_ABA_Mutants_cDNA_P Parameter: Plant Line Value: CS8105
  misc_feature: MA Experiment 20000072 PARAMETER Experiment Name: At_100uM_ABA_Mutants_cDNA_P Parameter: Timepoint (hr) Value: 6
  misc_feature: MA Experiment 20000072 PARAMETER Experiment Name: At_100uM_ABA_Mutants_cDNA_P Parameter: Tissue Value: Aerial
  misc_feature: MA Experiment 20000072 PARAMETER Experiment Name: At_100uM_ABA_Mutants_cDNA_P Parameter: Treatment Value: 100uM ABA vs. No Treatment
  misc_feature: MA Experiment ID: 20000086 Result: Down-regulated in Transcription
  misc_feature: MA Experiment 20000086 PARAMETER Experiment Name: At_100uM_ABA_Mutants_cDNA_P Parameter: Plant Line Value: CS22
  misc_feature: MA Experiment 20000086 PARAMETER Experiment Name: At_100uM_ABA_Mutants_cDNA_P Parameter: Timepoint (hr) Value: 6
  misc_feature: MA Experiment 20000086 PARAMETER Experiment Name: At_100uM_ABA_Mutants_cDNA_P Parameter: Tissue Value: Aerial
  misc_feature: MA Experiment 20000086 PARAMETER Experiment Name: At_100uM_ABA_Mutants_cDNA_P Parameter: Treatment Value: 100uM ABA vs. No Treatment
  misc_feature: MA Experiment ID: 20000087 Result: Down-regulated in Transcription
  misc_feature: MA Experiment 20000087 PARAMETER Experiment Name: At_100uM_ABA_Mutants_cDNA_P Parameter: Plant Line Value: WS
  misc_feature: MA Experiment 20000087 PARAMETER Experiment Name: At_100uM_ABA_Mutants_cDNA_P Parameter: Timepoint (hr) Value: 6
  misc_feature: MA Experiment 20000087 PARAMETER Experiment Name: At_100uM_ABA_Mutants_cDNA_P Parameter: Tissue Value: Aerial
  misc_feature: MA Experiment 20000087 PARAMETER Experiment Name: At_100uM_ABA_Mutants_cDNA_P Parameter: Treatment Value: 100uM ABA vs. No Treatment
  misc_feature: MA Experiment ID: 20000088 Result: Down-regulated in Transcription
  misc_feature: MA Experiment 20000088 PARAMETER Experiment Name: At_100uM_ABA_Mutants_cDNA_P Parameter: Plant Line Value: Landsberg
  misc_feature: MA Experiment 20000088 PARAMETER Experiment Name: At_100uM_ABA_Mutants_cDNA_P Parameter: Timepoint (hr) Value: 6
  misc_feature: MA Experiment 20000088 PARAMETER Experiment Name: At_100uM_ABA_Mutants_cDNA_P Parameter: Tissue Value: Aerial
  misc_feature: MA Experiment 20000088 PARAMETER Experiment Name: At_100uM_ABA_Mutants_cDNA_P Parameter: Treatment Value: 100uM ABA vs. No Treatment
  misc_feature: MA Experiment ID: 20000090 Result: Down-regulated in Transcription
  misc_feature: MA Experiment ID: 20000117 Result: Down-regulated in Transcription
  misc_feature: MA Experiment 20000117 PARAMETER Experiment Name: At_100uM_ABA_Mutants_cDNA_P Parameter: Plant Line Value: Columbia
  misc_feature: MA Experiment 20000117 PARAMETER Experiment Name: At_100uM_ABA_Mutants_cDNA_P Parameter: Timepoint (hr) Value: 6
  misc_feature: MA Experiment 20000117 PARAMETER Experiment Name: At_100uM_ABA_Mutants_cDNA_P Parameter: Tissue Value: Aerial
  misc_feature: MA Experiment 20000117 PARAMETER Experiment Name: At_100uM_ABA_Mutants_cDNA_P Parameter: Treatment Value: 100uM ABA vs. No Treatment
  misc_feature: MA Experiment ID: 20000179 Result: Up-regulated in Transcription
  misc_feature: MA Experiment 20000179 PARAMETER Experiment Name: At_Germinating_Seeds_P Parameter: Age (hr) Value: 6 vs. 0
  misc_feature: MA Experiment 20000179 PARAMETER Experiment Name: At_Germinating_Seeds_P Parameter: Tissue Value: Germinating Seeds
  misc_feature: MA Experiment ID: 20000180 Result: Up-regulated in Transcription
  misc_feature: MA Experiment 20000180 PARAMETER Experiment Name: At_Germinating_Seeds_P Parameter: Age (hr) Value: 24 vs. 0
  misc_feature: MA Experiment 20000180 PARAMETER Experiment Name: At_Germinating_Seeds_P Parameter: Tissue Value: Germinating Seeds
  misc_feature: MA Experiment ID: 20000185 Result: Down-regulated in Transcription
  misc_feature: MA Experiment 20000185 PARAMETER Experiment Name: At_Roots__P Parameter: Age (day) Value: 7 vs. 21
  misc_feature: MA Experiment 20000185 PARAMETER Experiment Name: At_Roots__P Parameter: Organism Value: A. thaliana
  misc_feature: MA Experiment 20000185 PARAMETER Experiment Name: At_Roots__P Parameter: Tissue Value: Roots vs. Whole Plant
  misc_feature: MA Experiment ID: 20000224 Result: Up-regulated in Transcription
  misc_feature: MA Experiment ID: 20000227 Result: Down-regulated in Transcription
  misc_feature: MA Experiment 20000227 PARAMETER Experiment Name: At_Root-Tips-vs-Tops_P Parameter: Tissue Value: Root Tips vs. Root Tops
  misc_feature: MA Experiment ID: 20000437 Result: Down-regulated in Transcription
  misc_feature: MA Experiment 20000437 PARAMETER Experiment Name: At_Drought_P Parameter: Age (day) Value: 8
  misc_feature: MA Experiment 20000437 PARAMETER Experiment Name: At_Drought_P Parameter: Organism Value: A. thaliana
  misc_feature: MA Experiment 20000437 PARAMETER Experiment Name: At_Drought_P Parameter: Plant Line Value: WS
  misc_feature: MA Experiment 20000437 PARAMETER Experiment Name: At_Drought_P Parameter: Timepoint (hr) Value: 24
  misc_feature: MA Experiment 20000437 PARAMETER Experiment Name: At_Drought_P Parameter: Tissue Value: Whole Plant
  misc_feature: MA Experiment 20000437 PARAMETER Experiment Name: At_Drought_P Parameter: Treatment Value: Drought vs. No Drought
  misc_feature: MA Experiment ID: 20000439 Result: Down-regulated in Transcription
  misc_feature: MA Experiment 20000439 PARAMETER Experiment Name: At_Roots__P Parameter: Age (day) Value: 14 vs. 21
  misc_feature: MA Experiment 20000439 PARAMETER Experiment Name: At_Roots__P Parameter: Organism Value: A. thaliana
  misc_feature: MA Experiment 20000439 PARAMETER Experiment Name: At_Roots__P Parameter: Tissue Value: Roots vs. Whole Plant
  misc_feature: MA Experiment ID: 20000794 Result: Down-regulated in Transcription
  misc_feature: MA Experiment 20000794 PARAMETER Experiment Name: At_Petals_P Parameter: Age (day) Value: 23-25 days
  misc_feature: MA Experiment 20000794 PARAMETER Experiment Name: At_Petals_P Parameter: Plant Line Value: WS
  misc_feature: MA Experiment 20000794 PARAMETER Experiment Name: At_Petals_P Parameter: Tissue Value: Petals vs. Whole plant
  misc_feature: MA Experiment ID: 20001555 Result: Down-regulated in Transcription
  misc_feature: MA Experiment 20001555 PARAMETER Experiment Name: At_Drought_Soil_Dry_P Parameter: Age (day) Value: 24
  misc_feature: MA Experiment 20001555 PARAMETER Experiment Name: At_Drought_Soil_Dry_P Parameter: Organism Value: A. thaliana
  misc_feature: MA Experiment 20001555 PARAMETER Experiment Name: At_Drought_Soil_Dry_P Parameter: Plant Line Value: WS
  misc_feature: MA Experiment 20001555 PARAMETER Experiment Name: At_Drought_Soil_Dry_P Parameter: Post Timepoint (hr) Value: None
  misc_feature: MA Experiment 20001555 PARAMETER Experiment Name: At_Drought_Soil_Dry_P Parameter: Post-Treatment Value: None
  misc_feature: MA Experiment 20001555 PARAMETER Experiment Name: At_Drought_Soil_Dry_P Parameter: Timepoint (day) Value: 10
  misc_feature: MA Experiment 20001555 PARAMETER Experiment Name: At_Drought_Soil_Dry_P Parameter: Treatment Value: Drought vs. No Drought
  misc_feature: MA Experiment ID: 20001557 Result: Down-regulated in Transcription
  misc_feature: MA Experiment 20001557 PARAMETER Experiment Name: At_Drought_Soil_Dry_P Parameter: Age (day) Value: 27
  misc_feature: MA Experiment 20001557 PARAMETER Experiment Name: At_Drought_Soil_Dry_P Parameter: Organism Value: A. thaliana
  misc_feature: MA Experiment 20001557 PARAMETER Experiment Name: At_Drought_Soil_Dry_P Parameter: Plant Line Value: WS
  misc_feature: MA Experiment 20001557 PARAMETER Experiment Name: At_Drought_Soil_Dry_P Parameter: Post Timepoint (hr) Value: 3
  misc_feature: MA Experiment 20001557 PARAMETER Experiment Name: At_Drought_Soil_Dry_P Parameter: Post-Treatment Value: Re-Water vs. No Drought
  misc_feature: MA Experiment 20001557 PARAMETER Experiment Name: At_Drought_Soil_Dry_P Parameter: Timepoint (day) Value: 13
  misc_feature: MA Experiment 20001557 PARAMETER Experiment Name: At_Drought_Soil_Dry_P Parameter: Treatment Value: Drought vs. No Drought
  misc_feature: MA Experiment ID: 20001559 Result: Down-regulated in Transcription
  misc_feature: MA Experiment 20001559 PARAMETER Experiment Name: At_Drought_Soil_Dry_P Parameter: Age (day) Value: 28
  misc_feature: MA Experiment 20001559 PARAMETER Experiment Name: At_Drought_Soil_Dry_P Parameter: Organism Value: A. thaliana
  misc_feature: MA Experiment 20001559 PARAMETER Experiment Name: At_Drought_Soil_Dry_P Parameter: Plant Line Value: WS
  misc_feature: MA Experiment 20001559 PARAMETER Experiment Name: At_Drought_Soil_Dry_P Parameter: Post Timepoint (hr) Value: 29
  misc_feature: MA Experiment 20001559 PARAMETER Experiment Name: At_Drought_Soil_Dry_P Parameter: Post-Treatment Value: Re-Water vs. No Drought
  misc_feature: MA Experiment 20001559 PARAMETER Experiment Name: At_Drought_Soil_Dry_P Parameter: Timepoint (day) Value: 14
  misc_feature: MA Experiment 20001559 PARAMETER Experiment Name: At_Drought_Soil_Dry_P Parameter: Treatment Value: Drought vs. No Drought
  misc_feature: MA Experiment ID: 20001757 Result: Up-regulated in Transcription
  misc_feature: MA Experiment 20001757 PARAMETER Experiment Name: At_50mM_NH4NO3_L-to-H_P Parameter: Timepoint (hr) Value: 6
  misc_feature: MA Experiment 20001757 PARAMETER Experiment Name: At_50mM_NH4NO3_L-to-H_P Parameter: Tissue Value: Leaf
  misc_feature: MA Experiment 20001757 PARAMETER Experiment Name: At_50mM_NH4NO3_L-to-H_P Parameter: Treatment Value: 50mM NH4NO3 vs 100mM Mannitol
  misc_feature: MA Experiment ID: 20001905 Result: Down-regulated in Transcription
  misc_feature: MA Experiment 20001905 PARAMETER Experiment Name: At_Drought_Reproduction_P Parameter: Age (day) Value: 40
  misc_feature: MA Experiment 20001905 PARAMETER Experiment Name: At_Drought_Reproduction_P Parameter: Organism Value: A. thaliana
  misc_feature: MA Experiment 20001905 PARAMETER Experiment Name: At_Drought_Reproduction_P Parameter: Plant Line Value: WS
  misc_feature: MA Experiment 20001905 PARAMETER Experiment Name: At_Drought_Reproduction_P Parameter: Timepoint (day) Value: 10
  misc_feature: MA Experiment 20001905 PARAMETER Experiment Name: At_Drought_Reproduction_P Parameter: Tissue Value: Rosettes
  misc_feature: MA Experiment 20001905 PARAMETER Experiment Name: At_Drought_Reproduction_P Parameter: Treatment Value: Drought vs. No Drought
  misc_feature: MA Experiment ID: 20001906 Result: Down-regulated in Transcription
  misc_feature: MA Experiment 20001906 PARAMETER Experiment Name: At_Drought_Reproduction_P Parameter: Age (day) Value: 35
  misc_feature: MA Experiment 20001906 PARAMETER Experiment Name: At_Drought_Reproduction_P Parameter: Organism Value: A. thaliana
  misc_feature: MA Experiment 20001906 PARAMETER Experiment Name: At_Drought_Reproduction_P Parameter: Plant Line Value: WS
  misc_feature: MA Experiment 20001906 PARAMETER Experiment Name: At_Drought_Reproduction_P Parameter: Timepoint (day) Value: 5
  misc_feature: MA Experiment 20001906 PARAMETER Experiment Name: At_Drought_Reproduction_P Parameter: Tissue Value: Siliques
  misc_feature: MA Experiment 20001906 PARAMETER Experiment Name: At_Drought_Reproduction_P Parameter: Treatment Value: Drought vs. No Drought
  misc_feature: MA Experiment ID: 20001908 Result: Down-regulated in Transcription
  misc_feature: MA Experiment 20001908 PARAMETER Experiment Name: At_Drought_Reproduction_P Parameter: Age (day) Value: 40
  misc_feature: MA Experiment 20001908 PARAMETER Experiment Name: At_Drought_Reproduction_P Parameter: Organism Value: A. thaliana
  misc_feature: MA Experiment 20001908 PARAMETER Experiment Name: At_Drought_Reproduction_P Parameter: Plant Line Value: WS
  misc_feature: MA Experiment 20001908 PARAMETER Experiment Name: At_Drought_Reproduction_P Parameter: Timepoint (day) Value: 10
  misc_feature: MA Experiment 20001908 PARAMETER Experiment Name: At_Drought_Reproduction_P Parameter: Tissue Value: Siliques
  misc_feature: MA Experiment 20001908 PARAMETER Experiment Name: At_Drought_Reproduction_P Parameter: Treatment Value: Drought vs. No Drought
  misc_feature: MA Experiment ID: 20001911 Result: Down-regulated in Transcription
  misc_feature: MA Experiment 20001911 PARAMETER Experiment Name: At_Drought_Reproduction_P Parameter: Age (day) Value: 40
  misc_feature: MA Experiment 20001911 PARAMETER Experiment Name: At_Drought_Reproduction_P Parameter: Organism Value: A. thaliana
  misc_feature: MA Experiment 20001911 PARAMETER Experiment Name: At_Drought_Reproduction_P Parameter: Plant Line Value: WS
  misc_feature: MA Experiment 20001911 PARAMETER Experiment Name: At_Drought_Reproduction_P Parameter: Timepoint (day) Value: 10
  misc_feature: MA Experiment 20001911 PARAMETER Experiment Name: At_Drought_Reproduction_P Parameter: Tissue Value: Flowers
  misc_feature: MA Experiment 20001911 PARAMETER Experiment Name: At_Drought_Reproduction_P Parameter: Treatment Value: Drought vs. No Drought
aattaagatctctctttactgttttcccacttttcctttgagaaaactcaaaacaaagtaaacaaacaaaccagaaaaaggaatggcactgagaatgtgggcttcctctacagcaaatgctctcaagctctcttcttctgcctccaaatctcatctcttgccagctttctccatctccagatgcttctcctcagtgttggaaggacttaagtatgcaaattcacatgagtgggtgaaacatgaaggctcagttgctacaattggtatcactgaccatgcgcaggaccatttaggagaagttgtgtttgtggagctgcctgaagcaaacagttcagtgagcaaagaaaaaagctttggagctgttgagagtgttaaggccacaagtgagattctatctccaatctctggtgaagtcattgaggttaacacaaagctcaccgagtcacctggtttgatcaactcaagcccttatgaagatggttggatgataaaggtgaaaccgagcagccccgcggagttggaagctctgatgggtccaaaggaatacaccaagttctgcgaagaagaagacgctgctcactagggtttcttcgccttttatctttcccaaatgttcgaaaaacagagcaaaacaagagaatccatgctttagtttcaatctttcatttctcaatgtttcttaccactctcaacttgtatcagtgtgatactaatttgattaaaagatcatccaatgagac

SEQ ID NO: 102441 - protein, 166 aa, Arabidopsis thaliana; identical to SEQ ID NO: 35439
  peptide (1)..(166): Ceres Seq. ID no. 13610313
  misc_feature (42)..(162): Pfam Name: Glycine cleavage H-protein Pfam Description: Glycine cleavage H-protein
  misc_feature (1)..(166): Homolog of NCBI NO: 15223217 NR Description: glycine cleavage system H protein precursor [Arabidopsis thaliana] >gi|12644523|sp|Q9LQL0|GCSI_ARATH Probable
  misc_feature (1)..(166): Homolog of NCBI NO: 15226973 NR Description: glycine decarboxylase complex H-protein thaliana] >gi|121075|sp|P25855|GCSH_ARATH Glycine cleavage system protein 1, mitochondrial precursor >gi|25295838|pir||G84767
  misc_feature (1)..(166): Homolog of NCBI NO: 121080 NR Description: Glycine cleavage system H protein, mitochondrial
  misc_feature (1)..(166): Homolog of NCBI NO: 2499417 NR Description: Glycine cleavage system H protein, mitochondrial
  misc_feature (1)..(166): Homolog of NCBI NO: 2147453 NR Description: glycine cleavage system protein H precursor HFC1) - Flaveria cronquistii >gi|7441692|pir||S60199 glycine
  misc_feature (1)..(166): Homolog of NCBI NO: 2887286 NR Description: H protein [Flaveria anomala]
  misc_feature (1)..(166): Homolog of NCBI NO: 1346118 NR Description: Glycine cleavage system H protein, mitochondrial >gi|2119599|pir||S60194 glycine cleavage system protein H
  misc_feature (1)..(166): Homolog of NCBI NO: 3688309 NR Description: H-Protein precursor [Flaveria pringlei]
  misc_feature (2)..(166): Homolog of NCBI NO: 2119600 NR Description: glycine cleavage system protein H precursor
  misc_feature (1)..(165): Homolog of NCBI NO: 1362140 NR Description: H-protein precursor - Flaveria trinervia

SEQ ID NO: 102442 - protein, 162 aa, Arabidopsis thaliana; identical to SEQ ID NO: 35440
  peptide (1)..(162): Ceres Seq. ID no. 13610314
  misc_feature (38)..(158): Pfam Name: Glycine cleavage H-protein Pfam Description: Glycine cleavage H-protein
  misc_feature (1)..(162): Homolog of NCBI NO: 15223217 NR Description: glycine cleavage system H protein precursor [Arabidopsis thaliana] >gi|12644523|sp|Q9LQL0|GCSI_ARATH Probable
  misc_feature (1)..(162): Homolog of NCBI NO: 15226973 NR Description: glycine decarboxylase complex H-protein thaliana] >gi|121075|sp|P25855|GCSH_ARATH Glycine cleavage system protein 1, mitochondrial precursor >gi|25295838|pir||G84767
  misc_feature (1)..(162): Homolog of NCBI NO: 121080 NR Description: Glycine cleavage system H protein, mitochondrial
  misc_feature (1)..(162): Homolog of NCBI NO: 2499417 NR Description: Glycine cleavage system H protein, mitochondrial
  misc_feature (1)..(162): Homolog of NCBI NO: 2147453 NR Description: glycine cleavage system protein H precursor HFC1) - Flaveria cronquistii >gi|7441692|pir||S60199 glycine
  misc_feature (1)..(162): Homolog of NCBI NO: 2887286 NR Description: H protein [Flaveria anomala]
  misc_feature (1)..(162): Homolog of NCBI NO: 1346118 NR Description: Glycine cleavage system H protein, mitochondrial >gi|2119599|pir||S60194 glycine cleavage system protein H
  misc_feature (1)..(162): Homolog of NCBI NO: 3688309 NR Description: H-Protein precursor [Flaveria pringlei]
  misc_feature (1)..(162): Homolog of NCBI NO: 2119600 NR Description: glycine cleavage system protein H precursor
  misc_feature (1)..(161): Homolog of NCBI NO: 1362140 NR Description: H-protein precursor - Flaveria trinervia

SEQ ID NO: 102443 - DNA, 1111 bp, Arabidopsis thaliana
  misc_feature (1)..(1111): Ceres Seq. ID no. 13610319
  misc_feature: MA Experiment ID: 20000184 Result: Down-regulated in Transcription
  misc_feature: MA Experiment 20000184 PARAMETER Experiment Name: At_Shoots__P Parameter: Age (day) Value: 7
  misc_feature: MA Experiment 20000184 PARAMETER Experiment Name: At_Shoots__P Parameter: Tissue Value: Shoots vs. Whole Plant
  misc_feature: MA Experiment ID: 20000234 Result: Down-regulated in Transcription
  misc_feature: MA Experiment 20000234 PARAMETER Experiment Name: At_Siliques_P Parameter: Age (day) Value: 21
  misc_feature: MA Experiment 20000234 PARAMETER Experiment Name: At_Siliques_P Parameter: Organism Value: A. thaliana
  misc_feature: MA Experiment 20000234 PARAMETER Experiment Name: At_Siliques_P Parameter: Plant Line Value: WS
  misc_feature: MA Experiment 20000234 PARAMETER Experiment Name: At_Siliques_P Parameter: Tissue Value: Less Than 5mm Siliques vs. Whole Plant
  misc_feature: MA Experiment ID: 20000235 Result: Down-regulated in Transcription
  misc_feature: MA Experiment 20000235 PARAMETER Experiment Name: At_Siliques_P Parameter: Age (day) Value: 21
  misc_feature: MA Experiment 20000235 PARAMETER Experiment Name: At_Siliques_P Parameter: Organism Value: A. thaliana
  misc_feature: MA Experiment 20000235 PARAMETER Experiment Name: At_Siliques_P Parameter: Plant Line Value: WS
  misc_feature: MA Experiment 20000235 PARAMETER Experiment Name: At_Siliques_P Parameter: Tissue Value: 5-10mm Siliques vs. Whole Plant
  misc_feature: MA Experiment ID: 20000441 Result: Up-regulated in Transcription
  misc_feature: MA Experiment 20000441 PARAMETER Experiment Name: At_1uM_BR-BRZ__P Parameter: Tissue Value: Shoot Apices
  misc_feature: MA Experiment 20000441 PARAMETER Experiment Name: At_1uM_BR-BRZ__P Parameter: Treatment Value: 1uM BR vs. No Treatment
  misc_feature: MA Experiment ID: 20000794 Result: Up-regulated in Transcription
  misc_feature: MA Experiment 20000794 PARAMETER Experiment Name: At_Petals_P Parameter: Age (day) Value: 23-25 days
  misc_feature: MA Experiment 20000794 PARAMETER Experiment Name: At_Petals_P Parameter: Plant Line Value: WS
  misc_feature: MA Experiment 20000794 PARAMETER Experiment Name: At_Petals_P Parameter: Tissue Value: Petals vs. Whole plant
  misc_feature: MA Experiment ID: 20001248 Result: Up-regulated in Transcription
  misc_feature: MA Experiment 20001248 PARAMETER Experiment Name: At_Far-red-induction_P Parameter: Age (day) Value: 7
  misc_feature: MA Experiment 20001248 PARAMETER Experiment Name: At_Far-red-induction_P Parameter: Light Value: Far-red vs. White
  misc_feature: MA Experiment 20001248 PARAMETER Experiment Name: At_Far-red-induction_P Parameter: Organism Value: A. thaliana
  misc_feature: MA Experiment 20001248 PARAMETER Experiment Name: At_Far-red-induction_P Parameter: Plant Line Value: Columbia
  misc_feature: MA Experiment 20001248 PARAMETER Experiment Name: At_Far-red-induction_P Parameter: Timepoint (hr) Value: 4
  misc_feature: MA Experiment 20001248 PARAMETER Experiment Name: At_Far-red-induction_P Parameter: Tissue Value: Whole Plant
  misc_feature: MA Experiment ID: 20001450 Result: Up-regulated in Transcription
  misc_feature: MA Experiment 20001450 PARAMETER Experiment Name: At_Far-red-induction_P Parameter: Age (day) Value: 7
  misc_feature: MA Experiment 20001450 PARAMETER Experiment Name: At_Far-red-induction_P Parameter: Light Value: Far-red vs. White
  misc_feature: MA Experiment 20001450 PARAMETER Experiment Name: At_Far-red-induction_P Parameter: Organism Value: A. thaliana
  misc_feature: MA Experiment 20001450 PARAMETER Experiment Name: At_Far-red-induction_P Parameter: Plant Line Value: Columbia
  misc_feature: MA Experiment 20001450 PARAMETER Experiment Name: At_Far-red-induction_P Parameter: Timepoint (hr) Value: 8
  misc_feature: MA Experiment 20001450 PARAMETER Experiment Name: At_Far-red-induction_P Parameter: Tissue Value: Whole Plant
  misc_feature: MA Experiment ID: 20001556 Result: Down-regulated in Transcription
  misc_feature: MA Experiment 20001556 PARAMETER Experiment Name: At_Drought_Soil_Dry_P Parameter: Age (day) Value: 26
  misc_feature: MA Experiment 20001556 PARAMETER Experiment Name: At_Drought_Soil_Dry_P Parameter: Organism Value: A. thaliana
  misc_feature: MA Experiment 20001556 PARAMETER Experiment Name: At_Drought_Soil_Dry_P Parameter: Plant Line Value: WS
  misc_feature: MA Experiment 20001556 PARAMETER Experiment Name: At_Drought_Soil_Dry_P Parameter: Post Timepoint (hr) Value: None
  misc_feature: MA Experiment 20001556 PARAMETER Experiment Name: At_Drought_Soil_Dry_P Parameter: Post-Treatment Value: None
  misc_feature: MA Experiment 20001556 PARAMETER Experiment Name: At_Drought_Soil_Dry_P Parameter: Timepoint (day) Value: 12
  misc_feature: MA Experiment 20001556 PARAMETER Experiment Name: At_Drought_Soil_Dry_P Parameter: Treatment Value: Drought vs. No Drought
  misc_feature: MA Experiment ID: 20001557 Result: Down-regulated in Transcription
  misc_feature: MA Experiment 20001557 PARAMETER Experiment Name: At_Drought_Soil_Dry_P Parameter: Age (day) Value: 27
  misc_feature: MA Experiment 20001557 PARAMETER Experiment Name: At_Drought_Soil_Dry_P Parameter: Organism Value: A. thaliana
  misc_feature: MA Experiment 20001557 PARAMETER Experiment Name: At_Drought_Soil_Dry_P Parameter: Plant Line Value: WS
  misc_feature: MA Experiment 20001557 PARAMETER Experiment Name: At_Drought_Soil_Dry_P Parameter: Post Timepoint (hr) Value: 3
  misc_feature: MA Experiment 20001557 PARAMETER Experiment Name: At_Drought_Soil_Dry_P Parameter: Post-Treatment Value: Re-Water vs. No Drought
  misc_feature: MA Experiment 20001557 PARAMETER Experiment Name: At_Drought_Soil_Dry_P Parameter: Timepoint (day) Value: 13
  misc_feature: MA Experiment 20001557 PARAMETER Experiment Name: At_Drought_Soil_Dry_P Parameter: Treatment Value: Drought vs. No Drought
  misc_feature: MA Experiment ID: 20001558 Result: Down-regulated in Transcription
  misc_feature: MA Experiment 20001558 PARAMETER Experiment Name: At_Drought_Soil_Dry_P Parameter: Age (day) Value: 27
  misc_feature: MA Experiment 20001558 PARAMETER Experiment Name: At_Drought_Soil_Dry_P Parameter: Organism Value: A. thaliana
  misc_feature: MA Experiment 20001558 PARAMETER Experiment Name: At_Drought_Soil_Dry_P Parameter: Plant Line Value: WS
  misc_feature: MA Experiment 20001558 PARAMETER Experiment Name: At_Drought_Soil_Dry_P Parameter: Post Timepoint (hr) Value: 6
  misc_feature: MA Experiment 20001558 PARAMETER Experiment Name: At_Drought_Soil_Dry_P Parameter: Post-Treatment Value: Re-Water vs. No Drought
  misc_feature: MA Experiment 20001558 PARAMETER Experiment Name: At_Drought_Soil_Dry_P Parameter: Timepoint (day) Value: 13
  misc_feature: MA Experiment 20001558 PARAMETER Experiment Name: At_Drought_Soil_Dry_P Parameter: Treatment Value: Drought vs. No Drought
  misc_feature: MA Experiment ID: 20001559 Result: Down-regulated in Transcription
  misc_feature: MA Experiment 20001559 PARAMETER Experiment Name: At_Drought_Soil_Dry_P Parameter: Age (day) Value: 28
  misc_feature: MA Experiment 20001559 PARAMETER Experiment Name: At_Drought_Soil_Dry_P Parameter: Organism Value: A. thaliana
  misc_feature: MA Experiment 20001559 PARAMETER Experiment Name: At_Drought_Soil_Dry_P Parameter: Plant Line Value: WS
  misc_feature: MA Experiment 20001559 PARAMETER Experiment Name: At_Drought_Soil_Dry_P Parameter: Post Timepoint (hr) Value: 29
  misc_feature: MA Experiment 20001559 PARAMETER Experiment Name: At_Drought_Soil_Dry_P Parameter: Post-Treatment Value: Re-Water vs. No Drought
  misc_feature: MA Experiment 20001559 PARAMETER Experiment Name: At_Drought_Soil_Dry_P Parameter: Timepoint (day) Value: 14
  misc_feature: MA Experiment 20001559 PARAMETER Experiment Name: At_Drought_Soil_Dry_P Parameter: Treatment Value: Drought vs. No Drought
  misc_feature: MA Experiment ID: 20001560 Result: Down-regulated in Transcription
  misc_feature: MA Experiment 20001560 PARAMETER Experiment Name: At_Drought_Soil_Dry_P Parameter: Age (day) Value: 28
  misc_feature: MA Experiment 20001560 PARAMETER Experiment Name: At_Drought_Soil_Dry_P Parameter: Organism Value: A. thaliana
  misc_feature: MA Experiment 20001560 PARAMETER Experiment Name: At_Drought_Soil_Dry_P Parameter: Plant Line Value: WS
  misc_feature: MA Experiment 20001560 PARAMETER Experiment Name: At_Drought_Soil_Dry_P Parameter: Post Timepoint (hr) Value: None
  misc_feature: MA Experiment 20001560 PARAMETER Experiment Name: At_Drought_Soil_Dry_P Parameter: Post-Treatment Value: None
  misc_feature: MA Experiment 20001560 PARAMETER Experiment Name: At_Drought_Soil_Dry_P Parameter: Timepoint (day) Value: 14
  misc_feature: MA Experiment 20001560 PARAMETER Experiment Name: At_Drought_Soil_Dry_P Parameter: Treatment Value: Drought vs. No Drought
gactcttcgctcttctttttacacgaacacttctctctctctctcctcactctctttcctctttctctcactaaagaaaaaactagcgatcgaagagaatcatcatcaagaagctactatcagagaaatcaaagccctacaacacaagaatcaacatgggagctgaagaagaaaccaataagacatatcctcattggctaaaacctctgctacgagaaaagttctttgtacaatgcaaattacacgcagattcacataagagtgaatgtaacatgtactgtttagactgtaccaatggtcctctctgttctctctgcttatctttccacaaagaccatcacgccattcagataagaagatcatcatatcacgatgttataagagtgtcggagattcagaagtttctggacataacaggagttcagacatatgtgatcaacagtgctaaggttgtgttcttgaacgagagacctcagcctcgaccaggcaaaggtgtgatcaatacttgtgaagtctgttatcgaagcctcgttgattccttcagattctgctctcttggttgcaagatctctggaatatcgaagaagaagagaaaggaatggacgaacaatctttcggattctgatgattcgtatagcagtacgagtatcggaaggctcaagaagaatgatgacattatgaataatagtttcacaccatcaacaccgcctttatcagccgtgaatcgtcgaattgcaaagcgaaggaagggaatcccgcatcgtgctcctttcggaggactaatcatagaatactaagaaatggtaatgtatagtcttatgctaataaccatcactagtagtttcggggtacatatatgtatatatatatatatctataatggtatataaagcaatgtaaaataaaagcttaacatcatagtattgtgtagatattaaaggggtaaaaaatgttgggaagatgatagaatgaggcatgaaatgaatacttgtgcctgtatattttgagctcaatggacaaatatgtaaatgtagaatagtgttgtggacaagacaatagtgataagtatgtgatgaatgtgaatggaataaaggtcattttactttcgatg

SEQ ID NO: 102444 - protein, 213 aa, Arabidopsis thaliana
  peptide (1)..(213): Ceres Seq. ID no. 13610320
  misc_feature (9)..(200): Pfam Name: Protein of unknown function, DUF597 Pfam Description: Protein of unknown function, DUF597
  misc_feature (1)..(213): Homolog of NCBI NO: 6714272 NR Description: F6N18.8 [Arabidopsis thaliana]
  misc_feature (1)..(213): Homolog of NCBI NO: 18398555 NR Description: expressed protein [Arabidopsis thaliana]
  misc_feature (1)..(213): Homolog of NCBI NO: 21554139 NR Description: unknown [Arabidopsis thaliana]
  misc_feature (1)..(137): Homolog of NCBI NO: 15236696 NR Description: expressed protein [Arabidopsis thaliana]
  misc_feature (137)..(207): Homolog of NCBI NO: 15236696 NR Description: expressed protein [Arabidopsis thaliana]
  misc_feature (2)..(213): Homolog of NCBI NO: 38346725 NR Description: OSJNBa0086O06.23 [Oryza sativa (japonica
  misc_feature (4)..(213): Homolog of NCBI NO: 37537092 NR Description: unknown protein [Oryza sativa (japonica
  misc_feature (1)..(206): Homolog of NCBI NO: 15237491 NR Description: expressed protein [Arabidopsis thaliana] gene_id:MZA15.12~pir||T05076~similar to unknown protein thaliana] >gi|21593766|gb|AAM65733.1| unknown [Arabidopsis
  misc_feature (4)..(143): Homolog of NCBI NO: 18394936 NR Description: expressed protein [Arabidopsis thaliana] At1g21000/F9H16_1 [Arabidopsis thaliana]
  misc_feature (4)..(143): Homolog of NCBI NO: 25337907 NR Description: hypothetical protein F9H16.1 - Arabidopsis >gi|4836888|gb|AAD30591.1|AC007369_1 Unknown protein [Arabidopsis >gi|13877713|gb|AAK43934.1|AF370615_1 Unknown protein
MGAEEETNKTYPHWLKPLLREKFFVQCKLHADSHKSECNMYCLDCTNGPLCSLCLSFHKDHHAIQIRRSSYHDVIRVSEIQKFLDITGVQTYVINSAKVVFLNERPQPRPGKGVINTCEVCYRSLVDSFRFCSLGCKISGISKKKRKEWTNNLSDSDDSYSSTSIGRLKKNDDIMNNSFTPSTPPLSAVNRRIAKRRKGIPHRAPFGGLIIEY

SEQ ID NO: 102445 - protein, 174 aa, Arabidopsis thaliana
  peptide (1)..(174): Ceres Seq. ID no. 13610321
  misc_feature (1)..(161): Pfam Name: Protein of unknown function, DUF597 Pfam Description: Protein of unknown function, DUF597
  misc_feature (1)..(174): Homolog of NCBI NO: 6714272 NR Description: F6N18.8 [Arabidopsis thaliana]
  misc_feature (1)..(174): Homolog of NCBI NO: 18398555 NR Description: expressed protein [Arabidopsis thaliana]
  misc_feature (1)..(174): Homolog of NCBI NO: 21554139 NR Description: unknown [Arabidopsis thaliana]
  misc_feature (1)..(98): Homolog of NCBI NO: 15236696 NR Description: expressed protein [Arabidopsis thaliana]
  misc_feature (98)..(168): Homolog of NCBI NO: 15236696 NR Description: expressed protein [Arabidopsis thaliana]
  misc_feature (1)..(174): Homolog of NCBI NO: 38346725 NR Description: OSJNBa0086O06.23 [Oryza sativa (japonica
  misc_feature (1)..(174): Homolog of NCBI NO: 37537092 NR Description: unknown protein [Oryza sativa (japonica
  misc_feature (1)..(167): Homolog of NCBI NO: 15237491 NR Description: expressed protein [Arabidopsis thaliana] gene_id:MZA15.12~pir||T05076~similar to unknown protein thaliana] >gi|21593766|gb|AAM65733.1| unknown [Arabidopsis
  misc_feature (1)..(104): Homolog of NCBI NO: 18394936 NR Description: expressed protein [Arabidopsis thaliana] At1g21000/F9H16_1 [Arabidopsis thaliana]
  misc_feature (1)..(104): Homolog of NCBI NO: 25337907 NR Description: hypothetical protein F9H16.1 - Arabidopsis >gi|4836888|gb|AAD30591.1|AC007369_1 Unknown protein [Arabidopsis >gi|13877713|gb|AAK43934.1|AF370615_1 Unknown protein
MYCLDCTNGPLCSLCLSFHKDHHAIQIRRSSYHDVIRVSEIQKFLDITGVQTYVINSAKVVFLNERPQPRPGKGVINTCEVCYRSLVDSFRFCSLGCKISGISKKKRKEWTNNLSDSDDSYSSTSIGRLKKNDDIMNNSFTPSTPPLSAVNRRIAKRRKGIPHRAPFGGLIIEY
